United States Patent Application Publication US 2011/0183924 A1 - sequence listing, part 124

SEQ ID NO: 350512 - DNA, 1924 bp, Homo sapiens
tgttaactgaattcacactgcttctcagataaccacaattgtcagttgtcataaggtaactagaattaaaggtagaaatagctaggacaactcaaaatattttttcaaatctcccctacattgttcctgtgtcagaaaaactcagtctcctgacacatgaggtcagctagctcattagacttgataagtttaaggacaggtgagatgactttccagaagggtctccaataaacttaatttgaaaactgtcttgtcttcacacccctgatgctctgtgctcttgttaccacctccctatcttaccaaatggggttatctgtcatgtattttaattatgaacttagtgaatctcaaatgttaggtaattttatcttaggattgattaaggttttttaaaattatagttgccagttaattattttcctttattgatagaataaaatttgttaaaatagcatttagagatgatcatgtgatagaggattcattatgtgtgctttccatgtgttgctttctacccattgtgtttcctttttttccagatttctcctctttgccctgcccttcagcttttctcagctaggccccactgctctaaggggcatttactacagcacctattaaacttacttgtaactgtctctttttttttttttttcccctttgggccaggtcggggtatgataggtcggggaagagggggctttggaggccgaggccgaggccgtggacgagggagaggtgcccttgctcgccctgtattgaccaaggagcagctggacaaccaattggatgcatatatgtcgaaaacaaaaggacacctggatgctgagttggatgcctacatggcgcagacagatcccgaaaccaatgattgaagcctgcccatcctcccatgagagactcttgttagtcaacacatctgtaaataaccttgagataacagatgagaagaaatctgattgatgctggatggacctatcacaataggctgtggacttacttgccaccagcttgtgcatttagtgtgttccttttactttttgatactgtgttgtatgaaacccttttgtcctttgatttggttttttgtttttgtttttttaggggggagggggggtttcccctcctttgcccagacttctctttgaacacaaatgcattagccttgtggctagaacaccctcttcctacctctgtctcccctcacttgtcatatgctctgacatgctaacatttcttttgttcatccctgttgcccccacagaaacatcccagaaaaaccggtcagtgttccttcctccctgatccttaggtttctgaaatagggttctgttacatcctcttcgatagcctgtttaaaatgtttagaaggtctggagctcaaaaatgcgttcttccacattgataatttagtaaactgagaacattgacatcactacagggcagcataagaggttgcttacatgtggtagcagctctggtttgattcaagttgctaccatgtacattgacagcacatataccataaccagcgtgttgggttgaattgcactttctacctttgtatgagatttacagactttccttctgggtttgtatcatgaccagaggggtactatagggttggtttatactgcaatatagaggatcagaagccatttgatttggtaggtgtgtcagaagggagaatgatggcagacgaactgctggaagaggtcagaagatagccatgctaaaatgcaattatatcctcatgtttatcccaaactaatcttggacttttccactcattagctttgttttgcccttgtttcccttgaaggtttaagttcaaccatattctgtcaactgttcagtttcagtggaatcttgtatttctggttcattataacaaattgttcgcttaaatccaaaaaaaaaa

SEQ ID NO: 350513 - DNA, 3328 bp, Homo sapiens
ggactgggtcattgatttaatatgggggttgaaagtaaagtgaaatatgatgggtgctcaggattctgatttgggtgggtgactacctttcactgaggtaagttatataggaaatggtttctggaaaacgttagtaaggtcagtttttaaacactgaatccaaggttgtcttctggaatatccaaattggttatgaccagaatgtgattcattatactaagctaaaggaatagattaaagaattagcaacagtggccgggtgcagtggctcatgcctgtaaccccagcactttgggggaggcccaggtgggtggatcatttgaggtcaggagtttgagaccagcctggccaacatggtgaaacctaaaaatacaaaaattagccaggtgtggtggcaggtgcttgtaatcccagctgcttgggaggctgaagcaggagaattgcttgaacccggaggcaggggttgcagtgagccaagatcacaccattgcactccagcctgggtggcagagtgagactctgtctcaaaaattaaaaagcaacagtgtatatgcaatagttgcaagatgtaagatcacccaaagagtatgcagagggaaatgagggacagaacccagaaatattaatacccagggagtgaacaggaggaggaccccaagaagttactgagtcagatttttcccactcatccaggtgaaagtttaggtcaataatgtgaaataccagagggattaaatgtctacagaaataaaaccatgtctcacattaagacaaacaagtaggttggagggatattttgaaaggcaaggtgatattaaactttattctgaaagtagtttgttagagaaagaggcatgataagagttgcagttaactgattggaaactatgcagcagatgaaactggaataaaggaaactcatcaggaaatgattatagtaataagggccagaaataagggcttgcttgcctgaactaaaaacaaagaggatacaaaggttctagaaatatttcaaaggaattagctttaattcagcaatactcattgagaatcacctatgcacctggctctgaagatgaagtgctgagtaaacttagacatggaccctgctatcatggagatggcagattattggtcagaatgctcttacctgtcattgtagcaattttgttagatccttaatacctctgaattgctaataaacttgttttggctgaaaaaatagtcctgtgaattttaccatgcagttaaataagaaactaaaagcaaacctaaataccaccaaaaaggttagtagtctgttatatgcattagccttaatctaaggaaatattttattataggtctccttgaagaaaatgatattttcaggaatgctcaagcaggtgttctcatcagcactaatagtcatccaatcttaaggaaaaacagaatatttgatggatttgccgcaggtattgaaattacaaatcacgcaactgcaacactagaaggcaatcagatttttaacaaccggtttggaggcttatttttagcatctggtgttaatgtgacaatgaaagataacaaaataatgaacaatcaagatgccatagaaaaggctgttagtagaggccaatgtttatataaaatatcaagttataccagctatcccatgcatgatttctacagatgtcatacttgtaacaccacagatcgaaatgccatatgtgtgaactgcattaagaagtgccatcagggacatgatgtagagtttattagacatgataggtatgtagcacacttgcttgatatattacccaattactttccccctcacttttctaatatttgggtttcattttgctttaggtttttctgtgactgtggtgctggaacactgtctaatccttgtacattagctggtgagcctacacatgatacagatacactatatgactctgctccacctatagaatctaatacattgcagcacaactgaattccttccctaaagaaaaagtcctgccattgtaacatcataacttaaaacacttttttggaagaagatttaaaatatttgcccatgctacaggaagagactgtattaaaaatggatacacaaggtcagttgacactatgaagctcaagctaccaaaaagaaagtggcaatatattgactcaggatctcaaagctgggtgttttagcattactgtgtaaagacttgaagggacagaagtgaagaaaataagctgcaattttgtacagataccaacttctgaaaagctggtgtttttacaactagcattgaatgcagtccaatttgcagtagtaatcttcaatagacaagcagctttgttgctgcctttatggacatgggtaccaattgcttttgtaatatggtaaaaatgtgagctagcacttctgcgttccttttgatttttttttttaacatgtattcagattgagaaatatgattttaatgctttaatctcatgtagtttgtttttaatttcaagcaaaatcttactgtacttgaatgtgccctgttttgttagcacacctagacttgctgtaactgtactcatgtcccagtatgtacgttctttctatgaaagagaaaacactaatcttaaattatatccagcaatgtttctggtatcctttaagaaaagttaagactattatttccttcccttccctgtgcagcattcaaaatcacccctagaaaaagtgagtgttttaatgagacttcctaggaagggatgcactgtaaaacaaaagtattcttgtaactcagttttgtgaaaggtaaaaaactactatgttttaagtacactttagaaagtctcttcaaaacaaacagtcctgtatttgaactctgttcatagtttttttttgaacagtttagacaaaactgctggaaattaaaccaatttcctgcattaagctgagacaagtatatatacagccctatacagtttcatagcttttcctcccccatttatgtgtattggtgacagtgggtataaaacagcctgaaagtgtatgcatgtaccataacatctagacttaatatattgtggagtattcaataaccattatgtagaaggtagataagaattaaaagggtttaatttcctagaaagaaaatggaaaaatggtcatttttaaaaaataaagtttattagatcataatgttgtctgaatttaccacctttgtcagaagtcaactcaaagcttccaatgtagtcagtctataattccttaatcaaagtcagcaatttatggacagcttcagcatctacagttgacctttcactagccaggcaaacttcccttaaaatt

SEQ ID NO: 350514 - DNA, 703 bp, Homo sapiens
gcaaccaatccccctcagatacaaagggaggactgtaactttagtcttagaaaagggctgttaccttagaactttgtcatgtgtaaaatacagtataaattgttttaaatgatgtatgaggtctcatgctttaaaagatcattagaaaagaattatttcatttctaagcaagcaattaaaaaaataatgtcttccatttgtttacaggataaatgtgcatcctcactaggaaaaaaaagtttgtgtgaaaagctggatccaaccattatcagttttgaaataaattcctttctgaaataaaatattagaaacataagcatttaaacaaaaaattttgtttttcaacatcattttatcctttatataccattacacttacagaatctgacacataatttctctgctgttaagaaatagcagtatgggccgggtgcggtggctcaggtctgtaatcccagcactttgggaggccaaggcaggtggatcacgaggtcaggagttcaagaccagcctggccaagatggtgaaaccccgtctctaccaaaaatacaaaaattagccaagtgcagtggcagaggcctataatcccagctacttgggagcctgaagcaggagaatcacttgaacccgggcagcagaggttgcagtgagccaagaaaacgccactgcattccagcctggacgacagactccgtctcacaaa

SEQ ID NO: 350515 - DNA, 4027 bp, Homo sapiens
atccttaattaaattaatctccccccccccccccccccgcccggcaaatgaactccgtccgagccgccaaccggagacccaggcgagtgtcgcggccgcgcccggtgcagcaacagcagcagcagcccccgcagcagccgccgccgcagccgccccagcagcagccgccccagcagcagcctccgccgccgccgcagcagcagcagcagcagcagcctccgccgccgccaccgccgcctccgccgctgcctcaggagcggaacaacgtcggcgagcgggatgatgatgtgcctgcagatatggttgcagaagaatcaggtcctggtgcacaaaatagtccataccaacttcgtagaaaaactcttttgccgaaaagaacagcgtgtcccacaaagaacagtatggagggcgcctcaacttcaactacagaaaactttggtcatcgtgcaaaacgtgcaagagtgtctggaaaatcacaagatctatcagcagcacctgctgaacagtatcttcaggagaaactgccagatgaagtggttctaaaaatcttctcttacttgctggaacaggatctttgtagagcagcttgtgtatgtaaacgcttcagtgaacttgctaatgatcccaatttgtggaaacgattatatatggaagtatttgaatatactcgccctatgatgcatcctgaacctggaaaattctaccagattaatccagaagagtatgaacatccaaatccctggaaagagagtttccagcagtcgtataaaggtgcacatgtaaagccaggatttgctgaacatttctacagtaaccctgcaagatataaaggaagagaaaatatgttgtattatgatactattgaagatgcccttggtggggtacaagaggctcattttgatggacttatctttgttcattctggaatatatactgatgaatggatatatattgaatctccaatcaccatgattggtgcagcacctgggaaagtggcagacaaagttataattgaaaacactagagattcaaccttcgtttttatggaaggctctgaagatgcttatgttggatatatgacaataaggtttaaccctgatgacaaatctgcacaacaccacaatgcacaccactgcttagagattacagtaaattgtagccctattattgatcactgtatcatccgaagtacatgtacagttggttctgcagtatgtgttagtggtcaaggagcatgtcccaccatcaagcactgtaacatcagtgactgtgaaaatgttggactatatataacagatcatgcacagggaatatatgaggataatgaaatttccaataatgcgttagctgggatttgggttaaaaatcatggaaacccaattattagacggaatcatattcatcatggacgtgatgttggtgtgttcacatttgatcatggcatgggttactttgaaagttgcaatatacacagaaataggatagcaggctttgaagtaaaagcctatgctaaccctacagtggttcgatgtgaaattcaccatgggcagactggaggaatatatgtccatgaaaaaggaagaggacaattcatagagaataaaatctatgcaaacaactttgcaggtgtatggattacctcaaatagtgacccaacaataaggggaaattctatatttaatggaaatcaaggaggagtttacatctttggtgatggacgaggccttattgaaggaaatgacatttatggcaatgcattagcaggaattcaaattaggacaaacagttgtccaattgttcggcataacaaaattcatgatggccagcatggtgggatttatgtgcatgaaaagggacaaggagtaatagaagagaatgaagtttatagtaacactctagctggagtctgggtgacaactggcagcactccagtactgagaagaaaccggatacacagtggcaagcaggttggtgtttatttttatgacaatggacatggagtgctagaagacaatgatatctataatcatatgtattcaggggttcagataaggactggaagcaaccccaaaattagacgcaacaaaatctggggaggacagaatggtggaattctagtttataattctggtctaggctgtatagaagacaatgaaatatttgacaatgcaatggctggagtctggattaagacagatagtaatcctacactaagaagaaataaaatccatgatggaagagatggtggcatctgtatatttaatgggggtcgaggtctccttgaagaaaatgatattttcaggaatgctcaagcaggtgttctcatcagcactaatagtcatccaatcttaaggaaaaacagaatatttgatggatttgccgcaggtattgaaattacaaatcacgcaactgcaacactagaaggcaatcagatttttaacaaccggtttggaggcttatttttagcatctggtgttaatgtgacaatgaaagataacaaaataatgaacaatcaagatgccatagaaaaggctgttagtagaggccaatgtttatataaaatatcaagttataccagctatcccatgcatgatttctacagatgtcatacttgtaacaccacagatcgaaatgccatatgtgtgaactgcattaagaagtgccatcagggacatgatgtagagtttattagacatgataggtttttctgtgactgtggtgctggaacactgtctaatccttgtacattagctggtgagcctacacatgatacagatacactatatgactctgctccacctatagaatctaatacattgcagcacaactgaattccttccctaaagaaaaagtcctgccattgtaacatcataacttaaaacacttttttggaagaagatttaaaatatttgcccatgctacaggaagagactgtattaaaaatggatacacaaggtcagttgacactatgaagctcaagctaccaaaaagaaagtggcaatatattgactcaggatctcaaagctgggtgttttagcattactgtgtaaagacttgaagggacagaagtgaagaaaataagctgcaattttgtacagataccaacttctgaaaagctggtgtttttacaactagcattgaatgcagtccaatttgcagtagtaatcttcaatagacaagcagctttgttgctgcctttatggacatgggtaccaattgcttttgtaatatggtaaaaatgtgagctagcacttctgcgttccttttgatttttttttttaacatgtattcagattgagaaatatgattttaatgctttaatctcatgtagtttgtttttaatttcaagcaaaatcttactgtacttgaatgtgccctgttttgttagcacacctagacttgctgtaactgtactcatgtcccagtatgtacgttctttctatgaaagagaaaacactaatcttaaattatatccagcaatgtttctggtatcctttaagaaaagttaagactattatttccttcccttccctgtgcagcattcaaaatcacccctagaaaaagtgagtgttttaatgagacttcctaggaagggatgcactgtaaaacaaaagtattcttgtaactcagttttgtgaaaggtaaaaaactactatgttttaagtacactttagaaagtctcttcaaaacaaacagtcctgtatttgaactctgttcatagtttttttttgaacagtttagacaaaactgctggaaattaaaccaatttcctgcattaagctgagacaagtatatatacagccctatacagtttcatagcttttcctcccccatttatgtgtattggtgacagtgggtataaaacagcctgaaagtgtatgcatgtaccataacatctagacttaatatattgtggagtattcaataaccattatgtagaaggtagataagaattaaaagggtttaatttcctagaaagaaaatggaaaaatggtcatttttaaaaaataaagtttattagatcata

SEQ ID NO: 350516 - DNA, 4442 bp, Homo sapiens
atccttaattaaattaatctccccccccccccccccccgcccggcaaatgaactccgtccgagccgccaaccggagacccaggcgagtgtcgcggccgcgcccggtgcagcaacagcagcagcagcccccgcagcagccgccgccgcagccgccccagcagcagccgccccagcagcagcctccgccgccgccgcagcagcagcagcagcagcagcctccgccgccgccaccgccgcctccgccgctgcctcaggagcggaacaacgtcggcgagcgggatgatgatgtgcctgcagatatggttgcagaagaatcaggtcctggtgcacaaaatagtccataccaacttcgtagaaaaactcttttgccgaaaagaacagcgtgtcccacaaagaacagtatggagggcgcctcaacttcaactacagaaaactttggtcatcgtgcaaaacgtgcaagagtgtctggaaaatcacaagatctatcagcagcacctgctgaacagtatcttcaggagaaactgccagatgaagtggttctaaaaatcttctcttacttgctggaacaggatctttgtagagcagcttgtgtatgtaaacgcttcagtgaacttgctaatgatcccaatttgtggaaacgattatatatggaagtatttgaatatactcgccctatgatgcatcctgaacctggaaaattctaccagattaatccagaagagtatgaacatccaaatccctggaaagagagtttccagcagtcgtataaaggtgcacatgtaaagccaggatttgctgaacatttctacagtaaccctgcaagatataaaggaagagaaaatatgttgtattatgatactattgaagatgcccttggtggggtacaagaggctcattttgatggacttatctttgttcattctggaatatatactgatgaatggatatatattgaatctccaatcaccatgattggtgcagcacctgggaaagtggcagacaaagttataattgaaaacactagagattcaaccttcgtttttatggaaggctctgaagatgcttatgttggatatatgacaataaggtttaaccctgatgacaaatctgcacaacaccacaatgcacaccactgcttagagattacagtaaattgtagccctattattgatcactgtatcatccgaagtacatgtacagttggttctgcagtatgtgttagtggtcaaggagcatgtcccaccatcaagcactgtaacatcagtgactgtgaaaatgttggactatatataacagatcatgcacagggaatatatgaggataatgaaatttccaataatgcgttagctgggatttgggttaaaaatcatggaaacccaattattagacggaatcatattcatcatggacgtgatgttggtgtgttcacatttgatcatggcatgggttactttgaaagttgcaatatacacagaaataggatagcaggctttgaagtaaaagcctatgctaaccctacagtggttcgatgtgaaattcaccatgggcagactggaggaatatatgtccatgaaaaaggaagaggacaattcatagagaataaaatctatgcaaacaactttgcaggtgtatggattacctcaaatagtgacccaacaataaggggaaattctatatttaatggaaatcaaggaggagtttacatctttggtgatggacgaggccttattgaaggaaatgacatttatggcaatgcattagcaggaattcaaattaggacaaacagttgtccaattgttcggcataacaaaattcatgatggccagcatggtgggatttatgtgcatgaaaagggacaaggagtaatagaagagaatgaagtttatagtaacactctagctggagtctgggtgacaactggcagcactccagtactgagaagaaaccggatacacagtggcaagcaggttggtgtttatttttatgacaatggacatggagtgctagaagacaatgatatctataatcatatgtattcaggggttcagataaggactggaagcaaccccaaaattagacgcaacaaaatctggggaggacagaatggtggaattctagtttataattctggtctaggctgtatagaagacaatgaaatatttgacaatgcaatggctggagtctggattaagacagatagtaatcctacactaagaagaaataaaatccatgatggaagagatggtggcatctgtatatttaatgggggtcgaggtctccttgaagaaaatgatattttcaggaatgctcaagcaggtgttctcatcagcactaatagtcatccaatcttaaggaaaaacagaatatttgatggatttgccgcaggtattgaaattacaaatcacgcaactgcaacactagaaggcaatcagatttttaacaaccggtttggaggcttatttttagcatctggtgttaatgtgacaatgaaagataacaaaataatgaacaatcaagatgccatagaaaaggctgttagtagaggccaatgtttatataaaatatcaagttataccagctatcccatgcatgatttctacagatgtcatacttgtaacaccacagatcgaaatgccatatgtgtgaactgcattaagaagtgccatcagggacatgatgtagagtttattagacatgataggtttttctgtgactgtggtgctggaacactgtctaatccttgtacattagctggtgagcctacacatgatacagatacactatatgactctgctccacctatagaatctaatacattgcagcacaactgaattccttccctaaagaaaaagtcctgccattgtaacatcataacttaaaacacttttttggaagaagatttaaaatatttgcccatgctacaggaagagactgtattaaaaatggatacacaaggtcagttgacactatgaagctcaagctaccaaaaagaaagtggcaatatattgactcaggatctcaaagctgggtgttttagcattactgtgtaaagacttgaagggacagaagtgaagaaaataagctgcaattttgtacagataccaacttctgaaaagctggtgtttttacaactagcattgaatgcagtccaatttgcagtagtaatcttcaatagacaagcagctttgttgctgcctttatggacatgggtaccaattgcttttgtaatatggtaaaaatgtgagctagcacttctgcgttccttttgatttttttttttaacatgtattcagattgagaaatatgattttaatgctttaatctcatgtagtttgtttttaatttcaagcaaaatcttactgtacttgaatgtgccctgttttgttagcacacctagacttgctgtaactgtactcatgtcccagtatgtacgttctttctatgaaagagaaaacactaatcttaaattatatccagcaatgtttctggtatcctttaagaaaagttaagactattatttccttcccttccctgtgcagcattcaaaatcacccctagaaaaagtgagtgttttaatgagacttcctaggaagggatgcactgtaaaacaaaagtattcttgtaactcagttttgtgaaaggtaaaaaactactatgttttaagtacactttagaaagtctcttcaaaacaaacagtcctgtatttgaactctgttcatagtttttttttgaacagtttagacaaaactgctggaaattaaaccaatttcctgcattaagctgagacaagtatatatacagccctatacagtttcatagcttttcctcccccatttatgtgtattggtgacagtgggtataaaacagcctgaaagtgtatgcatgtaccataacatctagacttaatatattgtggagtattcaataaccattatgtagaaggtagataagaattaaaagggtttaatttcctagaaagaaaatggaaaaatggtcatttttaaaaaataaagtttattagatcataatgttgtctgaatttaccacctttgtcagaagtcaactcaaagcttccaatgtagtcagtctataattccttaatcaaagtcagcaatttatggacagcttcagcatctacagttgacctttcactagccaggcaaacttcccgaaataatcgtagtgactgattcatcttctcaaattctcttgcttttctatgtcccttttgaataacttcctctgggagattagcaagccttgctgcattaaagccatagcttttaggacaagctcccttaatgaatttatagaggaacgtaatagtctcctggctggggtcttcacattcattttctaccatgcatgccatatgtcctaggcgcacagcaacattttgagaataatcttctactaatgaatggtagtgagttgaaaataat

SEQ ID NO: 350517 - DNA, 3994 bp, Homo sapiens
atccttaattaaattaatctccccccccccccccccccgcccggcaaatgaactccgtccgagccgccaaccggagacccaggcgagtgtcgcggccgcgcccggtgcagcaacagcagcagcagcccccgcagcagccgccgccgcagccgccccagcagcagccgccccagcagcagcctccgccgccgccgcagcagcagcagcagcagcagcctccgccgccgccaccgccgcctccgccgctgcctcaggagcggaacaacgtcggcgagcgggatgatgatgtgcctgcagatatggttgcagaagaatcaggtcctggtgcacaaaatagtccataccaacttcgtagaaaaactcttttgccgaaaagaacagcgtgtcccacaaagaacagtatggagggcgcctcaacttcaactacagaaaactttggtcatcgtgcaaaacgtgcaagagtgtctggaaaatcacaagatctatcagcagcacctgctgaacagtatcttcaggagaaactgccagatgaagtggttctaaaaatcttctcttacttgctggaacaggatctttgtagagcagcttgtgtatgtaaacgcttcagtgaacttgctaatgatcccaatttgtggaaacgattatatatggaagtatttgaatatactcgccctatgatgcatcctgaacctggaaaattctaccagattaatccagaagagtatgaacatccaaatccctggaaagagagtttccagcagtcgtataaaggtgcacatgtaaagccaggatttgctgaacatttctacagtaaccctgcaagatataaaggaagagaaaatatgttgtattatgatactattgaagatgcccttggtggggtacaagaggctcattttgatggacttatctttgttcattctggaatatatactgatgaatggatatatattgaatctccaatcaccatgattggtgcagcacctgggaaagtggcagacaaagttataattgaaaacactagagattcaaccttcgtttttatggaaggctctgaagatgcttatgttggatatatgacaataaggtttaaccctgatgacaaatctgcacaacaccacaatgcacaccactgcttagagattacagtaaattgtagccctattattgatcactgtatcatccgaagtacatgtacagttggttctgcagtatgtgttagtggtcaaggagcatgtcccaccatcaagcactgtaacatcagtgactgtgaaaatgttggactatatataacagatcatgcacagggaatatatgaggataatgaaatttccaataatgcgttagctgggatttgggttaaaaatcatggaaacccaattattagacggaatcatattcatcatggacgtgatgttggtgtgttcacatttgatcatggcatgggttactttgaaagttgcaatatacacagaaataggatagcaggctttgaagtaaaagcctatgctaaccctacagtggttcgatgtgaaattcaccatgggcagactggaggaatatatgtccatgaaaaaggaagaggacaattcatagagaataaaatctatgcaaacaactttgcaggtgtatggattacctcaaatagtgacccaacaataaggggaaattctatatttaatggaaatcaaggaggagtttacatctttggtgatggacgaggccttattgaaggaaatgacatttatggcaatgcattagcaggaattcaaattaggacaaacagttgtccaattgttcggcataacaaaattcatgatggccagcatggtgggatttatgtgcatgaaaagggacaaggagtaatagaagagaatgaagtttatagtaacactctagctggagtctgggtgacaactggcagcactccagtactgagaagaaaccggatacacagtggcaagcaggttggtgtttatttttatgacaatggacatggagtgctagaagacaatgatatctataatcatatgtattcaggggttcagataaggactggaagcaaccccaaaattagacgcaacaaaatctggggaggacagaatggtggaattctagtttataattctggtctaggctgtatagaagacaatgaaatatttgacaatgcaatggctggagtctggattaagacagatagtaatcctacactaagaagaaataaaatccatgatggaagagatggtggcatctgtatatttaatgggggtcgaggtctccttgaagaaaatgatattttcaggaatgctcaagcaggtgttctcatcagcactaatagtcatccaatcttaaggaaaaacagaatatttgatggatttgccgcaggtattgaaattacaaatcacgcaactgcaacactagaaggcaatcagatttttaacaaccggtttggaggcttatttttagcatctggtgttaatgtgacaatgaaagataacaaaataatgaacaatcaagatgccatagaaaaggctgttagtagaggccaatgtttatataaaatatcaagttataccagctatcccatgcatgatttctacagatgtcatacttgtaacaccacagatcgaaatgccatatgtgtgaactgcattaagaagtgccatcagggacatgatgtagagtttattagacatgataggtttttctgtgactgtggtgctggaacactgtctaatccttgtacattagctggtgagcctacacatgatacagatacactatatgactctgctccacctatagaatctaatacattgcagcacaactgaattccttccctaaagaaaaagtcctgccattgtaacatcataacttaaaacacttttttggaagaagatttaaaatatttgcccatgctacaggaagagactgtattaaaaatggatacacaaggtcagttgacactatgaagctcaagctaccaaaaagaaagtggcaatatattgactcaggatctcaaagctgggtgttttagcattactgtgtaaagacttgaagggacagaagtgaagaaaataagctgcaattttgtacagataccaacttctgaaaagctggtgtttttacaactagcattgaatgcagtccaatttgcagtagtaatcttcaatagacaagcagctttgttgctgcctttatggacatgggtaccaattgcttttgtaatatggtaaaaatgtgagctagcacttctgcgttccttttgatttttttttttaacatgtattcagattgagaaatatgattttaatgctttaatctcatgtagtttgtttttaatttcaagcaaaatcttactgtacttgaatgtgccctgttttgttagcacacctagacttgctgtaactgtactcatgtcccagtatgtacgttctttctatgaaagagaaaacactaatcttaaattatatccagcaatgtttctggtatcctttaagaaaagttaagactattatttccttcccttccctgtgcagcattcaaaatcacccctagaaaaagtgagtgttttaatgagacttcctaggaagggatgcactgtaaaacaaaagtattcttgtaactcagttttgtgaaaggtaaaaaactactatgttttaagtacactttagaaagtctcttcaaaacaaacagtcctgtatttgaactctgttcatagtttttttttgaacagtttagacaaaactgctggaaattaaaccaatttcctgcattaagctgagacaagtatatatacagccctatacagtttcatagcttttcctcccccatttatgtgtattggtgacagtgggtataaaacagcctgaaagtgtatgcatgtaccataacatctagacttaatatattgtggagtattcaataaccattatgtagaaggtagataagaattaaaagggtttaatttcctagaaagaaaatggaaaaatgg

SEQ ID NO: 350518 - DNA, 1571 bp, Homo sapiens
ccgcaattcgtggtggtggtatagaatggggtctcctcctccggcggggtcgaagaaggtggtgttgagtttgcggctgttagtagaggccaatgtttatataaaatatcaagttataccagctatcccatgcatgatttctacagatgtcatacttgtaacaccacagatcgaaatgccatatgtgtgaactgcattaagaagtgccatcagggacatgatgtagagtttattagacatgataggtttttctgtgactgtggtgctggaacactgtctaatccttgtacattagctggtgagcctacacatgatacagatacactatatgactctgctccacctatagaatctaatacattgcagcacaactgaattccttccctaaagaaaaagtcctgccattgtaacatcataacttaaaacacttttttggaagaagatttaaaatatttgcccatgctacaggaagagactgtattaaaaatggatacacaaggtcagttgacactatgaagctcaagctaccaaaaagaaagtggcaatatattgactcaggatctcaaagctgggtgttttagcattactgtgtaaagacttgaagggacagaagtgaagaaaataagctgcaattttgtacagataccaacttctgaaaagctggtgtttttacaactagcattgaatgcagtccaatttgcagtagtaatcttcaatagacaagcagctttgttgctgcctttatggacatgggtaccaattgcttttgtaatatggtaaaaatgtgagctagcacttctgcgttccttttgatttttttttttaacatgtattcagattgagaaatatgattttaatgctttaatctcatgtagtttgtttttaatttcaagcaaaatcttactgtacttgaatgtgccctgttttgttagcacacctagacttgctgtaactgtactcatgtcccagtatgtacgttctttctatgaaagagaaaacactaatcttaaattatatccagcaatgtttctggtatcctttaagaaaagttaagactattatttccttcccttccctgtgcagcattcaaaatcacccctagaaaaagtgagtgttttaatgagacttcctaggaagggatgcactgtaaaacaaaagtattcttgtaactcagttttgtgaaaggtaaaaaactactatgttttaagtacactttagaaagtctcttcaaaacaaacagtcctgtatttgaactctgttcatagtttttttttgaacagtttagacaaaactgctggaaattaaaccaatttcctgcattaagctgagacaagtatatatacagccctatacagtttcatagcttttcctcccccatttatgtgtattggtgacagtgggtataaaacagcctgaaagtgtatgcatgtaccataacatctagacttaatatattgtggagtattcaataaccattatgtagaaggtagataagaattaaaagggtttaatttcctagaaagaaaatggaaaaatggtcatttttaaaaaataaagtttattagatcata

SEQ ID NO: 350519 - DNA, 3451 bp, Homo sapiens
atccttaattaaattaatctccccccccccccccccccgcccggcaaatgaactccgtccgagccgccaaccggagacccaggcgagtgtcgcggccgcgcccggtgcagcaacagcagcagcagcccccgcagcagccgccgccgcagccgccccagcagcagccgccccagcagcagcctccgccgccgccgcagcagcagcagcagcagcagcctccgccgccgccaccgccgcctccgccgctgcctcaggagcggaacaacgtcggcgagcgggatgatgatgtgcctgcagatatggttgcagaagaatcaggtcctggtgcacaaaatagtccataccaacttcgtagaaaaactcttttgccgaaaagaacagcgtgtcccacaaagaacagtatggagggcgcctcaacttcaactacagaaaactttggtcatcgtgcaaaacgtgcaagagtgtctggaaaatcacaagatctatcagcagcacctgctgaacagtatcttcaggagaaactgccagatgaagtggttctaaaaatcttctcttacttgctggaacaggatctttgtagagcagcttgtgtatgtaaacgcttcagtgaacttgctaatgatcccaatttgtggaaacgattatatatggaagtatttgaatatactcgccctatgatgcatcctgaacctggaaaattctaccagattaatccagaagagtatgaacatccaaatccctggaaagagagtttccagcagtcgtataaaggtgcacatgtaaagccaggatttgctgaacatttctacagtaaccctgcaagatataaaggaagagaaaatatgttgtattatgatactattgaagatgcccttggtggggtacaagaggctcattttgatggacttatctttgttcattctggaatatatactgatgaatggatatatattgaatctccaatcaccatgattggtgcagcacctgggaaagtggcagacaaagttataattgaaaacactagagattcaaccttcgtttttatggaaggctctgaagatgcttatgttggatatatgacaataaggtttaaccctgatgacaaatctgcacaacaccacaatgcacaccactgcttagagattacagtaaattgtagccctattattgatcactgtatcatccgaagtacatgtacagttggttctgcagtatgtgttagtggtcaaggagcatgtcccaccatcaagcactgtaacatcagtgactgtgaaaatgttggactatatataacagatcatgcacagggaatatatgaggataatgaaatttccaataatgcgttagctgggatttgggttaaaaatcatggaaacccaattattagacggaatcatattcatcatggacgtgatgttggtgtgttcacatttgatcatggcatgggttactttgaaagttgcaatatacacagaaataggatagcaggctttgaagtaaaagcctatgctaaccctacagtggttcgatgtgaaattcaccatgggcagactggaggaatatatgtccatgaaaaaggaagaggacaattcatagagaataaaatctatgcaaacaactttgcaggtgtatggattacctcaaatagtgacccaacaataaggggaaattctatatttaatggaaatcaaggaggagtttacatctttggtgatggacgaggccttattgaaggaaatgacatttatggcaatgcattagcaggaattcaaattaggacaaacagttgtccaattgttcggcataacaaaattcatgatggccagcatggtgggatttatgtgcatgaaaagggacaaggagtaatagaagagaatgaagtttatagtaacactctagctggagtctgggtgacaactggcagcactccagtactgagaagaaaccggatacacagtggcaagcaggttggtgtttatttttatgacaatggacatggagtgctagaagacaatgatatctataatcatatgtattcaggggttcagataaggactggaagcaaccccaaaattagacgcaacaaaatctggggaggacagaatggtggaattctagtttataattctggtctaggctgtatagaagacaatgaaatatttgacaatgcaatggctggagtctggattaagacagatagtaatcctacactaagaagaaataaaatccatgatggaagagatggtggcatctgtatatttaatgggggtcgaggtctccttgaagaaaatgatattttcaggaatgctcaagcaggtgttctcatcagcactaatagtcatccaatcttaaggaaaaacagaatatttgatggatttgccgcaggtattgaaattacaaatcacgcaactgcaacactagaaggcaatcagatttttaacaaccggtttggaggcttatttttagcatctggtgttaatgtgacaatgaaagataacaaaataatgaacaatcaagatgccatagaaaaggctgttagtagaggccaatgtttatataaaatatcaagttataccagctatcccatgcatgatttctacagatgtcatacttgtaacaccacagatcgaaatgccatatgtgtgaactgcattaagaagtgccatcagggacatgatgtagagtttattagacatgataggtttttctgtgactgtggtgctggaacactgtctaatccttgtacattagctggtgagcctacacatgatacagatacactatatgactctgctccacctatagaatctaatacattgcagcacaactgaattccttccctaaagaaaaagtcctgccattgtaacatcataacttaaaacacttttttggaagaagatttaaaatatttgcccatgctacaggaagagactgtattaaaaatggatacacaaggataaatgtgcatcctcactaggaaaaaaaagtttgtgtgaaaagctggatccaaccattatcagttttgaaataaattcctttctgaaataaaatattagaaacataagcatttaaacaaaaaattttgtttttcaacatcattttatcctttatataccattacacttacagaatctgacacataatttctctgctgttaagaaatagcagtatgggccgggtgcggtggctcaggtctgtaatcccagcactttgggaggccaaggcaggtggatcacgaggtcaggagttcaagaccagcctggccaagatggtgaaaccccgtctctaccaaaaatacaaaaattagccaagtgcagtggcagaggcctataatcccagctacttgggagcctgaagcaggagaatcacttgaacccgggcagcagaggttgcagtgagccaagaaaacgccactgcattccagcctggacgacagactccgtctcacaaa

SEQ ID NO: 350520 - DNA, 3250 bp, Homo sapiens
atccttaattaaattaatctccccccccccccccccccgcccggcaaatgaactccgtccgagccgccaaccggagacccaggcgagtgtcgcggccgcgcccggtgcagcaacagcagcagcagcccccgcagcagccgccgccgcagccgccccagcagcagccgccccagcagcagcctccgccgccgccgcagcagcagcagcagcagcagcctccgccgccgccaccgccgcctccgccgctgcctcaggagcggaacaacgtcggcgagcgggatgatgatgtgcctgcagatatggttgcagaagaatcaggtcctggtgcacaaaatagtccataccaacttcgtagaaaaactcttttgccgaaaagaacagcgtgtcccacaaagaacagtatggagggcgcctcaacttcaactacagaaaactttggtcatcgtgcaaaacgtgcaagagtgtctggaaaatcacaagatctatcagcagcacctgctgaacagtatcttcaggagaaactgccagatgaagtggttctaaaaatcttctcttacttgctggaacaggatctttgtagagcagcttgtgtatgtaaacgcttcagtgaacttgctaatgatcccaatttgtggaaacgattatatatggaagtatttgaatatactcgccctatgatgcatcctgaacctggaaaattctaccagattaatccagaagagtatgaacatccaaatccctggaaagagagtttccagcagtcgtataaaggtgcacatgtaaagccaggatttgctgaacatttctacagtaaccctgcaagatataaaggaagagaaaatatgttgtattatgatactattgaagatgcccttggtggggtacaagaggctcattttgatggacttatctttgttcattctggaatatatactgatgaatggatatatattgaatctccaatcaccatgattggtgcagcacctgggaaagtggcagacaaagttataattgaaaacactagagattcaaccttcgtttttatggaaggctctgaagatgcttatgttggatatatgacaataaggtttaaccctgatgacaaatctgcacaacaccacaatgcacaccactgcttagagattacagtaaattgtagccctattattgatcactgtatcatccgaagtacatgtacagttggttctgcagtatgtgttagtggtcaaggagcatgtcccaccatcaagcactgtaacatcagtgactgtgaaaatgttggactatatataacagatcatgcacagggaatatatgaggataatgaaatttccaataatgcgttagctgggatttgggttaaaaatcatggaaacccaattattagacggaatcatattcatcatggacgtgatgttggtgtgttcacatttgatcatggcatgggttactttgaaagttgcaatatacacagaaataggatagcaggctttgaagtaaaagcctatgctaaccctacagtggttcgatgtgaaattcaccatgggcagactggaggaatatatgtccatgaaaaaggaagaggacaattcatagagaataaaatctatgcaaacaactttgcaggtgtatggattacctcaaatagtgacccaacaataaggggaaattctatatttaatggaaatcaaggaggagtttacatctttggtgatggacgaggccttattgaaggaaatgacatttatggcaatgcattagcaggaattcaaattaggacaaacagttgtccaattgttcggcataacaaaattcatgatggccagcatggtgggatttatgtgcatgaaaagggacaaggagtaatagaagagaatgaagtttatagtaacactctagctggagtctgggtgacaactggcagcactccagtactgagaagaaaccggatacacagtggcaagcaggttggtgtttatttttatgacaatggacatggagtgctagaagacaatgatatctataatcatatgtattcaggggttcagataaggactggaagcaaccccaaaattagacgcaacaaaatctggggaggacagaatggtggaattctagtttataattctggtctaggctgtatagaagacaatgaaatatttgacaatgcaatggctggagtctggattaagacagatagtaatcctacactaagaagaaataaaatccatgatggaagagatggtggcatctgtatatttaatgggggtcgaggtctccttgaagaaaatgatattttcaggaatgctcaagcaggtgttctcatcagcactaatagtcatccaatcttaaggaaaaacagaatatttgatggatttgccgcaggtattgaaattacaaatcacgcaactgcaacactagaaggcaatcagatttttaacaaccggtttggaggcttatttttagcatctggtgttaatgtgacaatgaaagataacaaaataatgaacaatcaagatgccatagaaaaggctgttagtagaggccaatgtttatataaaatatcaagttataccagctatcccatgcatgatttctacagatgtcatacttgtaacaccacagatcgaaatgccatatgtgtgaactgcattaagaagtgccatcagggacatgatgtagagtttattagacatgataggtttttctgtgactgtggtgctggaacactgtctaatccttgtacattagctggataaatgtgcatcctcactaggaaaaaaaagtttgtgtgaaaagctggatccaaccattatcagttttgaaataaattcctttctgaaataaaatattagaaacataagcatttaaacaaaaaattttgtttttcaacatcattttatcctttatataccattacacttacagaatctgacacataatttctctgctgttaagaaatagcagtatgggccgggtgcggtggctcaggtctgtaatcccagcactttgggaggccaaggcaggtggatcacgaggtcaggagttcaagaccagcctggccaagatggtgaaaccccgtctctaccaaaaatacaaaaattagccaagtgcagtggcagaggcctataatcccagctacttgggagcctgaagcaggagaatcacttgaacccgggcagcagaggttgcagtgagccaagaaaacgccactgcattccagcctggacgacagactccgtctcacaaa

SEQ ID NO: 350521 - DNA, 873 bp, Homo sapiens
aacctgggagttcgaggctgcagtgagctgtgatggtgccactgcacttcagccttggcaacaacaacaaaaaaagggccagcatgtcatccctaaagagcagttttcaacagtgctagaggtcatgaactatatttgctttcttacctcatttgcatttctgcaaatgagtctaatttaaggataaacctgtaacattttcatcttttcattgaatgtgccctgttttgttagcacacctagacttgctgtaactgtactcatgtcccagtatgtacgttctttctatgaaagagaaaacactaatcttaaattatatccagcaatgtttctggtatcctttaagaaaagttaagactattatttccttcccttccctgtgcagcattcaaaatcacccctagaaaaagtgagtgttttaatgagacttcctaggaagggatgcactgtaaaacaaaagtattcttgtaactcagttttgtgaaaggtaaaaaactactatgttttaagtacactttagaaagtctcttcaaaacaaacagtcctgtatttgaactctgttcatagtttttttttgaacagtttagacaaaactgctggaaattaaaccaatttcctgcattaagctgagacaagtatatatacagccctatacagtttcatagcttttcctcccccatttatgtgtattggtgacagtgggtataaaacagcctgaaagtgtatgcatgtaccataacatctagacttaatatattgtggagtattcaataaccattatgtagaaggtagataagaattaaaagggtttaatttcctagaaagaaaatggaaaaatggtcatttttaaaaaataaagtttattagatcata

SEQ ID NO: 350522 - DNA, 752 bp, Homo sapiens
atccttaattaaattaatctccccccccccccccccccgcccggcaaatgaactccgtccgagccgccaaccggagacccaggcgagtgtcgcggccgcgcccggtgcagcaacagcagcagcagcccccgcagcagccgccgccgcagccgccccagcagcagccgccccagcagcagcctccgccgccgccgcagcagcagcagcagcagcagcctccgccgccgccaccgccgcctccgccgctgcctcaggagcggaacaacgtcggcgagcgggatgatgatgtgcctgcagatatggttgcagaagaatcaggtcctggtgcacaaaatagtccataccaacttcgtagaaaaactcttttgccgaaaagaacagcgtgtcccacaaagaacagtatggagggcgcctcaacttcaactacagaaaactttggtcatcgtgcaaaacgtgcaagagtgtctggaaaatcacaagatctatcagcagcacctgctgaacagtatcttcaggagaaactgccagatgaagtggttctaaaaatcttctcttacttgctggaacaggatctttgtagagcagcttgtgtatgtaaacgcttcagtgaacttgctaatgatcccaatttgtggctaggcgaagtggctcacgcctataatcccagcactttgggaggctgaagtgggcagattacttgagcccaggagtttgagaccagcctgggcaacatactgggacctcatttctac

SEQ ID NO: 350523 - DNA, 912 bp, Homo sapiens
cctcggatgcgcgtgggcgctgtataaatttatcagaaatcttcgcagatatttctcatctttgttgatacaatccccctcctgtttgtgaaatagtaagtcccacccgtttaattgagtgccctcttcccgttgaaactttcgcactctctttgagaattgtcttttcacgacaaacgcttgctcggttttgtagcccccgcggggcggtcttttcttgtattgtggtgaagagaataatcccacagttctccctaatattttcacttgtgcccccggaagtttctcctcttcagggaatcacctccttatggagccccacttgtttcacacatctataccctatacattgggccccccccgtcggcgccacaacacaaagtggttctatagaagaaggtctttttcaataggggcccaagagcggcccacaaattttttttttttttttttttttttttttttcatttttaaaaaataaagtttattagatcataatgttgtctgaatttaccacctttgtcagaagtcaactcaaagcttccaatgtagtcagtctataattccttaatcaaagtcagcaatttatggacagcttcagcatctacagttgacctttcactagccaggcaaacttcccgaaataatcgtagtgactgattcatcttctcaaattctcttgcttttctatgtcccttttgaataacttcctctgggagattagcaagccttgctgcattaaagccatagcttttaggacaagctcccttaatgaatttatagaggaacgtaatagtctcctggctggggtcttcacattcattttctaccatgcatgccatatgtcctaggcgcacagcaacattttgagaataatcttctactaatgaatggtagtgagttgaaaataat

SEQ ID NO: 350524 - DNA, 285 bp, Homo sapiens
gccgaaaagaacagcgtgtcccacaaagaacagtatggaggtaactttaactgtagttgcttttctttttgtaatgaaagaattttcaagaaacaaaaaagggaatgtcatccttttttagaagtaatgattatggatgataagaatatttgctttactagtttctgttttgtttttgaagggcgcctcaacttcaactacagaaaactttggtcatcgtgcaaaacgtgcaagagtgtctggaaaatcacaagatctatcaggtatttcctgtgggaaagtaac

SEQ ID NO: 350525 - DNA, 433 bp, Homo sapiens
gaggcacaaagaggttaaattacttactcagggtcacacaggaagtggaattcctgggattcaaaatgtggcagctcggctccacaactatagcatagctatactatactgcctgcagctctctgcatctatttacacttctagttctcttaattttgtcttgtaatggtcactaaaattctagtgtaagaattttaaccactacctaatgtaaaatccttactgtattctctaggctcacaaatgttgaccttgtaacttttatttttaaataggcaatgcattagcaggaattcaaattaggacaaacagttgtccaattgttcggcataacaaaattcatgatggccagcatggtgggatttatgtggtaagttaatgtatatagttccctataaactcatgcatcaaaaccagggggataaagggtttc

SEQ ID NO: 350526 - DNA, 332 bp, Homo sapiens
ggaatgttttgcattaatgacatgtttgagaaaagtaatttaagcttttgctttttagatgtcatacttgtaacaccacagatcgaaatgccatatgtgtgaactgcattaagaagtgccatcagggacatgatgtagagtttattagacatgataggtatgtagcacacttgcttgatatattacccaattactttccccctcacttttctaatatttgggtttcattttgctttaggtttttctgtgactgtggtgctggaacactgtctaatccttgtacattagctggtgagcctacacatgatacagatacactatatgactctgct

SEQ ID NO: 350527 - DNA, 738 bp, Homo sapiens
tttgtcagaagtcaactcaaagcttccaatgtagtcagtctataattccttaatcaaagtcagcaatttatggacagcttcagcatctacagttgacctttcactagccaggcaaacttcccttaaaattaaaaaaaaaaaaaaaaaagtttttttgttttttcatagtgcatcatcccttccccttttactgtttctttgaaacttaaggtcagttagttataattccattatagttagttagttaccgaaataatcgtagtgactgattcatcttctcaaattctcttgcttttctatgtcccttttgaataacttcctctgggagattagcaagccttgctgcattaaagccatagcttttaggacaagctcccttaatgaatttatagaggaacgtaatagtctcctggctggggtcttcacattcattttctaccatgcatgccttaagaaagaaaaatattagcgatacatgtgctagcaagagaagtgccctctcaaaaaaccgaatttgtggaaaaaaacaatttgcacataccatatgtcctaggcgcacagcaacattttgagaataatcttctactaatgaatggtagtgagttgaaaataatgtacgacattttatagtctcagcaagttctttaacaactgcatttgctattgccgtcccatcaaatgttgcagtacctcttcctgttaaagtaaaatatgcataaggaagtaactcaaaggaat

SEQ ID NO: 350528 - DNA, 3972 bp, Homo sapiens
atccttaattaaattaatctccccccccccccccccccgcccggcaaatgaactccgtccgagccgccaaccggagacccaggcgagtgtcgcggccgcgcccggtgcagcaacagcagcagcagcccccgcagcagccgccgccgcagccgccccagcagcagccgccccagcagcagcctccgccgccgccgcagcagcagcagcagcagcagcctccgccgccgccaccgccgcctccgccgctgcctcaggagcggaacaacgtcggcgagcgggatgatgatgtgcctgcagatatggttgcagaagaatcaggtcctggtgcacaaaatagtccataccaacttcgtagaaaaactcttttgccgaaaagaacagcgtgtcccacaaagaacagtatggagggcgcctcaacttcaactacagaaaactttggtcatcgtgcaaaacgtgcaagagtgtctggaaaatcacaagatctatcagcagcacctgctgaacagtatcttcaggagaaactgccagatgaagtggttctaaaaatcttctcttacttgctggaacaggatctttgtagagcagcttgtgtatgtaaacgcttcagtgaacttgctaatgatcccaatttgtggaaacgattatatatggaagtatttgaatatactcgccctatgatgcatcctgaacctggaaaattctaccagattaatccagaagagtatgaacatccaaatccctggaaagagagtttccagcagtcgtataaaggtgcacatgtaaagccaggatttgctgaacatttctacagtaaccctgcaagatataaaggaagagaaaatatgttgtattatgatactattgaagatgcccttggtggggtacaagaggctcattttgatggacttatctttgttcattctggaatatatactgatgaatggatatatattgaatctccaatcaccatgattggtgcagcacctgggaaagtggcagacaaagttataattgttggatatatgacaataagtttaaccctgatgacaaatctgcacaacaccacaatgcacaccactgcttagagattacagtaaattgtagccctattattgatcactgtatcatccgaagtacatgtacagttggttctgcagtatgtgttagtggtcaaggagcatgtcccaccatcaagcactgtaacatcagtgactgtgaaaatgttggactatatataacagatcatgcacagggaatatatgaggataatgaaatttccaataatgcgttagctgggatttgggttaaaaatcatggaaacccaattattagacggaatcatattcatcatggacgtgatgttggtgtgttcacatttgatcatggcatgggttactttgaaagttgcaatatacacagaaataggatagcaggctttgaagtaaaagcctatgctaaccctacagtggttcgatgtgaaattcaccatgggcagactggaggaatatatgtccatgaaaaaggaagaggacaattcatagagaataaaatctatgcaaacaactttgcaggtgtatggattacctcaaatagtgacccaacaataaggggaaattctatatttaatggaaatcaaggaggagtttacatctttggtgatggacgaggccttattgaaggaaatgacatttatggcaatgcattagcaggaattcaaattaggacaaacagttgtccaattgttcggcataacaaaattcatgatggccagcatggtgggatttatgtgcatgaaaagggacaaggagtaatagaagagaatgaagtttatagtaacactctagctggagtctgggtgacaactggcagcactccagtactgagaagaaaccggatacacagtggcaagcaggttggtgtttatttttatgacaatggacatggagtgctagaagacaatgatatctataatcatatgtattcaggggttcagataaggactggaagcaaccccaaaattagacgcaacaaaatctggggaggacagaatggtggaattctagtttataattctggtctaggctgtatagaagacaatgaaatatttgacaatgcaatggctggagtctggattaagacagatagtaatcctacactaagaagaaataaaatccatgatggaagagatggtggcatctgtatatttaatgggggtcgaggtctccttgaagaaaatgatattttcaggaatgctcaagcaggtgttctcatcagcactaatagtcatccaatcttaaggaaaaacagaatatttgatggatttgccgcaggtattgaaattacaaatcacgcaactgcaacactagaaggcaatcagatttttaacaaccggtttggaggcttatttttagcatctggtgttaatgtgacaatgaaagataacaaaataatgaacaatcaagatgccatagaaaaggctgttagtagaggccaatgtttatataaaatatcaagttataccagctatcccatgcatgatttctacagatgtcatacttgtaacaccacagatcgaaatgccatatgtgtgaactgcattaagaagtgccatcagggacatgatgtagagtttattagacatgataggtttttctgtgactgtggtgctggaacactgtctaatccttgtacattagctggtgagcctacacatgatacagatacactatatgactctgctccacctatagaatctaatacattgcagcacaactgaattccttccctaaagaaaaagtcctgccattgtaacatcataacttaaaacacttttttggaagaagatttaaaatatttgcccatgctacaggaagagactgtattaaaaatggatacacaaggtcagttgacactatgaagctcaagctaccaaaaagaaagtggcaatatattgactcaggatctcaaagctgggtgttttagcattactgtgtaaagacttgaagggacagaagtgaagaaaataagctgcaattttgtacagataccaacttctgaaaagctggtgtttttacaactagcattgaatgcagtccaatttgcagtagtaatcttcaatagacaagcagctttgttgctgcctttatggacatgggtaccaattgcttttgtaatatggtaaaaatgtgagctagcacttctgcgttccttttgatttttttttttaacatgtattcagattgagaaatatgattttaatgctttaatctcatgtagtttgtttttaatttcaagcaaaatcttactgtacttgaatgtgccctgttttgttagcacacctagacttgctgtaactgtactcatgtcccagtatgtacgttctttctatgaaagagaaaacactaatcttaaattatatccagcaatgtttctggtatcctttaagaaaagttaagactattatttccttcccttccctgtgcagcattcaaaatcacccctagaaaaagtgagtgttttaatgagacttcctaggaagggatgcactgtaaaacaaaagtattcttgtaactcagttttgtgaaaggtaaaaaactactatgttttaagtacactttagaaagtctcttcaaaacaaacagtcctgtatttgaactctgttcatagtttttttttgaacagtttagacaaaactgctggaaattaaaccaatttcctgcattaagctgagacaagtatatatacagccctatacagtttcatagcttttcctcccccatttatgtgtattggtgacagtgggtataaaacagcctgaaagtgtatgcatgtaccataacatctagacttaatatattgtggagtattcaataaccattatgtagaaggtagataagaattaaaagggtttaatttcctagaaagaaaatggaaaaatggtcatttttaaaaaataaagtttattagatcata

SEQ ID NO: 350529 - DNA, 4178 bp, Homo sapiens
atccttaattaaattaatctccccccccccccccccccgcccggcaaatgaactccgtccgagccgccaaccggagacccaggcgagtgtcgcggccgcgcccggtgcagcaacagcagcagcagcccccgcagcagccgccgccgcagccgccccagcagcagccgccccagcagcagcctccgccgccgccgcagcagcagcagcagcagcagcctccgccgccgccaccgccgcctccgccgctgcctcaggagcggaacaacgtcggcgagcgggatgatgatgtgcctgcagatatggttgcagaagaatcaggtcctggtgcacaaaatagtccataccaacttcgtagaaaaactcttttgccgaaaagaacagcgtgtcccacaaagaacagtatggagggcgcctcaacttcaactacagaaaactttggtcatcgtgcaaaacgtgcaagagtgtctggaaaatcacaagatctatcagcagcacctgctgaacagtatcttcaggagaaactgccagatgaagtggttctaaaaatcttctcttacttgctggaacaggatctttgtagagcagcttgtgtatgtaaacgcttcagtgaacttgctaatgatcccaatttgtggaaacgattatatatggaagtatttgaatatactcgccctatgatgcatcctgaacctggaaaattctaccagattaatccagaagagtatgaacatccaaatccctggaaagagagtttccagcagtcgtataaaggtgcacatgtaaagccaggatttgctgaacatttctacagtaaccctgcaagatataaaggaagagaaaatatgttgtattatgatactattgaagatgcccttggtggggtacaagaggctcattttgatggacttatctttgttcattctggaatatatactgatgaatggatatatattgaatctccaatcaccatgattggtgcagcacctgggaaagtggcagacaaagttataattgaaaacactagagattcaaccttcgtttttatggaaggctctgaagatgcttatgttggatatatgacaataaggtttaaccctgatgacaaatctgcacaacaccacaatgcacaccactgcttagagattacagtaaattgtagccctattattgatcactgtatcatccgaagtacatgtacagttggttctgcagtatgtgttagtggtcaaggagcatgtcccaccatcaagcactgtaacatcagtgactgtgaaaatgttggactatatataacagatcatgcacagggaatatatgaggataatgaaatttccaataatgcgttagctgggatttgggttaaaaatcatggaaacccaattattagacggaatcatattcatcatggacgtgatgttggtgtgttcacatttgatcatggcatgggttactttgaaagttgcaatatacacagaaataggatagcaggctttgaagtaaaagcctatgctaaccctacagtggttcgatgtgaaattcaccatgggcagactggaggaatatatgtccatgaaaaaggaagaggacaattcatagagaataaaatctatgcaaacaactttgcaggtgtatggattacctcaaatagtgacccaacaataaggggaaattctatatttaatggaaatcaaggaggagtttacatctttggtgatggacgaggccttattgaaggaaatgacatttatggcaatgcattagcaggaattcaaattaggacaaacagttgtccaattgttcggcataacaaaattcatgatggccagcatggtgggatttatgtgcatgaaaagggacaaggagtaatagaagagaatgaagtttatagtaacactctagctggagtctgggtgacaactggcagcactccagtactgagaagaaaccggatacacagtggcaagcaggttggtgtttatttttatgacaatggacatggagtgctagaagacaatgatatctataatcatatgtattcaggggttcagataaggactggaagcaaccccaaaattagacgcaacaaaatctggggaggacagaatggtggaattctagtttataattctggtctaggctgtatagaagacaatgaaatatttgacaatgcaatggctggagtctggattaagacagatagtaatcctacactaagaagaaataaaatccatgatggaagagatggtggcatctgtatatttaatgggggtcgaggtctccttgaagaaaatgatattttcaggaatgctcaagcaggtgttctcatcagcactaatagtcatccaatcttaaggaaaaacagaatatttgatggatttgccgcaggtattgaaattacaaatcacgcaactgcaacactagaaggcaatcagatttttaacaaccggtttggaggcttatttttagcatctggtgttaatgtgacaatgaaagataacaaaataatgaacaatcaagatgccatagaaaaggctgttagtagaggccaatgtttatataaaatatcaagttataccagctatcccatgcatgatttctacagatgtcatacttgtaacaccacagatcgaaatgccatatgtgtgaactgcattaagaagtgccatcagggacatgatgtagagtttattagacatgataggtttttctgtgactgtggtgctggaacactgtctaatccttgtacattagctggtgagcctacacatgatacagatacactatatgactctgctccacctatagaatctaatacattgcagcacaactgaattccttccctaaagaaaaagtcctgccattgtaacatcataacttaaaacacttttttggaagaagatttaaaatatttgcccatgctacaggaagagactgtattaaaaatggatacacaaggtcagttgacactatgaagctcaagctaccaaaaagaaagtggcaatatattgactcaggatctcaaagctgggtgttttagcattactgtgtaaagacttgaagggacagaagtgaagaaaataagctgcaattttgtacagataccaacttctgaaaagctggtgtttttacaactagcattgaatgcagtccaatttgcagtagtaatcttcaatagacaagcagctttgttgctgcctttatggacatgggtaccaattgcttttgtaatatggtaaaaatgtgagctagcacttctgcgttccttttgatttttttttttaacatgtattcagattgagaaatatgattttaatgctttaatctcatgtagtttgtttttaatttcaagcaaaatcttactgtacttgaatgtgccctgttttgttagcacacctagacttgctgtaactgtactcatgtcccagtatgtacgttctttctatgaaagagaaaacactaatcttaaattatatccagcaatgtttctggtatcctttaagaaaagttaagactattatttccttcccttccctgtgcagcattcaaaatcacccctagaaaaagtgagtgttttaatgagacttcctaggaagggatgcactgtaaaacaaaagtattcttgtaactcagttttgtgaaaggtaaaaaactactatgttttaagtacactttagaaagtctcttcaaaacaaacagtcctgtatttgaactctgttcatagtttttttttgaacagtttagacaaaactgctggaaattaaaccaatttcctgcattaagctgagacaagtatatatacagccctatacagtttcatagcttttcctcccccatttatgtgtattggtgacagtgggtataaaacagcctgaaagtgtatgcatgtaccataacatctagacttaatatattgtggagtattcaataaccattatgtagaaggtagataagaattaaaagggtttaatttcctagaaagaaaatggaaaaatggtcatttttaaaaaataaagtttattagatcataatgttgtctgaatttaccacctttgtcagaagtcaactcaaagcttccaatgtagtcagtctataattccttaatcaaagtcagcaatttatggacagcttcagcatctacagttgacctttcactagccaggcaaacttcccttaaaatt

SEQ ID NO: 350530 - DNA, 2666 bp, Homo sapiens
atccttaattaaattaatctccccccccccccccccccgcccggcaaatgaactccgtccgagccgccaaccggagacccaggcgagtgtcgcggccgcgcccggtgcagcaacagcagcagcagcccccgcagcagccgccgccgcagccgccccagcagcagccgccccagcagcagcctccgccgccgccgcagcagcagcagcagcagcagcctccgccgccgccaccgccgcctccgccgctgcctcaggagcggaacaacgtcggcgagcgggatgatgatgtgcctgcagatatggttgcagaagaatcaggtcctggtgcacaaaatagtccataccaacttcgtagaaaaactcttttgccgaaaagaacagcgtgtcccacaaagaacagtatggagggcgcctcaacttcaactacagaaaactttggtcatcgtgcaaaacgtgcaagagtgtctggaaaatcacaagatctatcagcagcacctgctgaacagtatcttcaggagaaactgccagatgaagtggttctaaaaatcttctcttacttgctggaacaggatctttgtagagcagcttgtgtatgtaaacgcttcagtgaacttgctaatgatcccaatttgtggaaacgattatatatggaagtatttgaatatactcgccctatgatgcatcctgaacctggaaaattctaccagattaatccagaagagtatgaacatccaaatccctggaaagagagtttccagcagtcgtataaaggtgcacatgtaaagccaggatttgctgaacatttctacagtaaccctgcaagatataaaggaagagaaaatatgttgtattatgatactattgaagatgcccttggtggggtacaagaggctcattttgatggacttatctttgttcattctggaatatatactgatgaatggatatatattgaatctccaatcaccatgattggtgcagcacctgggaaagtggcagacaaagttataattgaaaacactagagattcaaccttcgtttttatggaaggctctgaagatgcttatgttggatatatgacaataaggtttaaccctgatgacaaatctgcacaacaccacaatgcacaccactgcttagagattacagtaaattgtagccctattattgatcactgtatcatccgaagtacatgtacagttggttctgcagtatgtgttagtggtcaaggagcatgtcccaccatcaagcactgtaacatcagtgactgtgaaaatgttggactatatataacagatcatgcacagggaatatatgaggataatgaaatttccaataatgcgttagctgggatttgggttaaaaatcatggaaacccaattattagacggaatcatattcatcatggacgtgatgttggtgtgttcacatttgatcatggcatgggttactttgaaagttgcaatatacacagaaataggatagcaggctttgaagtaaaagcctatgctaaccctacagtggttcgatgtgaaattcaccatgggcagactggaggaatatatgtccatgaaaaaggaagaggacaattcatagagaataaaatctatgcaaacaactttgcaggtgtatggattacctcaaatagtgacccaacaataaggggaaattctatatttaatggaaatcaaggaggagtttacatctttggtgatggacgaggccttattgaaggaaatgacatttatggcaatgcattagcaggaattcaaattaggacaaacagttgtccaattgttcggcataacaaaattcatgatggccagcatggtgggatttatgtgcatgaaaagggacaaggagtaatagaagagaatgaagtttatagtaacactctagctggagtctgggtgacaactggcagcactccagtactgagaagaaaccggatacacagtggcaagcaggttggtgtttatttttatgacaatggacatggagtgctagaagacaatgatatctataatcatatgtattcaggggttcagataaggactggaagcaaccccaaaattagacgcaacaaaatctggggaggacagaatggtggaattctagtttataattctggtctaggctgtatagaagacaatgaaatatttgacaatgcaatggctggagtctggattaagacagatagtaatcctacactaagaagaaataaaatccatgatggaagagatggtggcatctgtatatttaatgggggtcgaggtattgttgttaattttgcattagtgaaaaatccagttttccattattcttccatatctttaatgatcaatgacattgctaactaagttataaatgagtgaatctcaagtctttttccttatcaagttgaactggtttaggagattagtgcctagagttaagagacaaatgtttacaatacttttccttttgtagccactttgagtctgcagttgtcagtaagcctttttaaagatagaatttgtttacattctctggaccttttaaaattcagaatagtaatatgattataataaacttcaaagtcaagttatagaaatagatgtgagaaattgatctgtaaatatctgaaaatgtctttagtaaacgggtattgcttttgtaactgtttt

SEQ ID NO: 350531 - DNA, 2246 bp, Homo sapiens
atccttaattaaattaatctccccccccccccccccccgcccggcaaatgaactccgtccgagccgccaaccggagacccaggcgagtgtcgcggccgcgcccggtgcagcaacagcagcagcagcccccgcagcagccgccgccgcagccgccccagcagcagccgccccagcagcagcctccgccgccgccgcagcagcagcagcagcagcagcctccgccgccgccaccgccgcctccgccgctgcctcaggagcggaacaacgtcggcgagcgggatgatgatgtgcctgcagatatggttgcagaagaatcaggtcctggtgcacaaaatagtccataccaacttcgtagaaaaactcttttgccgaaaagaacagcgtgtcccacaaagaacagtatggagggcgcctcaacttcaactacagaaaactttggtcatcgtgcaaaacgtgcaagagtgtctggaaaatcacaagatctatcagcagcacctgctgaacagtatcttcaggagaaactgccagatgaagtggttctaaaaatcttctcttacttgctggaacaggatctttgtagagcagcttgtgtatgtaaacgcttcagtgaacttgctaatgatcccaatttgtggaaacgattatatatggaagtatttgaatatactcgccctatgatgcatcctgaacctggaaaattctaccagattaatccagaagagtatgaacatccaaatccctggaaagagagtttccagcagtcgtataaaggtgcacatgtaaagccaggatttgctgaacatttctacagtaaccctgcaagatataaaggaagagaaaatatgttgtattatgatactattgaagatgcccttggtggggtacaagaggctcattttgatggacttatctttgttcattctggaatatatactgatgaatggatatatattgaatctccaatcaccatgattggtgcagcacctgggaaagtggcagacaaagttataattgaaaacactagagattcaaccttcgtttttatggaaggctctgaagatgcttatgttggatatatgacaataaggtttaaccctgatgacaaatctgcacaacaccacaatgcacaccactgcttagagattacagtaaattgtagccctattattgatcactgtatcatccgaagtacatgtacagttggttctgcagtatgtgttagtggtcaaggagcatgtcccaccatcaagcactgtaacatcagtgactgtgaaaatgttggactatatataacagatcatgcacagggaatatatgaggataatgaaatttccaataatgcgttagctgggatttgggttaaaaatcatggaaacccaattattagacggaatcatattcatcatggacgtgatgttggtgtgttcacatttgatcatggcatgggttactttgaaagttgcaatatacacagaaataggatagcaggctttgaagtaaaagcctatgctaaccctacagtggttcgatgtgaaattcaccatgggcagactggaggaatatatgtccatgaaaaaggaagaggacaattcatagagaataaaatctatgcaaacaactttgcaggtgtatggattacctcaaatagtgacccaacaataaggggaaattctatatttaatggaaatcaaggaggagtttacatctttggtgatggacgaggccttattgaaggaaatgacatttatggcaatgcattagcaggaattcaaattaggacaaacagttgtccaattgttcggcataacaaaattcatgatggccagcatggtgggatttatgtgcatgaaaagggacaaggagtaatagaagagaatgaagtttatagtaacactctagctggagtctgggtgacaactggcagcactccagtactgagaagaaaccggatacacagtggcaagcaggttggtgtttatttttatgacaatggacatggagtgctagaagacaatgatatctataatcatatgtattcaggggttcagataaggtaaatgttttcatatttggctatcttttgggagggagttaggagtatgtggggtgtgtaaaagaaatttgcttattgtttaatgcccaatctttatccccctattgtatatatattcacattcttaaaataatcttgacttaaattgtcagaatgtagctttccttggtctaggtgaggacagaagccactg

SEQ ID NO: 350532 - DNA, 1571 bp, Homo sapiens
  misc_feature (1489)..(1489): n is a, c, g, or t
atccttaattaaattaatctccccccccccccccccccgcccggcaaatgaactccgtccgagccgccaaccggagacccaggcgagtgtcgcggccgcgcccggtgcagcaacagcagcagcagcccccgcagcagccgccgccgcagccgccccagcagcagccgccccagcagcagcctccgccgccgccgcagcagcagcagcagcagcagcctccgccgccgccaccgccgcctccgccgctgcctcaggagcggaacaacgtcggcgagcgggatgatgatgtgcctgcagatatggttgcagaagaatcaggtcctggtgcacaaaatagtccataccaacttcgtagaaaaactcttttgccgaaaagaacagcgtgtcccacaaagaacagtatggagggcgcctcaacttcaactacagaaaactttggtcatcgtgcaaaacgtgcaagagtgtctggaaaatcacaagatctatcagcagcacctgctgaacagtatcttcaggagaaactgccagatgaagtggttctaaaaatcttctcttacttgctggaacaggatctttgtagagcagcttgtgtatgtaaacgcttcagtgaacttgctaatgatcccaatttgtggaaacgattatatatggaagtatttgaatatactcgccctatgatgcatcctgaacctggaaaattctaccagattaatccagaagagtatgaacatccaaatccctggaaagagagtttccagcagtcgtataaaggtgcacatgtaaagccaggatttgctgaacatttctacagtaaccctgcaagatataaaggaagagaaaatatgttgtattatgatactattgaagatgcccttggtggggtacaagaggctcattttgatggacttatctttgttcattctggaatatatactgatgaatggatatatattgaatctccaatcaccatgattggtgcagcacctgggaaagtggcagacaaagttataattgaaaacactagagattcaaccttcgtttttatggaaggctctgaagatgcttatgttggatatatgacaataaggtttaaccctgatgacaaatctgcacaacaccacaatgcacaccactgcttagagattacagtaaattgtagccctattattgatcactgtatcatccgaagtacatgtacagttggttctgcagtatgtgttagtggtcaaggagcatgtcccaccatcaagcactgtaacatcagtgactgtgaaaatgttggactatatataacagatcatgcacagggaatatatgaggataatgaaatttccaataatgcgttagctgggatttgcgtagtgtcacattgatcatggcatgcgtactttgaagtgcatataccagaataggaagcagcttgagtaaagctatgtaacctacagtgttcatggaattcacatggcagactgaggaattatgtcatganaaggagaggcattcatgaggataaatctatcaacaactttcagtgattgatacctaatagtgcccccataagggattctttt

SEQ ID NO: 350533 - DNA, 585 bp, Homo sapiens
atccttaattaaattaatctccccccccccccccccccgcccggcaaatgaactccgtccgagccgccaaccggagacccaggcgagtgtcgcggccgcgcccggtgcagcaacagcagcagcagcccccgcagcagccgccgccgcagccgccccagcagcagccgccccagcagcagcctccgccgccgccgcagcagcagcagcagcagcagcctccgccgccgccaccgccgcctccgccgctgcctcaggagcggaacaacgtcggcgagcgggatgatgatgtgcctgcagatatggttgcagaagaatcaggtcctggtgcacaaaatagtccataccaacttcgtagaaaaactcttttgccgaaaagaacagcgtgtcccacaaagaacagtatggagggcgcctcaacttcaactacagaaaactttggtcatcgtgcaaaacgtgcaagagtgtctggaaaatcacaagatctatcaggtatttcctgtgggaaagtaacaaatagggtaaaataattttttttaattttgcttgataccaaaaaatgaaaattaagtgtattcgagtattacc

SEQ ID NO: 350534 - DNA, 2616 bp, Homo sapiens
cggggtcagcaccgcggagacccccctcgcccggccccgcgacagcctccgagcgcccccggatcatggccaccgaggtccacaatctgcaggagctccggcgaagtgcctcactggccaccaaggtctttatccagagagactacagcgatgggaccatctgtcagttccagaccaaattccccccagagctggacagccggatcgagcggcagctctttgaagagactgtgaagaccctcaacggattttacgcagaggctgagaagattgggggcagctcctacctcgagggctgcctggcctgcgccacggcctacttcatcttcctctgcatggagacccactatgagaaggttctcaagaagatttcccgctacatccaggagcagaatgagaagatctttgcacctcgaggcctcctacttacagaccctgtggagcgtgggatgagggttattgagatctccatctacgaggaccggtgcagcagtggcagctccagcagcggcagcagcagcggcagtggcagcagcagcggtgggggtggtggggcgggggcccggtgactggccgagagtccctgtagggaggtgtatggccggagtgagggccttgcagacctgcggcggctgcgctaccagagcacccgcttctgagtcattctttgggctcaccctgctgcccggggtgggagggagggtgacgggcctcatatttcctgtgggccatcaacctatgccccctgtccctcacccccgtctggatcagtccatttcctgacctgggggcttttccttcccgatggggctggtctgggccacacagagacagatcttcctaggaaggctggggtggggagaacacaacctaggcggcccctctcttccacagcccctctcccaaccctgcgaggggggccgaggcctgccacatagaggactcccacactgcatgacccctcatcccaaacccatatccaccaggactctttcccttgggccctgcgtcccgtggctgtctcccagtatctgttccttctcatgcccctgcagggccccggcctgtctatgatcctgcctccaccaaattcaaggtgtggggagacgggtgccgtggttgggagctgttcagcgcactcctgacctcttctagacctatggctttcctgtcctgcattcagagctagaggccagctcggccttgcgagaagcatccaactttgagactttgcaggctgccaggtgctggttggggggcacagagcctggggctctggggaggtaatatgggggtctgggaaactccgtgaagagacatagccatgcggggcctgaatctcctgaactacagccagtttcctgagattagaacctgtgtgtatgcacatgtgaatgtatgtgtgagtgcacatgtgtgtaagtgcagtgtgcgtaaatgtgtgagtctgcgtgtgttagcatgcctgtatgtgagcgcgtgtgtgagcgcatgtgtgtgcaccagtgcacaagtgtatgaatgtggacacatttataagcacacctgtgtgtgtctgagtacatgtgcacacacgtgtgcacaaatgtgcatttatatgagtgtgagtgcatgcatgtgcatgaacatgtgtgcacaagcatgtgtgtatgagtgttcatgtgtatgagtgtgtgtgtatgcaggtgagtgcatgtgtgtgtgagtgtgtttgtgtgttccccttggctgccaggccaacgactgcttctctgcatcctgctgtcttcgctacctgagggtctgtgacttcttccctgtgtgggtccagcctgaccccctgtaagtaaatgtccaaaagccccttgcccctcccctagggctaccagggaacatactctactgcatatgttctagtggaagagaagccggggttctaggaaagaagagccaaactttggtggcctttggtgccccctctcagctccccatgacaagacaacggggctgcagacactgtgtgttcagcctgcccaggggctggggctctttaaggctttgtaggtgaggtttccatggaccttcaaaggtgccagcagcctgcaggggaaaggcaaactccctccttgcaaggaaaggagatgtccagccaatgatgcccggcttctgaggcccagaggagcaggtgggatgggagcagcccctggggctggtgtcccgaagatgaaatgaagggggctgcctatctcagttggcgggaggtgttagaagtggatgtgcaagaccagccactggaggtagctctctggagtcaaagagaggcctgcttttctaccagacatgggagcagcatgtaggatacaagggcctacccagagaccagagagagtcagcctagtccttgcagcctcaggaagtcctcggcccaagtgagtcctggtccaaggatccccctggagagccgcagttcagtgggctccaccgcagcccctggccacggcctatgccctccctgggcccctgtggggctgggcattgtgtctgacctgtgcatctcccatgggagggctgggcacaggcagtgctatggccttttttttttttttctttttccaataaaagaacttgcccagcgtg

SEQ ID NO: 350535 - DNA, 2902 bp, Homo sapiens
cggggtcagcaccgcggagacccccctcgcccggccccgcgacagcctccgagcgcccccggatcatggccaccgaggtccacaatctgcaggagctccggcgaagtgcctcactggccaccaaggtctttatccagagagactacagcgatgggaccatctgtcagttccagaccaaattccccccagagctggacagccggatcgagcggcagctctttgaagagactgtgaagaccctcaacggattttacgcagaggctgagaagattgggggcagctcctacctcgagggctgcctggcctgcgccacggcctacttcatcttcctctgcatggagacccactatgagaaggttctcaagaagatttcccgctacatccaggagcagaatgagaagatctttgcacctcgaggcctcctacttacagaccctgtggagcgtgggatgagggttattgagatctccatctacgaggaccggtgcagcagtggcagctccagcagcggcagcagcagcggcagtggcagcagcagcggtgggggtggtggggcgggggcccggtgactggccgagagtccctgtagggaggtgtatggccggagtgagggccttgcagacctgcggcggctgcgctaccagagcacccgcttctgagtcattctttgggctcaccctgctgcccggggtgggagggagggtgacgggcctcatatttcctgtgggccatcaacctatgccccctgtccctcacccccgtctggatcagtccatttcctgacctgggggcttttccttcccgatggggctggtctgggccacacagagacagatcttcctaggaaggctggggtggggagaacacaacctaggcggcccctctcttccacagcccctctcccaaccctgcgaggggggccgaggcctgccacatagaggactcccacactgcatgacccctcatcccaaacccatatccaccaggactctttcccttgggccctgcgtcccgtggctgtctcccagtatctgttccttctcatgcccctgcagggccccggcctgtctatgatcctgcctccaccaaattcaaggtgtggggagacgggtgccgtggttgggagctgttcagcgcactcctgacctcttctagacctatggctttcctgtcctgcattcagagctagaggccagctcggccttgcgagaagcatccaactttgagactttgcaggctgccaggtgctggttggggggcacagagcctggggctctggggaggtaatatgggggtctgggaaactccgtgaagagacatagccatgcggggcctgaatctcctgaactacagccagtttcctgagattagaacctgtgtgtatgcacatgtgaatgtatgtgtgagtgcacatgtgtgtaagtgcagtgtgcgtaaatgtgtgagtctgcgtgtgttagcatgcctgtatgtgagcgcgtgtgtgagcgcatgtgtgtgcaccagtgcacaagtgtatgaatgtggacacatttataagcacacctgtgtgtgtctgagtacatgtgcacacacgtgtgcacaaatgtgcatttatatgagtgtgagtgcatgcatgtgcatgaacatgtgtgcacaagcatgtgtgtatgagtgttcatgtgtatgagtgtgtgtgtatgcaggtgagtgcatgtgtgtgtgagtgtgtttgtgtgttccccttggctgccaggccaacgactgcttctctgcatcctgctgtcttcgctacctgagggtctgtgacttcttccctgtgtgggtccagcctgaccccctgtaagtaaatgtccaaaagccccttgcccctcccctagggctaccagggaacatactctactgcatatgttctagtggaagagaagccggggttctaggaaagaagagccaaactttggtggcctttggtgccccctctcagctccccatgacaagacaacggggctgcagacactgtgtgttcagcctgcccaggggctggggctctttaaggctttgtaggtgaggtttccatggaccttcaaaggtgccagcagcctgcaggggaaaggcaaactccctccttgcaaggaaaggagatgtccagccaatgatgcccggcttctgaggcccagaggagcaggtgggatgggagcagcccctggggctggtgtcccgaagatgaaatgaagggggctgcctatctcagttggcgggaggtgttagaagtggatgtgcaagaccagccactggaggtagctctctggagtcaaagagaggcctgcttttctaccagacatgggagcagcatgtaggatacaagggcctacccagagaccagagagagtcagcctagtccttgcagcctcaggaagtcctcggcccaagtgagtcctggtccaaggatccccctggagagccgcagttcagtgggctccaccgcagcccctggccacggcctatgccctccctgggcccctgtggggctgggcattgtgtctgacctgtgcatctcccatgggagggctgggcacaggcagtgctatggccttttttttttttttctttttccaataaaagaacttgcccagcgtgaagctctgtgatgctttctctgccccgtgacgatggagggtcagttctatgctccaggaccacatgaggggatactcagctgcctgaactggacctgacatggggagcaggatgaactctgtcttcttggagcttgcagtctactgaagaggcagacacctcagcatctctaatctggaatctttggggcacttgtagccttgggtgggggaacaggttggactgaaagcgaggccaaaagtaatcaattaatgatatcaataaatcctcatttcttgagctcttc

SEQ ID NO: 350536 - DNA, 2414 bp, Homo sapiens
cggggtcagcaccgcggagacccccctcgcccggccccgcgacagcctccgagcgcccccggatcatggccaccgaggtccacaatctgcaggagctccggcgaagtgcctcactggccaccaaggtctttatccagagagactacagcgatgggaccatctgtcagttccagaccaaattccccccagagctggacagccggatcgagcggcagctctttgaagagactgtgaagaccctcaacggattttacgcagaggctgagaagattgggggcagctcctacctcgagggctgcctggcctgcgccacggcctacttcatcttcctctgcatggagacccactatgagaaggttctcaagaagatttcccgctacatccaggagcagaatgagaagatctttgcacctcgaggcctcctacttacagaccctgtggagcgtgggatgagggttattgagatctccatctacgaggaccggtgcagcagtggcagctccagcagcggcagcagcagcggcagtggcagcagcagcggtgggggtggtggggcgggggcccggtgactggccgagagtccctgtagggaggtgtatggccggagtgagggccttgcagacctgcggcggctgcgctaccagagcacccgcttctgagtcattctttgggctcaccctgctgcccggggtgggagggagggtgacgggcctcatatttcctgtgggccatcaacctatgccccctgtccctcacccccgtctggatcagtccatttcctgacctgggggcttttccttcccgatggggctggtctgggccacacagagacagatcttcctaggaaggctggggtggggagaacacaacctaggcggcccctctcttccacagcccctctcccaaccctgcgaggggggccgaggcctgccacatagaggactcccacactgcatgacccctcatcccaaacccatatccaccaggactctttcccttgggccctgcgtcccgtggctgtctcccagtatctgttccttctcatgcccctgcagggccccggcctgtctatgatcctgcctccaccaaattcaaggtgtggggagacgggtgccgtggttgggagctgttcagcgcactcctgacctcttctagacctatggctttcctgtcctgcattcagagctagaggccagctcggccttgcgagaagcatccaactttgagactttgcaggctgccaggtgctggttggggggcacagagcctggggctctggggaggtaatatgggggtctgggaaactccgtgaagagacatagccatgcggggcctgaatctcctgaactacagccagtttcctgagattagaacctgtgtgtatgcacatgtgaatgtatgtgtgagtgcacatgtgtgtaagtgcagtgtgcacaagcatgtgtgtatgagtgttcatgtgtatgagtgtgtgtgtatgcaggtgagtgcatgtgtgtgtgagtgtgtttgtgtgttccccttggctgccaggccaacgactgcttctctgcatcctgctgtcttcgctacctgagggtctgtgacttcttccctgtgtgggtccagcctgaccccctgtaagtaaatgtccaaaagccccttgcccctcccctagggctaccagggaacatactctactgcatatgttctagtggaagagaagccggggttctaggaaagaagagccaaactttggtggcctttggtgccccctctcagctccccatgacaagacaacggggctgcagacactgtgtgttcagcctgcccaggggctggggctctttaaggctttgtaggtgaggtttccatggaccttcaaaggtgccagcagcctgcaggggaaaggcaaactccctccttgcaaggaaaggagatgtccagccaatgatgcccggcttctgaggcccagaggagcaggtgggatgggagcagcccctggggctggtgtcccgaagatgaaatgaagggggctgcctatctcagttggcgggaggtgttagaagtggatgtgcaagaccagccactggaggtagctctctggagtcaaagagaggcctgcttttctaccagacatgggagcagcatgtaggatacaagggcctacccagagaccagagagagtcagcctagtccttgcagcctcaggaagtcctcggcccaagtgagtcctggtccaaggatccccctggagagccgcagttcagtgggctccaccgcagcccctggccacggcctatgccctccctgggcccctgtggggctgggcattgtgtctgacctgtgcatctcccatgggagggctgggcacaggcagtgctatggccttttttttttttttctttttccaataaaagaacttgcccagcgtg

SEQ ID NO: 350537 - DNA, 506 bp, Homo sapiens
aagaaaaaaaaggcaggtctcacaatcccttggttcaactgattgtcggctaagattttacttagtaagtaattttgtaccagtactaatacgcaatatttgacgaacatcttcccctttttttttttttttgagatagagtctcactctatcacccaggctggatgacatgctgtctcaataaataaatacattcatctgaaaatgatgaggacagacacaaacacaaagaaagccatcaagaagcagaagtcactcaagatacaggtctcgtgaaaggcatcatcgtagtagagggaaaagaagtagtctcaatccagaagcagagagaagaacgatcatgatctagaagcaggaaaagaaaaccatgggctggacatggtgcttcacacctgtaatcccagcactttgggaggccaagtcaggcagatcacctgagattcaggagtttgagaccaacctggccaacatggcaaaaccctgtctctactaaaaatgcaaaaatt

SEQ ID NO: 350538 - DNA, 811 bp, Homo sapiens
  misc_feature (648)..(648): n is a, c, g, or t
  misc_feature (704)..(704): n is a, c, g, or t
  misc_feature (721)..(721): n is a, c, g, or t
aagaaaaaaaaggcaggtctcacaatcccttggttcaactgattgtcggctaagattttacttagtaagtaattttgtaccagtactaatacgcaatatttgacgaacatcttcccctttttttttttttttgagatagagtctcactctatcacccaggctggatgacatgctgtctcaataaataaatacattcatctgaaaatgatgaggacagacacaaacacaaagaaagccatcaagaagcagaagtcactcaagatacaggtctcgtgaaaggcatcatcgtagtagagggaaaagaagtagtctcaatccagaagcagagagaagaacgatcatgatctagaagcaggaaaagaaaaccatgggctggacatggtgcttcacacctgtaatcccagcctcattgagcttttaatcaaataattttcatgctctgagttattaattaatggcactttcaagtattacttacctcaatccaaacttaatatgttaattgacaagagtattgccacatatgacatatatatatatatatataagaaagttgtccttatccagccgttaagtgttcaaaatctaataaaattttctacttggaatctcataagaaacatcaggtccatggacaacaacatcagntctctgggtcattcctttctggcactgggctaaggacatcaaacttcagatgctgnggttcatttcatcaagngctgaacagttttgaaatttctcttggcccttaaacattcacagtgtggagggtacgtcactttttggacagttaacagatgacctaagc

SEQ ID NO: 350539 - DNA, 380 bp, Homo sapiens
ctaaagggtgaatcatgtttaagaaggtcaacaggattgagcacaagaggaataagacagaaaaaccaaaaaagcttaatccatggattccacgcatcttcaaccacaaatgctttgtcaccttccttactggctgctatagttgcctctggaaattcagacaatgggaaaaaactaaagttggattttgttgctgcacttgggtacagactgataaggagctggaccacattttctcagatgcggggagcataggctgactgctgggccccatgagggctctttatggtctccaggactggggatgctagggctccatttcttccataaaagtattgcaccaatgttaaacttactgaaacatgtacttgctttcttca

SEQ ID NO: 350540 - DNA, 390 bp, Homo sapiens
actgcagaagatcttttcttttgccttttggtaactagcctaacaaattttacattttatcaaaataattcctatgctattactattaagttttggtttgcttaggaaaaaactgagattaaaatttttcaattgattattacatccataaattaaccattaatgtcaaagacacattgatgcaagaccagaatatgtgccactgtgtcagattaacaaggttttcttgaagcattaactccatagtaaaggttataaaaggcttgttgaagttatatcttacaatcaagattaaaatgttatagagtgtttatacaatattgaaaaacaaatttaactggcttcgtgctgttctttttttattttttgagacaaagtctgtcacccagg

SEQ ID NO: 350541 - DNA, 1655 bp, Homo sapiens
ttgtcggcgttcgcggttgtttggccatccagtgccttccgcagcgccgctaaagcgcagttctcgttggtgtaactttttcttttttttttcagccacttccggctcctgcgtcgctccggaagcctgcgagttccggaagccttggtaatccagattcggctaggaaaagacaagctttccagagaatgtttcagagaaagttacgtggagcgtgggcgtttcgcagactcctaagtggtctggaacctaacctgcagtgtctctgagcttctggcaagtatgaggcaaggatttcacagaagaacttggagcaaaaattcccactgtcatagctataggctgtccagtcttgagggagctgcaggaacaggaaaaagagaccttcagagaagacatggcttccagaaaagagaatgcgaagagtgcaaacagagtgctaagaataagccagttggatgcacttgaactaaacaaggccctggagcagctagtttggtcccagtttactcagtgctttcatggatttaaacctgggctgttagctcgctttgagccagaggtgaaagcgtgcttatgggttttcttgtggagattcaccatctactccaaaaatgccacagtgggacagtcagttttgaatattaagtacaaaaatgatttttcccctaacctgagatatcagccacccagtaaaaatcaaaaaatctggtatgctgtttgtacaattggtggcaggtggttagaagaacgatgctatgatttgtttcgaaaccatcatttagcatcatttgggaaagtcaagcagtgtgtgaattttgtgattggacttttgaaattaggtgggctgattaattttttgattttccttcagaggggaaagtttgcaactttgacagaacgtctcctaggtattcattctgtattttgcaagcctcaaaacatacgtgaagttggctttgaatacatgaatagggaacttctctggcatggttttgctgaatttctgatttttctcttaccacttatcaatgtccagaagttgaaagccaagctgtcttcatggtgtattcctcttactggtgcacctaatagtgacaatacattagccaccagtggcaaagaatgcgctctatgtggagagtggcccaccatgcctcacaccataggatgtgagcatattttctgttatttctgtgctaagagtagtttcttatttgacgtgtactttacttgtcctaagtgtggcacagaagtacacagtctgcagccactgaaatcaggaatcgagatgtcagaagtaaatgctctttagaaactaaaattgcttcctttgaggaaaaaaatgcaccgtgtttaaattcttaatattagtcatcctaagtataccatttatgtatcctttataaggaatgtgctcctagccactgtcttctcctttccaggcatgactgaaatctaatcactggaaaccatgtgattctaaatatattatgtaaatgttaatgtattatgttttttaaatcattgcattcaatttttaatgtcaagaataatggacagcttttgtcaggtgactactaacaatgctccttcattttactacttcttaaaacaaggttggattctaaagataaagattttggagactctgg

SEQ ID NO: 350542 - DNA, 628 bp, Homo sapiens
cagggtctgacctaggattttgtatttcttccagatatcaacacaaaatgtcgacgtttctgagtattgttatggtttggctgccaataagagacaatgcaaacttgaatctcaactgagacctaatctaaatagtcacagttggtcaggcgccatggctcaagcctgtaatcccagcactctgggaggccgaggtgggtggatcacctgaggtcaggagcttgagaccagcctgaccaacatggcaaaaccccgtctctactaaaaaatgtaaaaattagctgggtgtggtggtgtacacctttcccagctacttgggaggcggaggcaggaaaagtgcttgaacttgggaggcggaggttgcagtgacctgagatcacgtcaatgcactccatcctgggcaacagagcaagactctttgtcaagaaaatatataaaataaatagtcgcaattctgaattattggagctgaagtctttactgttcttgaggttttcagaatggttccttggtaaatatatctcaccatacactcagaaaatatcatcctctcctgacagcctctattttaaatccatgccaatttgtaagagtgcctttctagtcaccaaaaataataaaatactac

SEQ ID NO: 350543 - DNA, 2513 bp, Homo sapiens
ttgtcggcgttcgcggttgtttggccatccagtgccttccgcagcgccgctaaagcgcagttctcgttggtgtaactttttcttttttttttcagccacttccggctcctgcgtcgctccggaagcctgcgagttccggaagccttggtaatccagattcggctaggaaaagacaagctttccagagaatgtttcagagaaagttacgtggagcgtgggcgtttcgcagactcctaagtggtctggaacctaacctgcagtgtctctgagcttctggcaagtatgaggcaaggatttcacagaagaacttggagcaaaaattcccactgtcatagctataggctgtccagtcttgagggagctgcaggaacaggaaaaagagaccttcagagaagacatggcttccagaaaagagaatgcgaagagtgcaaacagagtgctaagaataagccagttggatgcacttgaactaaacaaggccctggagcagctagtttggtcccagtttactcagtgctttcatggatttaaacctgggctgttagctcgctttgagccagaggtgaaagcgtgcttatgggttttcttgtggagattcaccatctactccaaaaatgccacagtgggacagtcagttttgaatattaagtacaaaaatgatttttcccctaacctgagatatcagccacccagtaaaaatcaaaaaatctggtatgctgtttgtacaattggtggcaggtggttagaagaacgatgctatgatttgtttcgaaaccatcatttagcatcatttgggaaagtcaagcagtgtgtgaattttgtgattggacttttgaaattaggtgggctgattaattttttgattttccttcagaggggaaagtttgcaactttgacagaacgtctcctaggtattcattctgtattttgcaagcctcaaaacatacgtgaagttggctttgaatacatgaatagggaacttctctggcatggttttgctgaatttctgatttttctcttaccacttatcaatgtccagaagttgaaagccaagctgtcttcatggtgtattcctcttactggtgcacctaatagtgacaatacattagccaccagtggcaaagaatgcgctctatgtggagagtggcccaccatgcctcacaccataggatgtgagcatattttctgttatttctgtgctaagagtagtttcttatttgacgtgtactttacttgtcctaagtgtggcacagaagtacacagtctgcagccactgaaatcaggaatcgagatgtcagaagtaaatgctctttagaaactaaaattgcttcctttgaggaaaaaaatgcaccgtgtttaaattcttaatattagtcatcctaagtataccatttatgtatcctttataaggaatgtgctcctagccactgtcttctcctttccaggcatgactgaaatctaatcactggaaaccatgtgattctaaatatattatgtaaatgttaatgtattatgttttttaaatcattgcattcaatttttaatgtcaagaataatggacagcttttgtcaggtgactactaacaatgctccttcattttactacttcttaaaacaaggttggattctaaagataaagattttggagactctgggatgagtgtgcatttattttcagagttgacataatatgataatgtgacaattatgagactgttttaaaccttaagacctgatgcctcagttgtaacttttttttttttttctgagacggtgtcctgctctgtcacccaggctggagtgcagtggcgcgatctctgctcactgcaacgtccgcctcccgggttcaagcaattctcctgcctcagcctcccgagtagctggcactgcaggtgcatgccaccatgcccgggtaatttttgtatttttagtagagatggggttcactgtgttagccaggatggtctctatctcctgatctggtgatccacctgcgtcagcctcccaaagtgctgagattacagacgtgagccactgtgctcggccgcctcagttgtaatgttatgcttttctctgaagccaatttttaagaagttcagtcctcagctgtctgacccctccacagttggctttatattcagaaagtaaaaattacttaaggcagcttggaagtgaggcctgggaactactgggggcaactagtatgaacagcactatttacaggtctctttctcttgcctttgattcagagctgtcattctcagtaaatattgatagttttattgaaacaaaaggggtctttagcatgggaatagtaacagcagtgcataatcaagataattctgtatccttcactctttttctctgcctttttttacttaaaagtaaattcagactcttaaaatggtatagaattattagcttgaacattgaattatctcgtcttaactagaatgttttttaaaaaacagtttttaaatgtttttaaataaacatcttgctagtatggtgga

SEQ ID NO: 350544 - DNA, 2395 bp, Homo sapiens
ttgtcggcgttcgcggttgtttggccatccagtgccttccgcagcgccgctaaagcgcagttctcgttggtgtaactttttcttttttttttcagccacttccggctcctgcgtcgctccggaagcctgcgagttccggaagccttggtaatccagattcggctaggaaaagacaagctttccagagaatgtttcagagaaagttacgtggagcgtgggcgtttcgcagactcctaagtggtctggaacctaacctgcagtgtctctgagcttctggcaagtatgaggcaaggatttcacagaagaacttggagcaaaaattcccactgtcatagctataggctgtccagtcttgagggagctgcaggaacaggaaaaagagaccttcagagaagacatggcttccagaaaagagaatgcgaagagtgcaaacagagtgctaagaataagccagttggatgcacttgaactaaacaaggccctggagcagctagtttggtcccagtttactcagtgctttcatggatttaaacctgggctgttagctcgctttgagccagaggtgaaagcgtgcttatgggttttcttgtggagattcaccatctactccaaaaatgccacagtgggacagtcagttttgaatattaagtacaaaaatgatttttcccctaacctgagatatcagccacccagtaaaaatcaaaaaatctggtatgctgtttgtacaattggtggcaggtggttagaagaacgatgctatgatttgtttcgaaaccatcatttagcatcatttgggaaagtcaagcagtgtgtgaattttgtgattggacttttgaaattaggtgggctgattaattttttgattttccttcagaggggaaagtttgcaactttgacagaacgtctcctaggtattcattctgtattttgcaagcctcaaaacatacgtgaagttggctttgaatacatgaatagggaacttctctggcatggttttgctgaatttctgatttttctcttaccacttatcaatgtccagaagttgaaagccaagctgtcttcatggtgtattcctcttactggtgcacctaatagtgacaatacattagccaccagtggcaaagaatgcgctctatgtggagagtggcccaccatgcctcacaccataggatgtgagcatattttctgttatttctgtgctaagagtagtttcttatttgacgtgtactttacttgtcctaagtgtggcacagaagtacacagtctgcagccactgaaatcaggaatcgagatgtcagaagtaaatgctctttagaaactaaaattgcttcctttgaggaaaaaaatgcaccgtgtttaaattcttaatattagtcatcctaagtataccatttatgtatcctttataaggaatgtgctcctagccactgtcttctcctttccaggcatgactgaaatctaatcactggaaaccatgtgattctaaatatattatgtaaatgttaatgtattatgttttttaaatcattgcattcaatttttaatgtcaagaataatggacagcttttgtcaggtgactactaacaatgctccttcattttactacttcttaaaacaaggttggattctaaagataaagattttggagactctgggatgagtgtgcatttattttcagagttgacataatatgataatgtgacaattatgagactgttttaaaccttaagacctgatgcctcagttgtaacttttttttttttttctgagacggtgtcctgctctgtcacccaggctggagtgcagtggcgcgatctctgctcactgcaacgtccgcctcccgggttcaagcaattctcctgcctcagcctcccgagtagctggcactgcaggtgcatgccaccatgcccgggtaatttttgtatttttagtagagatggggttcactgtgttagccaggatggtctctatctcctgatgtcaggagcttgagaccagcctgaccaacatggcaaaaccccgtctctactaaaaaatgtaaaaattagctgggtgtggtggtgtacacctttcccagctacttgggaggcggaggcaggaaaagtgcttgaacttgggaggcggaggttgcagtgacctgagatcacgtcaatgcactccatcctgggcaacagagcaagactctttgtcaagaaaatatataaaataaatagtcgcaattctgaattattggagctgaagtctttactgttcttgaggttttcagaatggttccttggtaaatatatctcaccatacactcagaaaatatcatcctctcctgacagcctctattttaaatccatgccaatttgtaagagtgcctttctagtcaccaaaaataataaaatactac

SEQ ID NO: 350545 - DNA, 1513 bp, Homo sapiens
ttgtcggcgttcgcggttgtttggccatccagtgccttccgcagcgccgctaaagcgcagttctcgttggtgtaactttttcttttttttttcagccacttccggctcctgcgtcgctccggaagcctgcgagttccggaagccttggtaatccagattcggctaggaaaagacaagctttccagagaatgtttcagagaaagttacgtggagcgtgggcgtttcgcagactcctaagagaccttcagagaagacatggcttccagaaaagagaatgcgaagagtgcaaacagagtgctaagaataagccagttggatgcacttgaactaaacaaggccctggagcagctagtttggtcccagtttactcagtgctttcatggatttaaacctgggctgttagctcgctttgagccagaggtgaaagcgtgcttatgggttttcttgtggagattcaccatctactccaaaaatgccacagtgggacagtcagttttgaatattaagtacaaaaatgatttttcccctaacctgagatatcagccacccagtaaaaatcaaaaaatctggtatgctgtttgtacaattggtggcaggtggttagaagaacgatgctatgatttgtttcgaaaccatcatttagcatcatttgggaaagtcaagcagtgtgtgaattttgtgattggacttttgaaattaggtgggctgattaattttttgattttccttcagaggggaaagtttgcaactttgacagaacgtctcctaggtattcattctgtattttgcaagcctcaaaacatacgtgaagttggctttgaatacatgaatagggaacttctctggcatggttttgctgaatttctgatttttctcttaccacttatcaatgtccagaagttgaaagccaagctgtcttcatggtgtattcctcttactggtgcacctaatagtgacaatacattagccaccagtggcaaagaatgcgctctatgtggagagtggcccaccatgcctcacaccataggatgtgagcatattttctgttatttctgtgctaagagtagtttcttatttgacgtgtactttacttgtcctaagtgtggcacagaagtacacagtctgcagccactgaaatcaggaatcgagatgtcagaagtaaatgctctttagaaactaaaattgcttcctttgaggaaaaaaatgcaccgtgtttaaattcttaatattagtcatcctaagtataccatttatgtatcctttataaggaatgtgctcctagccactgtcttctcctttccaggcatgactgaaatctaatcactggaaaccatgtgattctaaatatattatgtaaatgttaatgtattatgttttttaaatcattgcattcaatttttaatgtcaagaataatggacagcttttgtcaggtgactactaacaatgctccttcattttactacttcttaaaacaaggttggattctaaagataaagattttggagactctgg

SEQ ID NO: 350546 - DNA, 2097 bp, Homo sapiens
gtattcttcttcaatgcggtgcagctactcagtgaccagtacaagttaacctagccaagtggccaatagacatgctgcctctatgatgaatcgcaggtggccctagcacatagctccgtctatcgagcactactatggactgtgagcaaataatgccctggtgagttatcctgatgctatacgagatagctattcttctatattgagcgtgctacgttgatcttgatccgtaatctgttggacacaggaaagtacaacacgtactgtcgactcatctagaatatacagcgcacactcgcacgatgtcagaagtaaatgctctttagaaactaaaattgcttcctttgaggaaaaaaatgcaccgtgtttaaattcttaatattagtcatcctaagtataccatttatgtatcctttataaggaatgtgctcctagccactgtcttctcctttccaggcatgactgaaatctaatcactggaaaccatgtgattctaaatatattatgtaaatgttaatgtattatgttttttaaatcattgcattcaatttttaatgtcaagaataatggacagcttttgtcaggtgactactaacaatgctccttcattttactacttcttaaaacaaggttggattctaaagataaagattttggagactctgggatgagtgtgcatttattttcagagttgacataatatgataatgtgacaattatgagactgttttaaaccttaagacctgatgcctcagttgtaacttttttttttttttctgagacggtgtcctgctctgtcacccaggctggagtgcagtggcgcgatctctgctcactgcaacgtccgcctcccgggttcaagcaattctcctgcctcagcctcccgagtagctggcactgcaggtgcatgccaccatgcccgggtaatttttgtatttttagtagagatggggttcactgtgttagccaggatggtctctatctcctgatctggtgatccacctgcgtcagcctcccaaagtgctgagattacagacgtgagccactgtgctcggccgcctcagttgtaatgttatgcttttctctgaagccaatttttaagaagttcagtcctcagctgtctgacccctccacagttggctttatattcagaaagtaaaaattacttaaggcagcttggaagtgaggcctgggaactactgggggcaactagtatgaacagcactatttacaggtctctttctcttgcctttgattcagagctgtcattctcagtaaatattgatagttttattgaaacaaaaggggtctttagcatgggaatagtaacagcagtgcataatcaagataattctgtatccttcactctttttctctgcctttttttacttaaaagtaaattcagactcttaaaatggtatagaattattagcttgaacattgaattatctcgtcttaactagaatgttttttaaaaaacagtttttaaatgtttttaaataaacatcttgctagtatggtggaaaatacactgccagttcatttttctcttcacctttcattgaacaagtactcaggtgccaggtactgatgtagccattagaggcacaacagtatattaagcaggaaaaatcaagttaccttcatggagtttacattctgtgattgaatgaactgtaagtttaatttaggttcaatttagtgtaagatactgaagaagttttgtagtttgagttaagagtattttacatcttaagaatttgccttcttttgccttctgtaattttaaaacattattgtagaaaacaccaacaattcaggaaaaaatataaaatcaactttcccacaattttttgagagagatcatcactatattttactatatttgtagatttgttgcacgtacatttcttatttacaaaattattataatgcataaaaaatagcattttttcctatgtataaatattcttcaaaactattttggggctgagcaggacagtggctcatgcctgtaatcccaggctccctacttagggaggctgagcccaggagtttgagttcgtttctaaaaaaataaaaatatatacaaacgtc

SEQ ID NO: 350547 - DNA, 325 bp, Homo sapiens
atataagttttatatgcactggaaaaccaaaaaagttgtgtaacttactttattgtgatatttgctttattgcagtggtctggaacctaacctgcagtgtctctgaggtatgcctgttttcttatgtgattctgatgaagtcacaagtttgaaaaccactagactagaggagcagagaccacaggactgtgatggtgaagaccacagtttagaaggattaaaagcccagagatatatgtatctttatcatagacacatatatctgttagcagttaaaaactaccagaataagattacgttgttacaaagaaagttgaatgtgtta

SEQ ID NO: 350548 - DNA, 3086 bp, Homo sapiens
ttgtcggcgttcgcggttgtttggccatccagtgccttccgcagcgccgctaaagcgcagttctcgttggtgtaactttttcttttttttttcagccacttccggctcctgcgtcgctccggaagcctgcgagttccggaagccttggtaatccagattcggctaggaaaagacaagctttccagagaatgtttcagagaaagttacgtggagcgtgggcgtttcgcagactcctaagtggtctggaacctaacctgcagtgtctctgagcttctggcaagtatgaggcaaggatttcacagaagaacttggagcaaaaattcccactgtcatagctataggctgtccagtcttgagggagctgcaggaacaggaaaaagagaccttcagagaagacatggcttccagaaaagagaatgcgaagagtgcaaacagagtgctaagaataagccagttggatgcacttgaactaaacaaggccctggagcagctagtttggtcccagtttactcagtgctttcatggatttaaacctgggctgttagctcgctttgagccagaggtgaaagcgtgcttatgggttttcttgtggagattcaccatctactccaaaaatgccacagtgggacagtcagttttgaatattaagtacaaaaatgatttttcccctaacctgagatatcagccacccagtaaaaatcaaaaaatctggtatgctgtttgtacaattggtggcaggtggttagaagaacgatgctatgatttgtttcgaaaccatcatttagcatcatttgggaaagtcaagcagtgtgtgaattttgtgattggacttttgaaattaggtgggctgattaattttttgattttccttcagaggggaaagtttgcaactttgacagaacgtctcctaggtattcattctgtattttgcaagcctcaaaacatacgtgaagttggctttgaatacatgaatagggaacttctctggcatggttttgctgaatttctgatttttctcttaccacttatcaatgtccagaagttgaaagccaagctgtcttcatggtgtattcctcttactggtgcacctaatagtgacaatacattagccaccagtggcaaagaatgcgctctatgtggagagtggcccaccatgcctcacaccataggatgtgagcatattttctgttatttctgtgctaagagtagtttcttatttgacgtgtactttacttgtcctaagtgtggcacagaagtacacagtctgcagccactgaaatcaggaatcgagatgtcagaagtaaatgctctttagaaactaaaattgcttcctttgaggaaaaaaatgcaccgtgtttaaattcttaatattagtcatcctaagtataccatttatgtatcctttataaggaatgtgctcctagccactgtcttctcctttccaggcatgactgaaatctaatcactggaaaccatgtgattctaaatatattatgtaaatgttaatgtattatgttttttaaatcattgcattcaatttttaatgtcaagaataatggacagcttttgtcaggtgactactaacaatgctccttcattttactacttcttaaaacaaggttggattctaaagataaagattttggagactctgggatgagtgtgcatttattttcagagttgacataatatgataatgtgacaattatgagactgttttaaaccttaagacctgatgcctcagttgtaacttttttttttttttctgagacggtgtcctgctctgtcacccaggctggagtgcagtggcgcgatctctgctcactgcaacgtccgcctcccgggttcaagcaattctcctgcctcagcctcccgagtagctggcactgcaggtgcatgccaccatgcccgggtaatttttgtatttttagtagagatggggttcactgtgttagccaggatggtctctatctcctgatctggtgatccacctgcgtcagcctcccaaagtgctgagattacagacgtgagccactgtgctcggccgcctcagttgtaatgttatgcttttctctgaagccaatttttaagaagttcagtcctcagctgtctgacccctccacagttggctttatattcagaaagtaaaaattacttaaggcagcttggaagtgaggcctgggaactactgggggcaactagtatgaacagcactatttacaggtctctttctcttgcctttgattcagagctgtcattctcagtaaatattgatagttttattgaaacaaaaggggtctttagcatgggaatagtaacagcagtgcataatcaagataattctgtatccttcactctttttctctgcctttttttacttaaaagtaaattcagactcttaaaatggtatagaattattagcttgaacattgaattatctcgtcttaactagaatgttttttaaaaaacagtttttaaatgtttttaaataaacatcttgctagtatggtggaaaatacactgccagttcatttttctcttcacctttcattgaacaagtactcaggtgccaggtactgatgtagccattagaggcacaacagtatattaagcaggaaaaatcaagttaccttcatggagtttacattctgtgattgaatgaactgtaagtttaatttaggttcaatttagtgtaagatactgaagaagttttgtagtttgagttaagagtattttacatcttaagaatttgccttcttttgccttctgtaattttaaaacattattgtagaaaacaccaacaattcaggaaaaaatataaaatcaactttcccacaattttttgagagagatcatcactatattttactatatttgtagatttgttgcacgtacatttcttatttacaaaattattataatgcataaaaaatagcattttttcctatgtataaatattcttcaaaactattttggggctgagcaggacagtggctcatgcctgtaatcccaggctccctacttagggaggctgagcccaggagtttgagttcgtttctaaaaaaataaaaatatatacaaacgtc

SEQ ID NO: 350549 - DNA, 1623 bp, Homo sapiens
ttgtcggcgttcgcggttgtttggccatccagtgccttccgcagcgccgctaaagcgcagttctcgttggtgtaactttttcttttttttttcagccacttccggctcctgcgtcgctccggaagcctgcgagttccggaagccttggtaatccagattcggctaggaaaagacaagctttccagagaatgtttcagagaaagttacgtggagcgtgggcgtttcgcagactcctaagcttctggcaagtatgaggcaaggatttcacagaagaacttggagcaaaaattcccactgtcatagctataggctgtccagtcttgagggagctgcaggaacaggaaaaagagaccttcagagaagacatggcttccagaaaagagaatgcgaagagtgcaaacagagtgctaagaataagccagttggatgcacttgaactaaacaaggccctggagcagctagtttggtcccagtttactcagtgctttcatggatttaaacctgggctgttagctcgctttgagccagaggtgaaagcgtgcttatgggttttcttgtggagattcaccatctactccaaaaatgccacagtgggacagtcagttttgaatattaagtacaaaaatgatttttcccctaacctgagatatcagccacccagtaaaaatcaaaaaatctggtatgctgtttgtacaattggtggcaggtggttagaagaacgatgctatgatttgtttcgaaaccatcatttagcatcatttgggaaagtcaagcagtgtgtgaattttgtgattggacttttgaaattaggtgggctgattaattttttgattttccttcagaggggaaagtttgcaactttgacagaacgtctcctaggtattcattctgtattttgcaagcctcaaaacatacgtgaagttggctttgaatacatgaatagggaacttctctggcatggttttgctgaatttctgatttttctcttaccacttatcaatgtccagaagttgaaagccaagctgtcttcatggtgtattcctcttactggtgcacctaatagtgacaatacattagccaccagtggcaaagaatgcgctctatgtggagagtggcccaccatgcctcacaccataggatgtgagcatattttctgttatttctgtgctaagagtagtttcttatttgacgtgtactttacttgtcctaagtgtggcacagaagtacacagtctgcagccactgaaatcaggaatcgagatgtcagaagtaaatgctctttagaaactaaaattgcttcctttgaggaaaaaaatgcaccgtgtttaaattcttaatattagtcatcctaagtataccatttatgtatcctttataaggaatgtgctcctagccactgtcttctcctttccaggcatgactgaaatctaatcactggaaaccatgtgattctaaatatattatgtaaatgttaatgtattatgttttttaaatcattgcattcaatttttaatgtcaagaataatggacagcttttgtcaggtgactactaacaatgctccttcattttactacttcttaaaacaaggttggattctaaagataaagattttggagactctgg

SEQ ID NO: 350550 - DNA, 1444 bp, Homo sapiens
cactgggaggtaagggaagccctcctggttcccacaggctatgatgctgcatggcagagcttctggcaagtatgaggcaaggatttcacagaagaacttggagcaaaaattcccactgtcatagctataggctgtccagtcttgagggagctgcaggaacaggaaaaagagaccttcagagaagacatggcttccagaaaagagaatgcgaagagtgcaaacagagtgctaagaataagccagttggatgcacttgaactaaacaaggccctggagcagctagtttggtcccagtttactcagtgctttcatggatttaaacctgggctgttagctcgctttgagccagaggtgaaagcgtgcttatgggttttcttgtggagattcaccatctactccaaaaatgccacagtgggacagtcagttttgaatattaagtacaaaaatgatttttcccctaacctgagatatcagccacccagtaaaaatcaaaaaatctggtatgctgtttgtacaattggtggcaggtggttagaagaacgatgctatgatttgtttcgaaaccatcatttagcatcatttgggaaagtcaagcagtgtgtgaattttgtgattggacttttgaaattaggtgggctgattaattttttgattttccttcagaggggaaagtttgcaactttgacagaacgtctcctaggtattcattctgtattttgcaagcctcaaaacatacgtgaagttggctttgaatacatgaatagggaacttctctggcatggttttgctgaatttctgatttttctcttaccacttatcaatgtccagaagttgaaagccaagctgtcttcatggtgtattcctcttactggtgcacctaatagtgacaatacattagccaccagtggcaaagaatgcgctctatgtggagagtggcccaccatgcctcacaccataggatgtgagcatattttctgttatttctgtgctaagagtagtttcttatttgacgtgtactttacttgtcctaagtgtggcacagaagtacacagtctgcagccactgaaatcaggaatcgagatgtcagaagtaaatgctctttagaaactaaaattgcttcctttgaggaaaaaaatgcaccgtgtttaaattcttaatattagtcatcctaagtataccatttatgtatcctttataaggaatgtgctcctagccactgtcttctcctttccaggcatgactgaaatctaatcactggaaaccatgtgattctaaatatattatgtaaatgttaatgtattatgttttttaaatcattgcattcaatttttaatgtcaagaataatggacagcttttgtcaggtgactactaacaatgctccttcattttactacttcttaaaacaaggttggattctaaagataaagattttggagactctgg

SEQ ID NO: 350551 - DNA, 414 bp, Homo sapiens
tggaatccatgtgaatattcctttcatcctcaattacaatttatagaaagctgagatctgtttattcatgtgtcaaggcgaagctcaaataccaccttttatccttccctacctctggacaacttcagtctccccttttcccatcctcctgaaagtctatcaaagtcattaccagaatcttccttaatctacagcctgtgttggtccgtgctcattgttcatttccctccatgactgaaaccacagaactcttccctttacttcagtgaggctctgaaagccttgagacagaaactccttaactttcctttggcactgcctactagttcacctgtccctccttgggttagcctccccgtggagtcacaatagaagagttctcctcttcctgagattccatttgggggaccggct

SEQ ID NO: 350552 - DNA, 730 bp, Homo sapiens
tggaatccatgtgaatattcctttcatcctcaattacaatttatagaaagctgagatctgtttattcatgtgtcaaggcgaagctcaaataccaccttttatccttccctacctctggacaacttcagtctccccttttcccatcctcctgaaagtctatcaaagtcattaccagaatcttccttaatctacagcctgtgttggtccgtgctcattgttcatttccctccatgactgaaaccacagaactcttccctttacttcagtgaggctctgaaagccttgagacagaaactccttaactttcctttggcactgcctactagttcacctgtccctccttgggttagcctccccgtggagtcacaatagaagagttctcctcttcctgaagccccctcactccaagatatcccctgcttattcttggttccttattatcagcatttaaatgctcttaaatctctttcaccttatttttttaaaaataagttttcctctttggtagtgctttttctccatttcatcattcaaacatcttcaaagcatgtttggcaaatcctgcctcctagactcttgttttctcctttctcatctgctatgattttaatgtgtcttccaaaagttcatgcacaggaaacctaatccacaatgcaatgcaacagtgttgagatgtggggcctaattagaggtgcttaggttatgagggcaaaaccctcataaactaatt

SEQ ID NO: 350553 - DNA, 424 bp, Homo sapiens
catttgttttaactttcagtaacttggaagttccttaagactgacaagatgtatttgtcaaagaataaatggtaactaggtggtggtggttgtcattatgaactggagttaagaaaacttaaagaaatagcaacttgttagtgtaagatttccatttgctgcatagaaaggaaagcatgaataggacaggctagcttggaagcaatgaggattatcatgattgaagtaaaggagccaaattggagatcatctgagagatgatttgatgtgagacctggaggtacttggatccctaaatcttaggctgaggagtttgagcctatcttaataagcagtgggaatatagtgggaaggtagtttgtgtgtgtgggtgtgtgtttgttttgttttgttttttgtttttttttgagacagtctctctctg

SEQ ID NO: 350554 - DNA, 450 bp, Homo sapiens
tctaaatacagcttctttgtcagatatattatttacaaatatgttctcctatgctgccttttatcttttaattctctttacagaatttacaaaattctgtcttttgaagaggagaagtttttaactttgaaagccaatatatgatttattttccttttatggattatgctttaggtgtaagacctaagaaatctttgcctaattcaagttcacaaatgttttttttttctttattattattatactttaagttttagggtacatgtgcacaatgtgcaggttagttacatatgcatacatgtgccatgtttttatcctgtgctgtcttgtgaaggttttatagtttagattttacatagtgggatgtattttgggttaattttttattatgaggtgaaatatggattgaaggtcattctttggcatgcggatatccaaatgttacagcac

SEQ ID NO: 350555 - DNA, 426 bp, Homo sapiens
ttttttaaaatggaaagggagtctatgtttcccaggctggtcttaaactcctagcctcaagctagcctaccacctagacctcccaaagtactgggatcacaggcgtgagccactgcgcccagtcggttatcactttcataagactagaaaagacagtaagactctccttctcctgtaaatcttagaaagagtgtaagggaacccaaagatgtgtcttaagcaaatactcctagagttccccaagagactggatattatcaatacatttatgtatacctggcatccaactagagcagtttgcttttacaagaaatggcataaaaattaaaaaaataaatccaatgaactttctctcaaaaaggctccctgggaattctcttacaagatgggaattaaaaaaaaaataagaaaaacaagatgggaata

SEQ ID NO: 350556 - DNA, 388 bp, Homo sapiens
gaagaagacaatgtcataaagcttatctagtgtttgtggtatggcccatccaatgaacagaaaaatcatgtgaatcccggagcttctacctagcagtaaactcactgatcttcagggtgtttctttgcaaaatccaggcttttggattcagactagaactacaacattggctctcccgggtcttcaacttgccaactgcggatcttgagacttgtcaacttccataacctccaactctctctctctctctcgctctgtgtgtgtgtgtgagagagtgtgtgtatgtccgtgtgcatgtgtgtgtaagtgacagaaagacagacacacacacagttccatttctgtggagaaccctaatacatctacctacttaagacatcgaattcct

SEQ ID NO: 350557 - DNA, 1691 bp, Homo sapiens
aggctaggacgaggccgggttaaatcggccgagggttaaagccggtcggaactgctccggagggcacgggctccgtaggcaccaactgcaaggacccctccccctgcgggcgctcccatggcacagttcgcgttcgagagtgacctgcactcgctgcttcagctggatgcacccatccccaatgcaccccctgcgcgctggcagcgcaaagccaaggaagccgcaggcccggccccctcacccatgcgggccgccaaccgatcccacagcgccggcaggactccgggccgaactcctggcaaatccagttccaaggttcagaccactcctagcaaacctggcggtgaccgctatatcccccatcgcagtgctgcccagatggaggtggccagcttcctcctgagcaaggagaaccagcctgaaaacagccagacgcccaccaagaaggaacatcagaaagcctgggctttgaacctgaacggttttgatgtagaggaagccaagatccttcggctcagtggaaaaccacaaaatgcgccagagggttatcagaacagactgaaagtactctacagccaaaaggccactcctggctccagccggaagacctgccgttacattccttccctgccagaccgtatcctggatgcgcctgaaatccgaaatgactattacctgaaccttgtggattggagttctgggaatgtactggccgtggcactggacaacagtgtgtacctgtggagtgcaagctctggtgacatcctgcagcttttgcaaatggagcagcctggggaatatatatcctctgtggcctggatcaaagagggcaactacttggctgtgggcaccagcagtgctgaggtgcagctatgggatgtgcagcagcagaaacggcttcgaaatatgaccagtcactctgcccgagtgggctccctaagctggaacagctatatcctgtccagtggttcacgttctggccacatccaccaccatgatgttcgggtagcagaacaccatgtggccacactgagtggccacagccaggaagtgtgtgggctgcgctgggccccagatggacgacatttggccagtggtggtaatgataacttggtcaatgtgtggcctagtgctcctggagagggtggctgggttcctctgcagacattcacccagcatcaaggggctgtcaaggccgtagcatggtgtccctggcagtccaatgtcctggcaacaggagggggcaccagtgatcgacacattcgcatctggaatgtgtgctctggggcctgtctgagtgccgtggatgcccattcccaggtgtgctccatcctctggtctccccattacaaggagctcatctcaggccatggctttgcacagaaccagctagttatttggaagtacccaaccatggccaaggtggctgaactcaaaggtcacacatcccgggtcctgagtctgaccatgagcccagatggggccacagtggcatccgcagcagcagatgagaccctgaggctatggcgctgttttgagttggaccctgcgcggcggcgggagcgggagaaggccagtgcagccaaaagcagcctcatccaccaaggcatccgctgaagaccaacccatcacctcagttgttttttatttttctaataaagtcatgtctcccttcatgttttttttttaaa

SEQ ID NO: 350558 - DNA, 1728 bp, Homo sapiens
tgcgacggttggattttgaaggagccaataggcgctcggagcggagagtttaagaggcgtaagccaggcgtgttaaagccggtcggaactgctccggagggcacgggctccgtaggcaccaactgcaaggacccctccccctgcgggcgctcccatggcacagttcgcgttcgagagtgacctgcactcgctgcttcagctggatgcacccatccccaatgcaccccctgcgcgctggcagcgcaaagccaaggaagccgcaggcccggccccctcacccatgcgggccgccaaccgatcccacagcgccggcaggactccgggccgaactcctggcaaatccagttccaaggttcagaccactcctagcaaacctggcggtgaccgctatatcccccatcgcagtgctgcccagatggaggtggccagcttcctcctgagcaaggagaaccagcctgaaaacagccagacgcccaccaagaaggaacatcagaaagcctgggctttgaacctgaacggttttgatgtagaggaagccaagatccttcggctcagtggaaaaccacaaaatgcgccagagggttatcagaacagactgaaagtactctacagccaaaaggccactcctggctccagccggaagacctgccgttacattccttccctgccagaccgtatcctggatgcgcctgaaatccgaaatgactattacctgaaccttgtggattggagttctgggaatgtactggccgtggcactggacaacagtgtgtacctgtggagtgcaagctctggtgacatcctgcagcttttgcaaatggagcagcctggggaatatatatcctctgtggcctggatcaaagagggcaactacttggctgtgggcaccagcagtgctgaggtgcagctatgggatgtgcagcagcagaaacggcttcgaaatatgaccagtcactctgcccgagtgggctccctaagctggaacagctatatcctgtccagtggttcacgttctggccacatccaccaccatgatgttcgggtagcagaacaccatgtggccacactgagtggccacagccaggaagtgtgtgggctgcgctgggccccagatggacgacatttggccagtggtggtaatgataacttggtcaatgtgtggcctagtgctcctggagagggtggctgggttcctctgcagacattcacccagcatcaaggggctgtcaaggccgtagcatggtgtccctggcagtccaatgtcctggcaacaggagggggcaccagtgatcgacacattcgcatctggaatgtgtgctctggggcctgtctgagtgccgtggatgcccattcccaggtgtgctccatcctctggtctccccattacaaggagctcatctcaggccatggctttgcacagaaccagctagttatttggaagtacccaaccatggccaaggtggctgaactcaaaggtcacacatcccgggtcctgagtctgaccatgagcccagatggggccacagtggcatccgcagcagcagatgagaccctgaggctatggcgctgttttgagttggaccctgcgcggcggcgggagcgggagaaggccagtgcagccaaaagcagcctcatccaccaaggcatccgctgaagaccaacccatcacctcagttgttttttatttttctaataaagtcatgtctcccttcatgttttttttttaaa

SEQ ID NO: 350559 - DNA, 559 bp, Homo sapiens
gtgacccctagagctccttgtctggctctagtacctgctgaccccacctttattccatctaggccgtagcatggtgtccctggcagtccaatgtcctggcaacaggagggggcaccagtgatcgacacattcgcatctggaatgtgtgctctggggcctgtctgagtgccgtggatgcccattcccaggtgtgctccatcctctggtctccccattacaaggagctcatctcaggccatggctttgcacagaaccagctagttatttggaagtacccaaccatggccaaggtggctgaactcaaaggtcacacatcccgggtcctgagtctgaccatgagcccagatggggccacagtggcatccgcagcagcagatgagaccctgaggctatggcgctgttttgagttggaccctgcgcggcggcgggagcgggagaaggccagtgcagccaaaagcagcctcatccaccaaggcatccgctgaagaccaacccatcacctcagttgttttttatttttctaataaagtcatgtctcccttcatgttttttttttaaa

SEQ ID NO: 350560 - DNA, 1659 bp, Homo sapiens
  misc_feature (30)..(31): n is a, c, g, or t
caatatacggctaggtacgaggctgggtgnngcacgggctccgtaggcaccaactgcaaggacccctccccctgcgggcgctcccatggcacagttcgcgttcgagagtgacctgcactcgctgcttcagctggatgcacccatccccaatgcaccccctgcgcgctggcagcgcaaagccaaggaagccgcaggcccggccccctcacccatgcgggccgccaaccgatcccacagcgccggcaggactccgggccgaactcctggcaaatccagttccaaggttcagaccactcctagcaaacctggcggtgaccgctatatcccccatcgcagtgctgcccagatggaggtggccagcttcctcctgagcaaggagaaccagcctgaaaacagccagacgcccaccaagaaggaacatcagaaagcctgggctttgaacctgaacggttttgatgtagaggaagccaagatccttcggctcagtggaaaaccacaaaatgcgccagagggttatcagaacagactgaaagtactctacagccaaaaggccactcctggctccagccggaagacctgccgttacattccttccctgccagaccgtatcctggatgcgcctgaaatccgaaatgactattacctgaaccttgtggattggagttctgggaatgtactggccgtggcactggacaacagtgtgtacctgtggagtgcaagctctggtgacatcctgcagcttttgcaaatggagcagcctggggaatatatatcctctgtggcctggatcaaagagggcaactacttggctgtgggcaccagcagtgctgaggtgcagctatgggatgtgcagcagcagaaacggcttcgaaatatgaccagtcactctgcccgagtgggctccctaagctggaacagctatatcctgtccagtggttcacgttctggccacatccaccaccatgatgttcgggtagcagaacaccatgtggccacactgagtggccacagccaggaagtgtgtgggctgcgctgggccccagatggacgacatttggccagtggtggtaatgataacttggtcaatgtgtggcctagtgctcctggagagggtggctgggttcctctgcagacattcacccagcatcaaggggctgtcaaggccgtagcatggtgtccctggcagtccaatgtcctggcaacaggagggggcaccagtgatcgacacattcgcatctggaatgtgtgctctggggcctgtctgagtgccgtggatgcccattcccaggtgtgctccatcctctggtctccccattacaaggagctcatctcaggccatggctttgcacagaaccagctagttatttggaagtacccaaccatggccaaggtggctgaactcaaaggtcacacatcccgggtcctgagtctgaccatgagcccagatggggccacagtggcatccgcagcagcagatgagaccctgaggctatggcgctgttttgagttggaccctgcgcggcggcgggagcgggagaaggccagtgcagccaaaagcagcctcatccaccaaggcatccgctgaagaccaacccatcacctcagttgttttttatttttctaataaagtcatgtctcccttcatgttttttttttaaa

SEQ ID NO: 350561 - DNA, 2621 bp, Homo sapiens
aggctaggacgaggccgggttaaatcggccgagggttaaagccggtcggaactgctccggagggcacgggctccgtaggcaccaactgcaaggacccctccccctgcgggcgctcccatggcacagttcgcgttcgagagtgacctgcactcgctgcttcagctggatgcacccatccccaatgcaccccctgcgcgctggcagcgcaaagccaaggaagccgcaggcccggccccctcacccatgcgggccgccaaccgatcccacagcgccggcaggactccgggccgaactcctggcaaatccagttccaaggttcagaccactcctagcaaacctggcggtgaccgctatatcccccatcgcagtgctgcccagatggaggtggccagcttcctcctgagcaaggagaaccagcctgaaaacagccagacgcccaccaagaaggaacatcagaaagcctgggctttgaacctgaacggttttgatgtagaggaagccaagatccttcggctcagtggaaaaccacaaaatgcgccagagggttatcagaacagactgaaagtactctacagccaaaaggccactcctggctccagccggaagacctgccgttacattccttccctgccagaccgtatcctggatgcgcctgaaatccgaaatgactattacctgaaccttgtggattggagttctgggaatgtactggccgtggcactggacaacagtgtgtacctgtggagtgcaagctctggtgacatcctgcagcttttgcaaatggagcagcctggggaatatatatcctctgtggcctggatcaaagagggcaactacttggctgtgggcaccagcagtgctgaggtgcagctatgggatgtgcagcagcagaaacggcttcgaaatatgaccagtcactctgcccgagtgggctccctaagctggaacagctatatcctgtccagtggttcacgttctggccacatccaccaccatgatgttcgggtagcagaacaccatgtggccacactgagtggccacagccaggaagtgtgtgggctgcgctgggccccagatggacgacatttggccagtggtggtaatgataacttggtcaatgtgtggcctagtgctcctggagagggtggctgggttcctctgcagacattcacccagcatcaaggggctgtcaaggccgtagcatggtgtccctggcagtccaatgtcctggcaacaggagggggcaccagtgatcgacacattcgcatctggaatgtgtgctctggggcctgtctgagtgccgtggatgcccattcccaggtgtgctccatcctctggtctccccattacaaggagctcatctcaggccatggctttgcacagaaccagctagttatttggaagtacccaaccatggccaaggtggctgaactcaaaggtcacacatcccgggtcctgagtctgaccatgagcccagatggggccacagtggcatccgcagcagcagatgagaccctgaggctatggcgctgttttgagttggaccctgcgcggcggcgggagcgggagaaggccagtgcagccaaaagcagcctcatccaccaaggcatccgctgaagaccaacccatcacctcagttgttttttatttttctaataaagtcatgtctcccttcatgttttttttttaaatctgtttcagctaatgcctttcttctttcatgacctatgtcccagcagccttcctaggggctctactctactgggatcagagagctagatatgtcctgtgggagcctggaccatccatccctcttgtttgtggacagggctaagcgtgttgtgttcccccacctcctctgttcacatacgtatacacacagcctccgtggtttcctctgtcacttttaattaagacacaagttgagtaagcagcctccacaggctgtattcccaggcccccgcccaccctgacctttggcccagaagctactgcttcagtgtgtggggtggaggagtgagactgggtccacagtgacattattgctgacctcttctgtgtgaggaaaaaggccacgagaccctttgtggggccagccctgagtgctcctctcccaagttttaaggcagggagggggaaataactgtacagcccttttagcccccagctctggagtggcagacagcaatgaggccacatccctggagctgcccgggggaagtgggtgaggaaccaaagccgtggtccctgtagagcagctgtggggaggggagggccagtcccctgctcagtcctgaccacataagccttggtcacaggtgtaggtggagagggcactgacggacactgccctaaggtgcagtcctgaggcacttaggtgggcgcctatctaggccatgcttctcagttggccttgaccttggcaatacctggagctccattttgctgaagtgcacggggcagccgcttgcccttggtataagagtgataccagaagttggagaacagcatgaagaagatggtgccatacatccagatgaggtgaataatgactgggtactggtagttacagctggacataaagtagtactgggagatgtgcagtgagaccaggacaaact

SEQ ID NO: 350562 - DNA, 2504 bp, Homo sapiens
aggctaggacgaggccgggttaaatcggccgagggttaaagccggtcggaactgctccggagggcacgggctccgtaggcaccaactgcaaggacccctccccctgcgggcgctcccatggcacagttcgcgttcgagagtgacctgcactcgctgcttcagctggatgcacccatccccaatgcaccccctgcgcgctggcagcgcaaagccaaggaagccgcaggcccggccccctcacccatgcgggccgccaaccgatcccacagcgccggcaggactccgggccgaactcctggcaaatccagttccaaggttcagaccactcctagcaaacctggcggtgaccgctatatcccccatcgcagtgctgcccagatggaggtggccagcttcctcctgagcaaggagaaccagcctgaaaacagccagacgcccaccaagaaggaacatcagaaagcctgggctttgaacctgaacggttttgatgtagaggaagccaagatccttcggctcagtggaaaaccacaaaatgcgccagagggttatcagaacagactgaaagtactctacagccaaaaggccactcctggctccagccggaagacctgccgttacattccttccctgccagaccgtatcctggatgcgcctgaaatccgaaatgactattacctgaaccttgtggattggagttctgggaatgtactggccgtggcactggacaacagtgtgtacctgtggagtgcaagctctggtgacatcctgcagcttttgcaaatggagcagcctggggaatatatatcctctgtggcctggatcaaagagggcaactacttggctgtgggcaccagcagtgctgaggtgcagctatgggatgtgcagcagcagaaacggcttcgaaatatgaccagtcactctgcccgagtgggctccctaagctggaacagctatatcctgtccagtggttcacgttctggccacatccaccaccatgatgttcgggtagcagaacaccatgtggccacactgagtggccacagccaggaagtgtgtgggctgcgctgggccccagatggacgacatttggccagtggtggtaatgataacttggtcaatgtgtggcctagtgctcctggagagggtggctgggttcctctgcagacattcacccagcatcaaggggctgtcaaggccgtagcatggtgtccctggcagtccaatgtcctggcaacaggagggggcaccagtgatcgacacattcgcatctggaatgtgtgctctggggcctgtctgagtgccgtggatgcccattcccaggtgtgctccatcctctggtctccccattacaaggagctcatctcaggccatggctttgcacagaaccagctagttatttggaagtacccaaccatggccaaggtggctgaactcaaaggtcacacatcccgggtcctgagtctgaccatgagcccagatggggccacagtggcatccgcagcagcagatgagaccctgaggctatggcgctgttttgagttggaccctgcgcggcggcgggagcgggagaaggccagtgcagccaaaagcagcctcatccaccaaggcatccgctgaagaccaacccatcacctcagttgttttttatttttctaataaagtcatgtctcccttcatgttttttttttaaatctgtttcagctaatgcctttcttctttcatgacctatgtcccagcagccttcctaggggctctactctactgggatcagagagctagatatgtcctgtgggagcctggaccatccatccctcttgtttgtggacagggctaagcgtgttgtgttcccccacctcctctgttcacatacgtatacacacagcctccgtggtttcctctgtcacttttaattaagacacaagttgagtaagcagcctccacaggctgtattcccaggcccccgcccaccctgacctttggcccagaagctactgcttcagtgtgtggggtggaggagtgagactgggtccacagtgacattattgctgacctcttctgtgtgaggaaaaaggccacgagaccctttgtggggccagccctgagtgctcctctcccaagttttaaggcagggagggggaaataactgtacagcccttttagcccccagctctggagtggcagacagcaatgaggccacatccctggagctgcccgggggaagtgggtgaggaaccaaagccgtggtccctgtagagcagctgtggggaggggagggccagtcccctgctcagtcctgaccacataagccttggtcacaggtgtaggtggagagggcactgacggacactgccctaaggtgcagtcctgagggaatagtccacagggtcacagcgccaggtataggtgctcagccagcccgacatcaggaactcatagacaatgtagagggagagtgccaccagtgagaagttgtagacaatcatgaagccacggagctggaaggg

SEQ ID NO: 350563 - DNA, 1838 bp, Homo sapiens
aggctaggacgaggccgggttaaatcggccgagggttaaagccggtcggaactgctccggagggcacgggctccgtaggcaccaactgcaaggacccctccccctgcgggcgctcccatggcacagttcgcgttcgagagtgacctgcactcgctgcttcagctggatgcacccatccccaatgcaccccctgcgcgctggcagcgcaaagccaaggaagccgcaggcccggccccctcacccatgcgggccgccaaccgatcccacagcgccggcaggactccgggccgaactcctggcaaatccagttccaaggttcagaccactcctagcaaacctggcggtgaccgctatatcccccatcgcagtgctgcccagatggaggtggccagcttcctcctgagcaaggagaaccagcctgaaaacagccagacgcccaccaagaaggaacatcagaaagcctgggctttgaacctgaacggttttgatgtagaggaagccaagatccttcggctcagtggaaaaccacaaaatgcgccagagggtaagacccgaagttcctggttcctggagggaggtgtcagttcatctccagggctgagcacagatatctgtctcctcttcctatctaagattgagggcaagggaggtgttgattttcccagcgtctagactcactccgttgccacaggttatcagaacagactgaaagtactctacagccaaaaggccactcctggctccagccggaagacctgccgttacattccttccctgccagaccgtatcctggatgcgcctgaaatccgaaatgactattacctgaaccttgtggattggagttctgggaatgtactggccgtggcactggacaacagtgtgtacctgtggagtgcaagctctggtgacatcctgcagcttttgcaaatggagcagcctggggaatatatatcctctgtggcctggatcaaagagggcaactacttggctgtgggcaccagcagtgctgaggtgcagctatgggatgtgcagcagcagaaacggcttcgaaatatgaccagtcactctgcccgagtgggctccctaagctggaacagctatatcctgtccagtggttcacgttctggccacatccaccaccatgatgttcgggtagcagaacaccatgtggccacactgagtggccacagccaggaagtgtgtgggctgcgctgggccccagatggacgacatttggccagtggtggtaatgataacttggtcaatgtgtggcctagtgctcctggagagggtggctgggttcctctgcagacattcacccagcatcaaggggctgtcaaggccgtagcatggtgtccctggcagtccaatgtcctggcaacaggagggggcaccagtgatcgacacattcgcatctggaatgtgtgctctggggcctgtctgagtgccgtggatgcccattcccaggtgtgctccatcctctggtctccccattacaaggagctcatctcaggccatggctttgcacagaaccagctagttatttggaagtacccaaccatggccaaggtggctgaactcaaaggtcacacatcccgggtcctgagtctgaccatgagcccagatggggccacagtggcatccgcagcagcagatgagaccctgaggctatggcgctgttttgagttggaccctgcgcggcggcgggagcgggagaaggccagtgcagccaaaagcagcctcatccaccaaggcatccgctgaagaccaacccatcacctcagttgttttttatttttctaataaagtcatgtctcccttcatgttttttttttaaa

SEQ ID NO: 350564 - DNA, 1218 bp, Homo sapiens
aggctaggacgaggccgggttaaatcggccgagggttaaagccggtcggaactgctccggagggcacgggctccgtaggcaccaactgcaaggacccctccccctgcgggcgctcccatggcacagttcgcgttcgagagtgacctgcactcgctgcttcagctggatgcacccatccccaatgcaccccctgcgcgctggcagcgcaaagccaaggaagccgcaggcccggccccctcacccatgcgggccgccaaccgatcccacagcgccggcaggactccgggccgaactcctggcaaatccagttccaaggttcagaccactcctagcaaacctggcggtgaccgctatatcccccatcgcagtgctgcccagatggaggtggccagcttcctcctgagcaaggagaaccagcctgaaaacagccagacgcccaccaagaaggaacatcagaaagcctgggctttgaacctgaacggttttgatgtagaggaagccaagatccttcggctcagtggaaaaccacaaaatgcgccagagggttatcagaacagactgaaagtactctacagccaaaaggccactcctggctccagccggaagacctgccgttacattccttccctgccagaccgtatcctggatgcgcctgaaatccgaaatgactattacctgaaccttgtggattggagttctgggaatgtactggccgtggcactggacaacagtgtgtacctgtggagtgcaagctctggtgacatcctgcagcttttgcaaatggagcagcctggggaatatatatcctctgtggcctggatcaaagagggcaactacttggctgtgggcaccagcagtgctgaggtgcagctatgggatgtgcagcagcagaaacggcttcgaaatatgaccagtcactctgcccgagtgggctccctaagctggaacagctatatcctgtccaggtcacacatcccgggtcctgagtctgaccatgagcccagatggggccacagtggcatccgcagcagcagatgagaccctgaggctatggcgctgttttgagttggaccctgcgcggcggcgggagcgggagaaggccagtgcagccaaaagcagcctcatccaccaaggcatccgctgaagaccaacccatcacctcagttgttttttatttttctaataaagtcatgtctcccttcatgttttttttttaaa

SEQ ID NO: 350565 - DNA, 530 bp, Homo sapiens
gtacccgttgaccagcatcaaggggctgccaaggccgtagcatggtgtccctggcagtccaatgtcctggcaacaggagggggcaccagtgatcgacacattcgcatctggaatgtgtgctctggggcctgtctgagtgccgtggatgcccattcccaggtgtgctccatcctctggtctccccattacaaggagctcatctcaggccatggctttgcacagaaccagctagttatttggaagtacccaaccatggccaaggtggctgaactcaaaggtcacacatcccgggtcctgagtctgaccatgagcccagatggggccacagtggcatccgcagcagcagatgagaccctgaggctatggcgctgttttgagttggaccctgcgcggcggcgggagcgggagaaggccagtgcagccaaaagcagcctcatccaccaaggcatccgctgaagaccaacccatcacctcagttgttttttatttttctaataaagtcatgtctcccttcatgttttttttttaaa

SEQ ID NO: 350566 - DNA, 742 bp, Homo sapiens
ctgagccgaggtggggccgtggccagggggagggggtgctaggccggaaggggctgcagccgagggtggccctgattttgtggccggccaggagcgaaggggtccctttctgtcccctgagcaccgtcgcctcctttcctccagggctccgtaggcaccaactgcaaggacccctccccctgcgggcgctcccatggcacagttcgcgttcgagagtgacctgcactcgctgcttcagctggatgcacccatccccaatgcaccccctgcgcgctggcagcgcaaagccaaggaagccgcaggcccggccccctcacccatgcgggccgccaaccgatcccacagcgccggcaggactccgggccgaactcctggtcagtgaggtgccaaaggaactgagtgagagcagccttcatactttctccctggggagcctggtcagactgtcttctctttctccgccccaggcaaatccagttccaaggttcagaccactcctagcaaacctggcggtgaccgctatatcccccatcgcagtgctgcccagatggaggtggccagcttcctcctgagcaaggagaaccagcctgaaaacagccagacgcccaccaagaaggtatgtgtcccagaggggcttaaggcacgggacctgactgttctttggataataccatcttgctccttcactaccctttatgccaggaacatcagaaagcctgggctttgaacctgaacggttttg

SEQ ID NO: 350567 - DNA, 321 bp, Homo sapiens
ctcacctataatctggggactgttaaggggagaagggatggtaggattggactgggttaatctgtgacccctagagctccttgtctggctctagtacctgctgaccccacctttattccatctaggccgtagcatggtgtccctggcagtccaatgtcctggcaacaggagggggcaccagtgatcgacacattcgcatctggaatgtgtgctctggggcctgtctgagtgccgtggatgcccattcccaggtaatcttttgcctgttcctgcctctcccacatgcattcttaccgggcaactacattcactccaatggct

SEQ ID NO: 350568 - DNA, 1777 bp, Homo sapiens
ggtggtggggctgagccgaggtggggccgtggccagggggagggggtgctaggccggaaggggctgcagccgagggtggccctgattttgtggccggccaggagcgaaggggtccctttctgtcccctgagcaccgtcgcctcctttcctccagggctccgtaggcaccaactgcaaggacccctccccctgcgggcgctcccatggcacagttcgcgttcgagagtgacctgcactcgctgcttcagctggatgcacccatccccaatgcaccccctgcgcgctggcagcgcaaagccaaggaagccgcaggcccggccccctcacccatgcgggccgccaaccgatcccacagcgccggcaggactccgggccgaactcctggcaaatccagttccaaggttcagaccactcctagcaaacctggcggtgaccgctatatcccccatcgcagtgctgcccagatggaggtggccagcttcctcctgagcaaggagaaccagcctgaaaacagccagacgcccaccaagaaggaacatcagaaagcctgggctttgaacctgaacggttttgatgtagaggaagccaagatccttcggctcagtggaaaaccacaaaatgcgccagagggttatcagaacagactgaaagtactctacagccaaaaggccactcctggctccagccggaagacctgccgttacattccttccctgccagaccgtatcctggatgcgcctgaaatccgaaatgactattacctgaaccttgtggattggagttctgggaatgtactggccgtggcactggacaacagtgtgtacctgtggagtgcaagctctggtgacatcctgcagcttttgcaaatggagcagcctggggaatatatatcctctgtggcctggatcaaagagggcaactacttggctgtgggcaccagcagtgctgaggtgcagctatgggatgtgcagcagcagaaacggcttcgaaatatgaccagtcactctgcccgagtgggctccctaagctggaacagctatatcctgtccagtggttcacgttctggccacatccaccaccatgatgttcgggtagcagaacaccatgtggccacactgagtggccacagccaggaagtgtgtgggctgcgctgggccccagatggacgacatttggccagtggtggtaatgataacttggtcaatgtgtggcctagtgctcctggagagggtggctgggttcctctgcagacattcacccagcatcaaggggctgtcaaggccgtagcatggtgtccctggcagtccaatgtcctggcaacaggagggggcaccagtgatcgacacattcgcatctggaatgtgtgctctggggcctgtctgagtgccgtggatgcccattcccaggtgtgctccatcctctggtctccccattacaaggagctcatctcaggccatggctttgcacagaaccagctagttatttggaagtacccaaccatggccaaggtggctgaactcaaaggtcacacatcccgggtcctgagtctgaccatgagcccagatggggccacagtggcatccgcagcagcagatgagaccctgaggctatggcgctgttttgagttggaccctgcgcggcggcgggagcgggagaaggccagtgcagccaaaagcagcctcatccaccaaggcatccgctgaagaccaacccatcacctcagttgttttttatttttctaataaagtcatgtctcccttcatgttttttttttaaa

SEQ ID NO: 350569 - DNA, 1695 bp, Homo sapiens
ccacgcgtcgcgaccacgcgtcgacccacgcgtcgcccacgcgtcgcggacgcgtgggtcgaccacgcgtccggctccgtaggcaccaactgcaaggacccctccccctgcgggcgctcccatggcacagttcgcgttcgagagtgacctgcactcgctgcttcagctggatgcacccatccccaatgcaccccctgcgcgctggcagcgcaaagccaaggaagccgcaggcccggccccctcacccatgcgggccgccaaccgatcccacagcgccggcaggactccgggccgaactcctggcaaatccagttccaaggttcagaccactcctagcaaacctggcggtgaccgctatatcccccatcgcagtgctgcccagatggaggtggccagcttcctcctgagcaaggagaaccagcctgaaaacagccagacgcccaccaagaaggaacatcagaaagcctgggctttgaacctgaacggttttgatgtagaggaagccaagatccttcggctcagtggaaaaccacaaaatgcgccagagggttatcagaacagactgaaagtactctacagccaaaaggccactcctggctccagccggaagacctgccgttacattccttccctgccagaccgtatcctggatgcgcctgaaatccgaaatgactattacctgaaccttgtggattggagttctgggaatgtactggccgtggcactggacaacagtgtgtacctgtggagtgcaagctctggtgacatcctgcagcttttgcaaatggagcagcctggggaatatatatcctctgtggcctggatcaaagagggcaactacttggctgtgggcaccagcagtgctgaggtgcagctatgggatgtgcagcagcagaaacggcttcgaaatatgaccagtcactctgcccgagtgggctccctaagctggaacagctatatcctgtccagtggttcacgttctggccacatccaccaccatgatgttcgggtagcagaacaccatgtggccacactgagtggccacagccaggaagtgtgtgggctgcgctgggccccagatggacgacatttggccagtggtggtaatgataacttggtcaatgtgtggcctagtgctcctggagagggtggctgggttcctctgcagacattcacccagcatcaaggggctgtcaaggccgtagcatggtgtccctggcagtccaatgtcctggcaacaggagggggcaccagtgatcgacacattcgcatctggaatgtgtgctctggggcctgtctgagtgccgtggatgcccattcccaggtgtgctccatcctctggtctccccattacaaggagctcatctcaggccatggctttgcacagaaccagctagttatttggaagtacccaaccatggccaaggtggctgaactcaaaggtcacacatcccgggtcctgagtctgaccatgagcccagatggggccacagtggcatccgcagcagcagatgagaccctgaggctatggcgctgttttgagttggaccctgcgcggcggcgggagcgggagaaggccagtgcagccaaaagcagcctcatccaccaaggcatccgctgaagaccaacccatcacctcagttgttttttatttttctaataaagtcatgtctcccttcatgttttttttttaaa

SEQ ID NO: 350570 - DNA, 1823 bp, Homo sapiens
aggctaggacgaggccgggttaaatcggccgagggttaaagccggtcggaactgctccggagggcacgggctccgtaggcaccaactgcaaggacccctccccctgcgggcgctcccatggcacagttcgcgttcgagagtgacctgcactcgctgcttcagctggatgcacccatccccaatgcaccccctgcgcgctggcagcgcaaagccaaggaagccgcaggcccggccccctcacccatgcgggccgccaaccgatcccacagcgccggcaggactccgggccgaactcctggcaaatccagttccaaggttcagaccactcctagcaaacctggcggtgaccgctatatcccccatcgcagtgctgcccagatggaggtggccagcttcctcctgagcaaggagaaccagcctgaaaacagccagacgcccaccaagaaggaacatcagaaagcctgggctttgaacctgaacggttttgatgtagaggaagccaagatccttcggctcagtggaaaaccacaaaatgcgccagagggttatcagaacagactgaaagtactctacagccaaaaggccactcctggctccagccggaagacctgccgttacattccttccctgccagaccgtatcctggatgcgcctgaaatccgaaatgactattacctgaaccttgtggattggagttctgggaatgtactggccgtggcactggacaacagtgtgtacctgtggagtgcaagctctggtgacatcctgcagcttttgcaaatggagcagcctggggaatatatatcctctgtggcctggatcaaagagggcaactacttggctgtgggcaccagcagtgctgaggtgcagctatgggatgtgcagcagcagaaacggcttcgaaatatgaccagtcactctgcccgagtgggctccctaagctggaacagctatatcctgtccagtggttcacgttctggccacatccaccaccatgatgttcgggtagcagaacaccatgtggccacactgagtggccacagccaggaagtgtgtgggctgcgctgggccccagatggacgacatttggccagtggtggtaatgataacttggtcaatgtgtggcctagtgctcctggagagggtggctgggttcctctgcagacattcacccagcatcaaggggctgtcaaggccgtagcatggtgtccctggcagtccaatgtcctggcaacaggagggggcaccagtgatcgacacattcgcatctggaatgtgtgctctggggcctgtctgagtgccgtggatgcccattcccaggtgtgctccatcctctggtctccccattacaaggagctcatctcaggccatggctttgcacagaaccagctagttatttggaagtacccaaccatggccaaggtggctgaactcaaaggtcacacatcccgggtcctgagtctgaccatgagcccagatggggccacagtggcatccgcagcagcagatgagaccctgaggctatggcgctgttttgagttggaccctgcgcggcggcgggagcgggagaaggccagtgcagccaaaagcagcctcatccaccaaggcatccgctgaagaccaacccatcacctcagttgttttttatttttctaataaagtcatgtctcccttcatgttttttttttaaaaaaaaaaaccgcggcttttggggcgagagagaaacgaggcgcatttccccctttaagggacggcctgggttttacgtattcgttcaattcccttctgtactcacaaaagcaaacatctcatcgtagcaaaga

SEQ ID NO: 350571 - DNA, 1967 bp, Homo sapiens
aggctaggacgaggccgggttaaatcggccgagggttaaagccggtcggaactgctccggagggcacgggctccgtaggcaccaactgcaaggacccctccccctgcgggcgctcccatggcacagttcgcgttcgagagtgacctgcactcgctgcttcagctggatgcacccatccccaatgcaccccctgcgcgctggcagcgcaaagccaaggaagccgcaggcccggccccctcacccatgcgggccgccaaccgatcccacagcgccggcaggactccgggccgaactcctggcaaatccagttccaaggttcagaccactcctagcaaacctggcggtgaccgctatatcccccatcgcagtgctgcccagatggaggtggccagcttcctcctgagcaaggagaaccagcctgaaaacagccagacgcccaccaagaaggaacatcagaaagcctgggctttgaacctgaacggttttgatgtagaggaagccaagatccttcggctcagtggaaaaccacaaaatgcgccagagggttatcagaacagactgaaagtactctacagccaaaaggccactcctggctccagccggaagacctgccgttacattccttccctgccagaccgtatcctggatgcgcctgaaatccgaaatgactattacctgaaccttgtggattggagttctgggaatgtactggccgtggcactggacaacagtgtgtacctgtggagtgcaagctctggtgacatcctgcagcttttgcaaatggagcagcctggggaatatatatcctctgtggcctggatcaaagagggcaactacttggctgtgggcaccagcagtgctgaggtgcagctatgggatgtgcagcagcagaaacggcttcgaaatatgaccagtcactctgcccgagtgggctccctaagctggaacagctatatcctgtccagtggttcacgttctggccacatccaccaccatgatgttcgggtagcagaacaccatgtggccacactgagtggccacagccaggaagtgtgtgggctgcgctgggccccagatggacgacatttggccagtggtggtaatgataacttggtcaatgtgtggcctagtgctcctggagagggtggctgggttcctctgcagacattcacccagcatcaaggggctgtcaaggccgtagcatggtgtccctggcagtccaatgtcctggcaacaggagggggcaccagtgatcgacacattcgcatctggaatgtgtgctctggggcctgtctgagtgccgtggatgcccattcccaggtgtgctccatcctctggtctccccattacaaggagctcatctcaggccatggctttgcacagaaccagctagttatttggaagtacccaaccatggccaaggtggctgaactcaaaggtcacacatcccgggtcctgagtctgaccatgagcccagatggggccacagtggcatccgcagcagcagatgagaccctgaggctatggcgctgttttgagttggaccctgcgcggcggcgggagcgggagaaggccagtgcagccaaaagcagcctcatccaccaaggcatccgctgaagaccaacccatcacctcagttgttttttatttttctaataaagtcatgtctcccttcatgttttttttttaaaaaaaaaaaaaaaaaaaaaaaaaaaaaaaaaaaaaaaaaaaaaaaaaaagacaacacggcgggacgacgacacatgtcggcgggggcgggagaaaacaggagacgtcgagcaaaggtggccgacggggtgcgcagcaacggggtactctagcaccacactctttgctggaggaccagggggggcgaaaatgccgcgggcccccccaataaaagggggcagccatatacgttcccacgaagcacggggtggcccggctagtagagagaacgagaaaat

SEQ ID NO: 350572 - DNA, 1581 bp, Homo sapiens
ccatccccaatgcaccccctgcgcgctggggatgggtgcatccagagtgaagctggatgcacccatccccaatgcaccccctgcgcgctggcagcgcaaagccaaggaagccgcaggcccggccccctcacccatgcgggccgccaaccgatcccacagcgccggcaggactccgggccgaactcctggcaaatccagttccaaggttcagaccactcctagcaaacctggcggtgaccgctatatcccccatcgcagtgctgcccagatggaggtggccagcttcctcctgagcaaggagaaccagcctgaaaacagccagacgcccaccaagaaggaacatcagaaagcctgggctttgaacctgaacggttttgatgtagaggaagccaagatccttcggctcagtggaaaaccacaaaatgcgccagagggttatcagaacagactgaaagtactctacagccaaaaggccactcctggctccagccggaagacctgccgttacattccttccctgccagaccgtatcctggatgcgcctgaaatccgaaatgactattacctgaaccttgtggattggagttctgggaatgtactggccgtggcactggacaacagtgtgtacctgtggagtgcaagctctggtgacatcctgcagcttttgcaaatggagcagcctggggaatatatatcctctgtggcctggatcaaagagggcaactacttggctgtgggcaccagcagtgctgaggtgcagctatgggatgtgcagcagcagaaacggcttcgaaatatgaccagtcactctgcccgagtgggctccctaagctggaacagctatatcctgtccagtggttcacgttctggccacatccaccaccatgatgttcgggtagcagaacaccatgtggccacactgagtggccacagccaggaagtgtgtgggctgcgctgggccccagatggacgacatttggccagtggtggtaatgataacttggtcaatgtgtggcctagtgctcctggagagggtggctgggttcctctgcagacattcacccagcatcaaggggctgtcaaggccgtagcatggtgtccctggcagtccaatgtcctggcaacaggagggggcaccagtgatcgacacattcgcatctggaatgtgtgctctggggcctgtctgagtgccgtggatgcccattcccaggtgtgctccatcctctggtctccccattacaaggagctcatctcaggccatggctttgcacagaaccagctagttatttggaagtacccaaccatggccaaggtggctgaactcaaaggtcacacatcccgggtcctgagtctgaccatgagcccagatggggccacagtggcatccgcagcagcagatgagaccctgaggctatggcgctgttttgagttggaccctgcgcggcggcgggagcgggagaaggccagtgcagccaaaagcagcctcatccaccaaggcatccgctgaagaccaacccatcacctcagttgttttttatttttctaataaagtcatgtctcccttcatgttttttttttaaa

SEQ ID NO: 350573 - DNA, 2538 bp, Homo sapiens
aggctaggacgaggccgggttaaatcggccgagggttaaagccggtcggaactgctccggagggcacgggctccgtaggcaccaactgcaaggacccctccccctgcgggcgctcccatggcacagttcgcgttcgagagtgacctgcactcgctgcttcagctggatgcacccatccccaatgcaccccctgcgcgctggcagcgcaaagccaaggaagccgcaggcccggccccctcacccatgcgggccgccaaccgatcccacagcgccggcaggactccgggccgaactcctggcaaatccagttccaaggttcagaccactcctagcaaacctggcggtgaccgctatatcccccatcgcagtgctgcccagatggaggtggccagcttcctcctgagcaaggagaaccagcctgaaaacagccagacgcccaccaagaaggaacatcagaaagcctgggctttgaacctgaacggttttgatgtagaggaagccaagatccttcggctcagtggaaaaccacaaaatgcgccagagggttatcagaacagactgaaagtactctacagccaaaaggccactcctggctccagccggaagacctgccgttacattccttccctgccagaccgtatcctggatgcgcctgaaatccgaaatgactattacctgaaccttgtggattggagttctgggaatgtactggccgtggcactggacaacagtgtgtacctgtggagtgcaagctctggtgacatcctgcagcttttgcaaatggagcagcctggggaatatatatcctctgtggcctggatcaaagagggcaactacttggctgtgggcaccagcagtgctgaggtgcagctatgggatgtgcagcagcagaaacggcttcgaaatatgaccagtcactctgcccgagtgggctccctaagctggaacagctatatcctgtccagtggttcacgttctggccacatccaccaccatgatgttcgggtagcagaacaccatgtggccacactgagtggccacagccaggaagtgtgtgggctgcgctgggccccagatggacgacatttggccagtggtggtaatgataacttggtcaatgtgtggcctagtgctcctggagagggtggctgggttcctctgcagacattcacccagcatcaaggggctgtcaaggccgtagcatggtgtccctggcagtccaatgtcctggcaacaggagggggcaccagtgatcgacacattcgcatctggaatgtgtgctctggggcctgtctgagtgccgtggatgcccattcccaggtgtgctccatcctctggtctccccattacaaggagtcacacatcccgggtcctgagtctgaccatgagcccagatggggccacagtggcatccgcagcagcagatgagaccctgaggctatggcgctgttttgagttggaccctgcgcggcggcgggagcgggagaaggccagtgcagccaaaagcagcctcatccaccaaggcatccgctgaagaccaacccatcacctcagttgttttttatttttctaataaagtcatgtctcccttcatgttttttttttaaatctgtttcagctaatgcctttcttctttcatgacctatgtcccagcagccttcctaggggctctactctactgggatcagagagctagatatgtcctgtgggagcctggaccatccatccctcttgtttgtggacagggctaagcgtgttgtgttcccccacctcctctgttcacatacgtatacacacagcctccgtggtttcctctgtcacttttaattaagacacaagttgagtaagcagcctccacaggctgtattcccaggcccccgcccaccctgacctttggcccagaagctactgcttcagtgtgtggggtggaggagtgagactgggtccacagtgacattattgctgacctcttctgtgtgaggaaaaaggccacgagaccctttgtggggccagccctgagtgctcctctcccaagttttaaggcagggagggggaaataactgtacagcccttttagcccccagctctggagtggcagacagcaatgaggccacatccctggagctgcccgggggaagtgggtgaggaaccaaagccgtggtccctgtagagcagctgtggggaggggagggccagtcccctgctcagtcctgaccacataagccttggtcacaggtgtaggtggagagggcactgacggacactgccctaaggtgcagtcctgaggcacttaggtgggcgcctatctaggccatgcttctcagttggccttgaccttggcaatacctggagctccattttgctgaagtgcacggggcagccgcttgcccttggtataagagtgataccagaagttggagaacagcatgaagaagatggtgccatacatccagatgaggtgaataatgactgggtactggtagttacagctggacataaagtagtactgggagatgtgcagtgagaccaggacaaact

SEQ ID NO: 350574 - DNA, 530 bp, Homo sapiens
tcgccgtatcgaccagcaaacagcggtggccatgccgtagcatggtgtccctggcagtccaatgtcctggcaacaggagggggcaccagtgatcgacacattcgcatctggaatgtgtgctctggggcctgtctgagtgccgtggatgcccattcccaggtgtgctccatcctctggtctccccattacaaggagctcatctcaggccatggctttgcacagaaccagctagttatttggaagtacccaaccatggccaaggtggctgaactcaaaggtcacacatcccgggtcctgagtctgaccatgagcccagatggggccacagtggcatccgcagcagcagatgagaccctgaggctatggcgctgttttgagttggaccctgcgcggcggcgggagcgggagaaggccagtgcagccaaaagcagcctcatccaccaaggcatccgctgaagaccaacccatcacctcagttgttttttatttttctaataaagtcatgtctcccttcatgttttttttttaaa

SEQ ID NO: 350575 - DNA, 894 bp, Homo sapiens
acacacaaacacacacacacgggaaggtgaccaaaagtgcaggcagcatgaggggaatttggagcacaccagggaagtgaagtacagacttgctcacactcctgcaactccctcaccctcttttcctggatctctggctttccctggatttcccgtaataggatcttccattttcacctcttcttttactccccttcaccctctgtctcatttacttatgaactgaaactggccttcatcggctggagacaagaaagatgtttagcccagtggttctcaaggtttgctgtgggggagtcagaggctgggcagtctccatttgtcctgcagagccactcacggtccttctcaccatgccccatgccctagggggctgcctcctgtgtagcaaaactacaggctctcttgcctctggcttctggtttgcagaagattggcaaagtgaggttggtgtccttatacccctattgggccatcaagcactggctgagtccctccatggcaaaattccaagcacatcctatcttatggcccttcccacagtccctctgctccagattccagtaacccatttgccgcgcgtgcccctgcatagctgcacctaggctgttaacagcgcacagcacttgtgacttctccttaccccgactacctctctgaaatggtccctttattaaaccctcctaaaattatcctaatttgagtgtgtcatcagtttccttcaggggcactgacacaacagggagcttgtctaaacttcagattcctgggtattgactgcagaaattctgaataaataggaggtcctgaggggatctacatttttagcaggtgcctaattctgatgctggtggtccagggatgattttgagagagatttgcctacaccttaac

SEQ ID NO: 350576 - DNA, 816 bp, Homo sapiens
agctgcagagggagacagggacctggtctgctccccactaccctcctggtccagtgggaaccctggccccactgagaaccaatctcctgaggagatgagccaggacaaaggtctcacttgcctgtcaagcagctgtggtgtgacctggtctgtagccccaactaccccaactagcataccctcagtgggagagacagaactcatcccactggatagtctggttcctgagatgtgtgctcctctgctcaaggattcccactgcaaggatgagaaacctgaaggatacacgggagaggctgaaggaagctggtgtacaggaaatggcccgtgggaatcttctttctgtggcctggttcaacctcaaataccaatgttctgacactggttgtatgacctagatagggtagggtcttggctttctcttgaggcctcagtttccccatttataaaacaatcaaaattgatctcagatccatccctcctagtgctgatgttccaagaccaaaagcccagaagagtgggcctagctaatgtttctgggcctcatcgtggtaacatgcacagcccttgccactcccccatggcccatgtagaaacaaccatgtggccttcactctgcccacagaagctagcaccaggaccctggtcagggttagaggtttctgctgagtcaaagccacatggagggagggagcaagggagagatgcagagtcatgtttccaggaggaggttatctgagcataacagggacagggtgggccacaggatacctctgaggctcaggttcccacctccactccacccaagccttcaat

SEQ ID NO: 350577 - DNA, 374 bp, Homo sapiens
tctggctctgttgccaggctgaagtgcagtggtgcagtcttggctcacagcaacctccgctacccaggttcaagtgattctcctgcctcagcctcctgagtggctgggactaaaggtgtgcgccaccatgcctggctaatttttgtatttttagcagagatgggggtttcaccatgttggtcaggctcatcttgaactcccgacctcaagtaatctccctgccttgatctccaaaagtgctgggattacagatgtgagccaccggtgcccagcctacatccttactttttatacaaagctcctatcgctactgtgattaaatacttatttgagaaattattaaatgactattctctcttctatttggttggagg

SEQ ID NO: 350578 - DNA, 157 bp, Homo sapiens
gcggccgcctactacttttactgctcgaattcaagcttctaacgatgtacggggacatgtggaattccctaccctgactccttccccaaacccagggaaaagagctctcaattttttatttttaatttttgtttgaaataaagtccttagttagcca

SEQ ID NO: 350579 - DNA, 3600 bp, Homo sapiens
ggtggctcacgcctgtaatcccagcactttgggaggacaaggcagatcccttgagcccaggaggtagaggctgcagtgagctgtgatggtgccactgcactccagcctgggcaatgaagcaagaccctatctgaaaaaaaaaatttttaaaaaaggcaaagatgggcctggggcaccaaatattccagaggaaagggaacgtgtgtactccttgaggtggggaacatgacccacttgaggtgcagaaagaagacttgtatggggtggtgcagcctccgcggccgctgtcagggaagcgcaggcggccaatggaacccgggagcggtcgctgctgctgaggcggcagtgtcggcagtccaaccgcgactgcccgcaccccctccgcgggggtcccccagagcttggaagctcgaagtctggctgtggccatgggagatacagtagtggagcctgcccccttgaagccaacttctgagcccacttctggcccaccagggaataatggggggtccctgctaagtgtcatcacggagggggtcggggaactatcagtgattgaccctgaggtggcccagaaggcctgccaggaggtgttggagaaagtcaagcttttgcatggaggcgtggcagtctctagcagaggcaccccactggagttggtcaatggggatggtgtggacagtgagatccgttgcctagatgatccacctgcccagatcagggaggaggaagatgagatgggggccgctgtggcctcaggcacagccaaaggagcaagaagacggcggcagaacaactcagctaaacagtcttggctgctgaggctgtttgagtcaaaactgtttgacatctccatggccatttcatacctgtataactccaaggagcctggagtacaagcctacattggcaaccggctcttctgctttcgcaacgaggacgtggacttctatctgccccagttgcttaacatgtacatccacatggatgaggacgtgggtgatgccattaagccctacatagtccaccgttgccgccagagcattaacttttccctccagtgtgccctgttgcttggggcctattcttcagacatgcacatttccactcaacgacactcccgtgggaccaagctacggaagctgatcctctcagatgagctaaagccagctcacaggaagagggagctgccctccttgagcccggcccctgacacagggctgtctccctccaaaaggactcaccagcgctctaagtcagatgccactgccagcataagtctcagcagcaacctgaaacgaacagccagcaaccctaaagtggagaatgaggatgaggagctctcctccagcaccgagagtattgataattcattcagttcccctgttcgactggctcctgagagagaattcatcaagtccctgatggcgatcggcaagcggctggccacgctccccaccaaagagcagaaaacacagaggctgatctcagagctctccctgctcaaccataagctccctgcccgagtctggctgcccactgctggctttgaccaccacgtggtccgtgtaccccacacacaggctgttgtcctcaactccaaggacaaggctccctacctgatttatgtggaagtccttgaatgtgaaaactttgacaccaccagtgtccctgcccggatccccgagaaccgaattcggagtacgaggtccgtagaaaacttgcccgaatgtggtattacccatgagcagcgagctggcagcttcagcactgtgcccaactatgacaacgatgatgaggcctggtcggtggatgacataggcgagctgcaagtggagctccccgaagtgcataccaacagctgtgacaacatctcccagttctctgtggacagcatcaccagccaggagagcaaggagcctgtgttcattgcagcaggggacatccgccggcgcctttcggaacagctggctcataccccgacagccttcaaacgagacccagaagatccttctgcagttgctctcaaagagccctggcaggagaaagtacggcggatcagagagggctccccctacggccatctccccaattggcggctcctgtcagtcattgtcaagtgtggggatgaccttcggcaagagcttctggcctttcaggtgttgaagcaactgcagtccatttgggaacaggagcgagtgcccctttggatcaagccatacaagattcttgtgatttcggctgatagtggcatgattgaaccagtggtcaatgctgtgtccatccatcaggtgaagaaacagtcacagctctccttgctcgattacttcctacaggagcacggcagttacaccactgaggcattcctcagtgcacagcgcaattttgtgcaaagttgtgctgggtactgcttggtctgctacctgctgcaagtcaaggacagacacaatgggaatatccttttggacgcagaaggccacatcatccacatcgactttggcttcatcctctccagctcaccccgaaatctgggctttgagacgtcagcctttaagctgaccacagagtttgtggatgtgatgggcggcctggatggcgacatgttcaactactataagatgctgatgctgcaagggctgattgccgctcggaaacacatggacaaggtggtgcagatcgtggagatcatgcagcaaggttctcagcttccttgcttccatggctccagcaccattcgaaacctcaaagagaggttccacatgagcatgactgaggagcagctgcagctgctggtggagcagatggtggatggcagtatgcggtctatcaccaccaaactctatgacggcttccagtacctcaccaacggcatcatgtgacacgctcctcagcccaggagtggtggggggtccagggcaccctccctagagggcccttgtctgagaaaccccaaaccaggaaaccccacctacccaaccatccacccaagggaaatggaaggcaagaaacacgaaggatcatgtggtaactgcgagagcttgctgaggggtgggagagccagctgtggggtccagacttgttggggcttccctgcccctcctggtctgtgtcagtattaccaccagactgactccaggactcactgccctccagaaaacagaggtgacaaatgtgagggacactggggcctttcttctccttgtaggggtctctcagaggttctttccacaggccatcctcttattccgttctggggcccaggaagtggggaagagtaggttctcggtacttaggacttgatcctgtggttggccactggccatgctgctgcccagctctacccctcccagggacctacccctcccagggaccgacccctggcccaagctccccttgctggcgggcgctgcgtgggccctgcacttgctgaggttccccatcatgggcaaggaagggaattcccacagccctccagtgtactgagggtactggcctagccatgtggaattccctaccctgactccttccccaaacccagggaaaagagctctcaattttttatttttaatttttgtttgaaataaagtccttagttagcca

SEQ ID NO: 350580 - DNA, 4060 bp, Homo sapiens
gaaaaatacacaaaagcaacaccagaggcccatttgcatggcgtgtttttgtttatttgtttggcctaatatggtttcgttttgtttggaagaagggattgtgccctccaagcctttgtcgtttcactcacctctcccaacctggccctgtccagcccctccctggagggctgggcatatggatgctggaggtcacaggctgcccaggcaggttggtgacctcggaggcagaaccacggcctcgagtcgggcctctaacggcgaaaagactgacgcggttggaccgcgccattcccgaaatgttaaggagcttaaactccgcatcgtcctccaagataagtaggaaaagggcagtcagaaagaacgtcttccccgtccgccgtcttcctgcgcgcccttctaggaacccagcgtccatcccacggcctgatttactaagggagtcttgtagcatacgggagggggaaaagtcattgattgcaattacggcatgttccaggcagctcacccgactccttagattactatggaatcggtagggtcctgaccgctggggaagcaggaaagcgtatcctgggaagaaaggcttggcttggactccggagaagaatactacatcgagacctgctggggaattttattttattttattatttttttggtcttggttgtactgagggaggaagaagaggttgtgtggcccggtcgaacttgtggcagcctgaaggccccctcaggcggcgccgcgggcagccccgcagccggggcctggtgcagcctccgcggccgctgtcagggaagcgcaggcggccaatggaacccgggagcggtcgctgctgctgaggcggcagtgtcggcagtccaaccgcgactgcccgcaccccctccgcgggggtcccccagagcttggaagctcgaagtctggctgtggccatgggagatacagtagtggagcctgcccccttgaagccaacttctgagcccacttctggcccaccagggaataatggggggtccctgctaagtgtcatcacggagggggtcggggaactatcagtgattgaccctgaggtggcccagaaggcctgccaggaggtgttggagaaagtcaagcttttgcatggaggcgtggcagtctctagcagaggcaccccactggagttggtcaatggggatggtgtggacagtgagatccgttgcctagatgatccacctgcccagatcagggaggaggaagatgagatgggggccgctgtggcctcaggcacagccaaaggagcaagaagacggcggcagaacaactcagctaaacagtcttggctgctgaggctgtttgagtcaaaactgtttgacatctccatggccatttcatacctgtataactccaaggagcctggagtacaagcctacattggcaaccggctcttctgctttcgcaacgaggacgtggacttctatctgccccagttgcttaacatgtacatccacatggatgaggacgtgggtgatgccattaagccctacatagtccaccgttgccgccagagcattaacttttccctccagtgtgccctgttgcttggggcctattcttcagacatgcacatttccactcaacgacactcccgtgggaccaagctacggaagctgatcctctcagatgagctaaagccagctcacaggaagagggagctgccctccttgagcccggcccctgacacagggctgtctccctccaaaaggactcaccagcgctctaagtcagatgccactgccagcataagtctcagcagcaacctgaaacgaacagccagcaaccctaaagtggagaatgaggatgagcctgttcgactggctcctgagagagaattcatcaagtccctgatggcgatcggcaagcggctggccacgctccccaccaaagagcagaaaacacagaggctgatctcagagctctccctgctcaaccataagctccctgcccgagtctggctgcccactgctggctttgaccaccacgtggtccgtgtaccccacacacaggctgttgtcctcaactccaaggacaaggctccctacctgatttatgtggaagtccttgaatgtgaaaactttgacaccaccagtgtccctgcccggatccccgagaaccgaattcggagtacgaggtccgtagaaaacttgcccgaatgtggtattacccatgagcagcgagctggcagcttcagcactgtgcccaactatgacaacgatgatgaggcctggtcggtggatgacataggcgagctgcaagtggagctccccgaagtgcataccaacagctgtgacaacatctcccagttctctgtggacagcatcaccagccaggagagcaaggagcctgtgttcattgcagcaggggacatccgccggcgcctttcggaacagctggctcataccccgacagccttcaaacgagacccagaagatccttctgcagttgctctcaaagagccctggcaggagaaagtacggcggatcagagagggctccccctacggccatctccccaattggcggctcctgtcagtcattgtcaagtgtggggatgaccttcggcaagagcttctggcctttcaggtgttgaagcaactgcagtccatttgggaacaggagcgagtgcccctttggatcaagccatacaagattcttgtgatttcggctgatagtggcatgattgaaccagtggtcaatgctgtgtccatccatcaggtgaagaaacagtcacagctctccttgctcgattacttcctacaggagcacggcagttacaccactgaggcattcctcagtgcacagcgcaattttgtgcaaagttgtgctgggtactgcttggtctgctacctgctgcaagtcaaggacagacacaatgggaatatccttttggacgcagaaggccacatcatccacatcgactttggcttcatcctctccagctcaccccgaaatctgggctttgagacgtcagcctttaagctgaccacagagtttgtggatgtgatgggcggcctggatggcgacatgttcaactactataagatgctgatgctgcaagggctgattgccgctcggaaacacatggacaaggtggtgcagatcgtggagatcatgcagcaaggttctcagcttccttgcttccatggctccagcaccattcgaaacctcaaagagaggttccacatgagcatgactgaggagcagctgcagctgctggtggagcagatggtggatggcagtatgcggtctatcaccaccaaactctatgacggcttccagtacctcaccaacggcatcatgtgacacgctcctcagcccaggagtggtggggggtccagggcaccctccctagagggcccttgtctgagaaaccccaaaccaggaaaccccacctacccaaccatccacccaagggaaatggaaggcaagaaacacgaaggatcatgtggtaactgcgagagcttgctgaggggtgggagagccagctgtggggtccagacttgttggggcttccctgcccctcctggtctgtgtcagtattaccaccagactgactccaggactcactgccctccagaaaacagaggtgacaaatgtgagggacactggggcctttcttctccttgtaggggtctctcagaggttctttccacaggccatcctcttattccgttctggggcccaggaagtggggaagagtaggttctcggtacttaggacttgatcctgtggttggccactggccatgctgctgcccagctctacccctcccagggacctacccctcccagggaccgacccctggcccaagctccccttgctggcgggcgctgcgtgggccctgcacttgctgaggttccccatcatgggcaaggaagggaattcccacagccctccagtgtactgagggtactggcctagccatgtggaattccctaccctgactccttccccaaacccagggaaaagagctctcaattttttatttttaatttttgtttgaaataaagtccttagttagcca

SEQ ID NO: 350581 - DNA, 4435 bp, Homo sapiens
gaaaaatacacaaaagcaacaccagaggcccatttgcatggcgtgtttttgtttatttgtttggcctaatatggtttcgttttgtttggaagaagggattgtgccctccaagcctttgtcgtttcactcacctctcccaacctggccctgtccagcccctccctggagggctgggcatatggatgctggaggtcacaggctgcccaggcaggttggtgacctcggaggcagaaccacggcctcgagtcgggcctctaacggcgaaaagactgacgcggttggaccgcgccattcccgaaatgttaaggagcttaaactccgcatcgtcctccaagataagtaggaaaagggcagtcagaaagaacgtcttccccgtccgccgtcttcctgcgcgcccttctaggaacccagcgtccatcccacggcctgatttactaagggagtcttgtagcatacgggagggggaaaagtcattgattgcaattacggcatgttccaggcagctcacccgactccttagattactatggaatcggtagggtcctgaccgctggggaagcaggaaagcgtatcctgggaagaaaggcttggcttggactccggagaagaatactacatcgagacctgctggggaattttattttattttattatttttttggtcttggttgtactgagggaggaagaagaggttgtgtggcccggtcgaacttgtggcagcctgaaggccccctcaggcggcgccgcgggcagccccgcagccggggcctggtgcagcctccgcggccgctgtcagggaagcgcaggcggccaatggaacccgggagcggtcgctgctgctgaggcggcagtgtcggcagtccaaccgcgactgcccgcaccccctccgcgggggtcccccagaggatcaactaaaccttgaactaagaagaaaaatgtgttgtgagcagggggagcctcagctgcctcaggccgttcaggacagaagggtgtttctgaaggccggagcaagttttgaagaagtccctatcagattacacttggttgactactccggagcagccactaagagggatgaacaggcctgcgtggaaattgaatgagattagttgagtccacgctccatgagaatgctgaacaccatccaaagcagcaaattgagattccttgatttggggaagaggtttgggaggaacccttcaataattggcatgggacaagaggggacccagtccaagtgtatttgggactcgcagtagggaggaacaattcagagagagcttggaagctcgaagtctggctgtggccatgggagatacagtagtggagcctgcccccttgaagccaacttctgagcccacttctggcccaccagggaataatggggggtccctgctaagtgtcatcacggagggggtcggggaactatcagtgattgaccctgaggtggcccagaaggcctgccaggaggtgttggagaaagtcaagcttttgcatggaggcgtggcagtctctagcagaggcaccccactggagttggtcaatggggatggtgtggacagtgagatccgttgcctagatgatccacctgcccagatcagggaggaggaagatgagatgggggccgctgtggcctcaggcacagccaaaggagcaagaagacggcggcagaacaactcagctaaacagtcttggctgctgaggctgtttgagtcaaaactgtttgacatctccatggccatttcatacctgtataactccaaggagcctggagtacaagcctacattggcaaccggctcttctgctttcgcaacgaggacgtggacttctatctgccccagttgcttaacatgtacatccacatggatgaggacgtgggtgatgccattaagccctacatagtccaccgttgccgccagagcattaacttttccctccagtgtgccctgttgcttggggcctattcttcagacatgcacatttccactcaacgacactcccgtgggaccaagctacggaagctgatcctctcagatgagctaaagccagctcacaggaagagggagctgccctccttgagcccggcccctgacacagggctgtctccctccaaaaggactcaccagcgctctaagtcagatgccactgccagcataagtctcagcagcaacctgaaacgaacagccagcaaccctaaagtggagaatgaggatgagcctgttcgactggctcctgagagagaattcatcaagtccctgatggcgatcggcaagcggctggccacgctccccaccaaagagcagaaaacacagaggctgatctcagagctctccctgctcaaccataagctccctgcccgagtctggctgcccactgctggctttgaccaccacgtggtccgtgtaccccacacacaggctgttgtcctcaactccaaggacaaggctccctacctgatttatgtggaagtccttgaatgtgaaaactttgacaccaccagtgtccctgcccggatccccgagaaccgaattcggagtacgaggtccgtagaaaacttgcccgaatgtggtattacccatgagcagcgagctggcagcttcagcactgtgcccaactatgacaacgatgatgaggcctggtcggtggatgacataggcgagctgcaagtggagctccccgaagtgcataccaacagctgtgacaacatctcccagttctctgtggacagcatcaccagccaggagagcaaggagcctgtgttcattgcagcaggggacatccgccggcgcctttcggaacagctggctcataccccgacagccttcaaacgagacccagaagatccttctgcagttgctctcaaagagccctggcaggagaaagtacggcggatcagagagggctccccctacggccatctccccaattggcggctcctgtcagtcattgtcaagtgtggggatgaccttcggcaagagcttctggcctttcaggtgttgaagcaactgcagtccatttgggaacaggagcgagtgcccctttggatcaagccatacaagattcttgtgatttcggctgatagtggcatgattgaaccagtggtcaatgctgtgtccatccatcaggtgaagaaacagtcacagctctccttgctcgattacttcctacaggagcacggcagttacaccactgaggcattcctcagtgcacagcgcaattttgtgcaaagttgtgctgggtactgcttggtctgctacctgctgcaagtcaaggacagacacaatgggaatatccttttggacgcagaaggccacatcatccacatcgactttggcttcatcctctccagctcaccccgaaatctgggctttgagacgtcagcctttaagctgaccacagagtttgtggatgtgatgggcggcctggatggcgacatgttcaactactataagatgctgatgctgcaagggctgattgccgctcggaaacacatggacaaggtggtgcagatcgtggagatcatgcagcaaggttctcagcttccttgcttccatggctccagcaccattcgaaacctcaaagagaggttccacatgagcatgactgaggagcagctgcagctgctggtggagcagatggtggatggcagtatgcggtctatcaccaccaaactctatgacggcttccagtacctcaccaacggcatcatgtgacacgctcctcagcccaggagtggtggggggtccagggcaccctccctagagggcccttgtctgagaaaccccaaaccaggaaaccccacctacccaaccatccacccaagggaaatggaaggcaagaaacacgaaggatcatgtggtaactgcgagagcttgctgaggggtgggagagccagctgtggggtccagacttgttggggcttccctgcccctcctggtctgtgtcagtattaccaccagactgactccaggactcactgccctccagaaaacagaggtgacaaatgtgagggacactggggcctttcttctccttgtaggggtctctcagaggttctttccacaggccatcctcttattccgttctggggcccaggaagtggggaagagtaggttctcggtacttaggacttgatcctgtggttggccactggccatgctgctgcccagctctacccctcccagggacctacccctcccagggaccgacccctggcccaagctccccttgctggcgggcgctgcgtgggccctgcacttgctgaggttccccatcatgggcaaggaagggaattcccacagccctccagtgtactgagggtactggcctagccatgtggaattccctaccctgactccttccccaaacccagggaaaagagctctcaattttttatttttaatttttgtttgaaataaagtccttagttagcca

SEQ ID NO: 350582 - DNA, 3884 bp, Homo sapiens
ggcttccaagaattgcctgttcccttctccttaagggatctcgggcccttgtcatcaatccgtaccatttacattcttactttgaacctagtcctcactcttctctgggatgcattatgatccctataactttctttagcttctctttctccctcctcaatcccccaactttctagaggtttctgtctgtaggggagagatttgacagtgcccttcccattcaggatttccaactttgacacctccctcgagtttcagggatttctctgatccttgtgacatttggtctgtttttcccgtgggcttcatgtgttctctgttacactctttatctccacataccacttatttcaggatcaactaaaccttgaactaagaagaaaaatgtgttgtgagcagggggagcctcagctgcctcaggccgttcaggacagaagggtgtttctgaaggccggagcaagttttgaagaagtccctatcagattacacttggttgactactccggagcagccactaagagggatgaacaggcctgcgtggaaattgaatgagattagttgagtccacgctccatgagaatgctgaacaccatccaaagcagcaaattgagattccttgatttggggaagaggtttgggaggaacccttcaataattggcatgggacaagaggggacccagtccaagtgtatttgggactcgcagtagggaggaacaattcagagagagcttggaagctcgaagtctggctgtggccatgggagatacagtagtggagcctgcccccttgaagccaacttctgagcccacttctggcccaccagggaataatggggggtccctgctaagtgtcatcacggagggggtcggggaactatcagtgattgaccctgaggtggcccagaaggcctgccaggaggtgttggagaaagtcaagcttttgcatggaggcgtggcagtctctagcagaggcaccccactggagttggtcaatggggatggtgtggacagtgagatccgttgcctagatgatccacctgcccagatcagggaggaggaagatgagatgggggccgctgtggcctcaggcacagccaaaggagcaagaagacggcggcagaacaactcagctaaacagtcttggctgctgaggctgtttgagtcaaaactgtttgacatctccatggccatttcatacctgtataactccaaggagcctggagtacaagcctacattggcaaccggctcttctgctttcgcaacgaggacgtggacttctatctgccccagttgcttaacatgtacatccacatggatgaggacgtgggtgatgccattaagccctacatagtccaccgttgccgccagagcattaacttttccctccagtgtgccctgttgcttggggcctattcttcagacatgcacatttccactcaacgacactcccgtgggaccaagctacggaagctgatcctctcagatgagctaaagccagctcacaggaagagggagctgccctccttgagcccggcccctgacacagggctgtctccctccaaaaggactcaccagcgctctaagtcagatgccactgccagcataagtctcagcagcaacctgaaacgaacagccagcaaccctaaagtggagaatgaggatgagcctgttcgactggctcctgagagagaattcatcaagtccctgatggcgatcggcaagcggctggccacgctccccaccaaagagcagaaaacacagaggctgatctcagagctctccctgctcaaccataagctccctgcccgagtctggctgcccactgctggctttgaccaccacgtggtccgtgtaccccacacacaggctgttgtcctcaactccaaggacaaggctccctacctgatttatgtggaagtccttgaatgtgaaaactttgacaccaccagtgtccctgcccggatccccgagaaccgaattcggagtacgaggtccgtagaaaacttgcccgaatgtggtattacccatgagcagcgagctggcagcttcagcactgtgcccaactatgacaacgatgatgaggcctggtcggtggatgacataggcgagctgcaagtggagctccccgaagtgcataccaacagctgtgacaacatctcccagttctctgtggacagcatcaccagccaggagagcaaggagcctgtgttcattgcagcaggggacatccgccggcgcctttcggaacagctggctcataccccgacagccttcaaacgagacccagaagatccttctgcagttgctctcaaagagccctggcaggagaaagtacggcggatcagagagggctccccctacggccatctccccaattggcggctcctgtcagtcattgtcaagtgtggggatgaccttcggcaagagcttctggcctttcaggtgttgaagcaactgcagtccatttgggaacaggagcgagtgcccctttggatcaagccatacaagattcttgtgatttcggctgatagtggcatgattgaaccagtggtcaatgctgtgtccatccatcaggtgaagaaacagtcacagctctccttgctcgattacttcctacaggagcacggcagttacaccactgaggcattcctcagtgcacagcgcaattttgtgcaaagttgtgctgggtactgcttggtctgctacctgctgcaagtcaaggacagacacaatgggaatatccttttggacgcagaaggccacatcatccacatcgactttggcttcatcctctccagctcaccccgaaatctgggctttgagacgtcagcctttaagctgaccacagagtttgtggatgtgatgggcggcctggatggcgacatgttcaactactataagatgctgatgctgcaagggctgattgccgctcggaaacacatggacaaggtggtgcagatcgtggagatcatgcagcaaggttctcagcttccttgcttccatggctccagcaccattcgaaacctcaaagagaggttccacatgagcatgactgaggagcagctgcagctgctggtggagcagatggtggatggcagtatgcggtctatcaccaccaaactctatgacggcttccagtacctcaccaacggcatcatgtgacacgctcctcagcccaggagtggtggggggtccagggcaccctccctagagggcccttgtctgagaaaccccaaaccaggaaaccccacctacccaaccatccacccaagggaaatggaaggcaagaaacacgaaggatcatgtggtaactgcgagagcttgctgaggggtgggagagccagctgtggggtccagacttgttggggcttccctgcccctcctggtctgtgtcagtattaccaccagactgactccaggactcactgccctccagaaaacagaggtgacaaatgtgagggacactggggcctttcttctccttgtaggggtctctcagaggttctttccacaggccatcctcttattccgttctggggcccaggaagtggggaagagtaggttctcggtacttaggacttgatcctgtggttggccactggccatgctgctgcccagctctacccctcccagggacctacccctcccagggaccgacccctggcccaagctccccttgctggcgggcgctgcgtgggccctgcacttgctgaggttccccatcatgggcaaggaagggaattcccacagccctccagtgtactgagggtactggcctagccatgtggaattccctaccctgactccttccccaaacccagggaaaagagctctcaattttttatttttaatttttgtttgaaataaagtccttagttagcca

SEQ ID NO: 350583 - DNA, 5045 bp, Homo sapiens
gaaaaatacacaaaagcaacaccagaggcccatttgcatggcgtgtttttgtttatttgtttggcctaatatggtttcgttttgtttggaagaagggattgtgccctccaagcctttgtcgtttcactcacctctcccaacctggccctgtccagcccctccctggagggctgggcatatggatgctggaggtcacaggctgcccaggcaggttggtgacctcggaggcagaaccacggcctcgagtcgggcctctaacggcgaaaagactgacgcggttggaccgcgccattcccgaaatgttaaggagcttaaactccgcatcgtcctccaagataagtaggaaaagggcagtcagaaagaacgtcttccccgtccgccgtcttcctgcgcgcccttctaggaacccagcgtccatcccacggcctgatttactaagggagtcttgtagcatacgggagggggaaaagtcattgattgcaattacggcatgttccaggcagctcacccgactccttagattactatggaatcggtagggtcctgaccgctggggaagcaggaaagcgtatcctgggaagaaaggcttggcttggactccggagaagaatactacatcgagacctgctggggaattttattttattttattatttttttggtcttggttgtactgagggaggaagaagaggttgtgtggcccggtcgaacttgtggcagcctgaaggccccctcaggcggcgccgcgggcagccccgcagccggggcctggtgcagcctccgcggccgctgtcagggaagcgcaggcggccaatggaacccgggagcggtcgctgctgctgaggcggcagtgtcggcagtccaaccgcgactgcccgcaccccctccgcgggggtcccccagagcttggaagctcgaagtctggctgtggccatgggagatacagtagtggagcctgcccccttgaagccaacttctgagcccacttctggcccaccagggaataatggggggtccctgctaagtgtcatcacggagggggtcggggaactatcagtgattgaccctgaggtggcccagaaggcctgccaggaggtgttggagaaagtcaagcttttgcatggaggcgtggcagtctctagcagaggcaccccactggagttggtcaatggggatggtgtggacagtgagatccgttgcctagatgatccacctgcccagatcagggaggaggaagatgagatgggggccgctgtggcctcaggcacagccaaaggagcaagaagacggcggcagaacaactcagctaaacagtcttggctgctgaggctgtttgagtcaaaactgtttgacatctccatggccatttcatacctgtataactccaaggagcctggagtacaagcctacattggcaaccggctcttctgctttcgcaacgaggacgtggacttctatctgccccagttgcttaacatgtacatccacatggatgaggacgtgggtgatgccattaagccctacatagtccaccgttgccgccagagcattaacttttccctccagtgtgccctgttgcttggggcctattcttcagacatgcacatttccactcaacgacactcccgtgggaccaagctacggaagctgatcctctcagatgagctaaagccagctcacaggaagagggagctgccctccttgagcccggcccctgacacagggctgtctccctccaaaaggactcaccagcgctctaagtcagatgccactgccagcataagtctcagcagcaacctgaaacgaacagccagcaaccctaaagtggagaatgaggatgagcctgttcgactggctcctgagagagaattcatcaagtccctgatggcgatcggcaagcggctggccacgctccccaccaaagagcagaaaacacagaggctgatctcagagctctccctgctcaaccataagctccctgcccgagtctggctgcccactgctggctttgaccaccacgtggtccgtgtaccccacacacaggctgttgtcctcaactccaaggacaaggctccctacctgatttatgtggaagtccttgaatgtgaaaactttgacaccaccagtgtccctgcccggatccccgagaaccgaattcggagtacgaggtccgtagaaaacttgcccgaatgtggtattacccatgagcagcgagctggcagcttcagcactgtgcccaactatgacaacgatgatgaggcctggtcggtggatgacataggcgagctgcaagtggagctccccgaagtgcataccaacagctgtgacaacatctcccagttctctgtggacagcatcaccagccaggagagcaaggagcctgtgttcattgcagcaggggacatccgccggcgcctttcggaacagctggctcataccccgacagccttcaaacgagacccagaagatccttctgcagttgctctcaaagagccctggcaggagaaagtacggcggatcagagagggctccccctacggccatctccccaattggcggctcctgtcagtcattgtcaagtgtggggatgaccttcggcaagagcttctggcctttcaggtgttgaagcaactgcagtccatttgggaacaggagcgagtgcccctttggatcaagccatacaagattcttgtgatttcggctgatagtggcatgattgaaccagtggtcaatgctgtgtccatccatcaggtgaagaaacagtcacagctctccttgctcgattacttcctacaggagcacggcagttacaccactgaggcattcctcagtgcacagcgcaattttgtgcaaagttgtgctgggtactgcttggtctgctacctgctgcaagtcaaggacagacacaatgggaatatccttttggacgcagaaggccacatcatccacatcgactttggcttcatcctctccagctcaccccgaaatctgggctttgagacgtcagcctttaagctgaccacagagtttgtggatgtgatgggcggcctggatggcgacatgttcaactactataagatgctgatgctgcaagggctgattgccgctcggaaacacatggacaaggtggtgcagatcgtggagatcatgcagcaaggtggggctggggtgaggtcaggtgctatagtgcctcaggcttcccctttaagtcggagccctggagcataagaaagctgatcccacgagactcggttgagggaggggggttcccagagagtttctagctctggtccagtgccttgtttctcctttaggacattcctcctgaccctggtaaggctaagtccagaaggctggggaaggggatagcagcacctgcctccttggcatctttagggagaaaacaggcccatttacagcctcctggtcccttctcacctccccacccctgtccagctctgagtttctcagtctccttccatctgtcttctccattccactatgacctctgattgccctgtcctctgccacccttcagctctgagaagtatttcccctctcatcattatctccttccactacagtcttgccatctacagtcttttgcccaggacccccttctgtcctcatccccctcctcaaggctccaggtgtataccaggtctgaactgccagtctccccctcctccccattcctgcccctaccccacaggttgatcgccgttgctcaggatcatccccatctggccccatgatgacggtggcccaggtcatctgtgagtgtcagacgtagcataggcagaggtctgcaaccagataagtgcccagctcagggcccactccctccagcctcctcccagcctgccctctgggcccctccacccttactgagggagatgtggtgttggtccccttccttcctctgcccacatgccctcacctacagaagggcttaggcgtggggtgatgaggggttcctgccggttccttctctctgcccaagcagaactgcacccacatcatcaaggacctgaggtgggaggaaaagggcacttcagatgccccagctctgtatttgctatggctgacaccactgcccctcccgtccatccatgaccctgaactccgactgcttcccccaggttctcagcttccttgcttccatggctccagcaccattcgaaacctcaaagagaggttccacatgagcatgactgaggagcagctgcagctgctggtggagcagatggtggatggcagtatgcggtctatcaccaccaaactctatgacggcttccagtacctcaccaacggcatcatgtgacacgctcctcagcccaggagtggtggggggtccagggcaccctccctagagggcccttgtctgagaaaccccaaaccaggaaaccccacctacccaaccatccacccaagggaaatggaaggcaagaaacacgaaggatcatgtggtaactgcgagagcttgctgaggggtgggagagccagctgtggggtccagacttgttggggcttccctgcccctcctggtctgtgtcagtattaccaccagactgactccaggactcactgccctccagaaaacagaggtgacaaatgtgagggacactggggcctttcttctccttgtaggggtctctcagaggttctttccacaggccatcctcttattccgttctggggcccaggaagtggggaagagtaggttctcggtacttaggacttgatcctgtggttggccactggccatgctgctgcccagctctacccctcccagggacctacccctcccagggaccgacccctggcccaagctccccttgctggcgggcgctgcgtgggccctgcacttgctgaggttccccatcatgggcaaggaagggaattcccacagccctccagtgtactgagggtactggcctagccatgtggaattccctaccctgactccttccccaaacccagggaaaagagctctcaattttttatttttaatttttgtttgaaataaagtccttagttagcca

SEQ ID NO: 350584 - DNA, 4029 bp, Homo sapiens
gaaaaatacacaaaagcaacaccagaggcccatttgcatggcgtgtttttgtttatttgtttggcctaatatggtttcgttttgtttggaagaagggattgtgccctccaagcctttgtcgtttcactcacctctcccaacctggccctgtccagcccctccctggagggctgggcatatggatgctggaggtcacaggctgcccaggcaggttggtgacctcggaggcagaaccacggcctcgagtcgggcctctaacggcgaaaagactgacgcggttggaccgcgccattcccgaaatgttaaggagcttaaactccgcatcgtcctccaagataagtaggaaaagggcagtcagaaagaacgtcttccccgtccgccgtcttcctgcgcgcccttctaggaacccagcgtccatcccacggcctgatttactaagggagtcttgtagcatacgggagggggaaaagtcattgattgcaattacggcatgttccaggcagctcacccgactccttagattactatggaatcggtagggtcctgaccgctggggaagcaggaaagcgtatcctgggaagaaaggcttggcttggactccggagaagaatactacatcgagacctgctggggaattttattttattttattatttttttggtcttggttgtactgagggaggaagaagaggttgtgtggcccggtcgaacttgtggcagcctgaaggccccctcaggcggcgccgcgggcagccccgcagccggggcctggtgcagcctccgcggccgctgtcagggaagcgcaggcggccaatggaacccgggagcggtcgctgctgctgaggcggcagtgtcggcagtccaaccgcgactgcccgcaccccctccgcgggggtcccccagagcttggaagctcgaagtctggctgtggccatgggagatacagtagtggagcctgcccccttgaagccaacttctgagcccacttctggcccaccagggaataatggggggtccctgctaagtgtcatcacggagggggtcggggaactatcagtgattgaccctgaggtggcccagaaggcctgccaggaggtgttggagaaagtcaagcttttgcatggaggcgtggcagtctctagcagaggcaccccactggagttggtcaatggggatggtgtggacagtgagatccgttgcctagatgatccacctgcccagatcagggaggaggaagatgagatgggggccgctgtggcctcaggcacagccaaaggagcaagaagacggcggcagaacaactcagctaaacagtcttggctgctgaggctgtttgagtcaaaactgtttgacatctccatggccatttcatacctgtataactccaaggagcctggagtacaagcctacattggcaaccggctcttctgctttcgcaacgaggacgtggacttctatctgccccagttgcttaacatgtacatccacatggatgaggacgtgggtgatgccattaagccctacatagtccaccgttgccgccagagcattaacttttccctccagtgtgccctgttgcttggggcctattcttcagacatgcacatttccactcaacgacactcccgtgggaccaagctacggaagctgatcctctcagatgagctaaagccagctcacaggaagagggagctgccctccttgagcccggcccctgacacagggctgtctccctccaaaaggactcaccagcgctctaagtcagatgccactgccagcataagtctcagcagcaacctgaaacgaacagccagcaaccctaaagtggagaatgaggatgagcctgttcgactggctcctgagagagaattcatcaagtccctgatggcgatcggcaagcggctggccacgctccccaccaaagagcagaaaacacagaggctgatctcagagctctccctgctcaaccataagctccctgcccgagtctggctgcccactgctggctttgaccaccacgtggtccgtgtaccccacacacaggctgttgtcctcaactccaaggacaaggctccctacctgatttatgtggaagtccttgaatgtgaaaactttgacaccaccagtgtccctgcccggatccccgagaaccgaattcggagtacgaggtccgtagaaaacttgcccgaatgtggtattacccatgagcagcgagctggcagcttcagcactgtgcccaactatgacaacgatgatgaggcctggtcggtggatgacataggcgagctgcaagtggagctccccgaagtgcataccaacagctgtgacaacatctcccagttctctgtggacagcatcaccagccaggagagcaaggagcctgtgttcattgcagcaggggacatccgccggcgcctttcggaacagctggctcataccccgacagccttcaaacgagacccagaagatccttctgcagttgctctcaaagagccctggcaggagaaagtacggcggatcagagagggctccccctacggccatctccccaattggcggctcctgtcagtcattgtcaagtgtggggatgaccttcggcaagagcttctggcctttcaggtgttgaagcaactgcagtccatttgggaacaggagcgagtgcccctttggatcaagccatacaagattcttgtgatttcggctgatagtggcatgattgaaccagtggtcaatgctgtgtccatccatcaggtgaagaaacagtcacagctctccttgctcgattacttcctacaggagcacggcagttacaccactgaggcattcctcagtgcacagcgcaattttgtgcaaagttgtgctgggtactgcttggtctgctacctgctgcaagtcaaggacagacacaatgggaatatccttttggacgcagaaggccacatcatccacatcgactttggcttcatcctctccagctcaccccgaaatctgggctttgagacgtcagcctttaagctgaccacagagtttgtggatgtgatgggcggcctggatggcgacatgttcaactactataagatgctgatgctgcaagggctgattgccgctcggaaacacatggacaaggttctcagcttccttgcttccatggctccagcaccattcgaaacctcaaagagaggttccacatgagcatgactgaggagcagctgcagctgctggtggagcagatggtggatggcagtatgcggtctatcaccaccaaactctatgacggcttccagtacctcaccaacggcatcatgtgacacgctcctcagcccaggagtggtggggggtccagggcaccctccctagagggcccttgtctgagaaaccccaaaccaggaaaccccacctacccaaccatccacccaagggaaatggaaggcaagaaacacgaaggatcatgtggtaactgcgagagcttgctgaggggtgggagagccagctgtggggtccagacttgttggggcttccctgcccctcctggtctgtgtcagtattaccaccagactgactccaggactcactgccctccagaaaacagaggtgacaaatgtgagggacactggggcctttcttctccttgtaggggtctctcagaggttctttccacaggccatcctcttattccgttctggggcccaggaagtggggaagagtaggttctcggtacttaggacttgatcctgtggttggccactggccatgctgctgcccagctctacccctcccagggacctacccctcccagggaccgacccctggcccaagctccccttgctggcgggcgctgcgtgggccctgcacttgctgaggttccccatcatgggcaaggaagggaattcccacagccctccagtgtactgagggtactggcctagccatgtggaattccctaccctgactccttccccaaacccagggaaaagagctctcaattttttatttttaatttttgtttgaaataaagtccttagttagcca

SEQ ID NO: 350585 - DNA, 2952 bp, Homo sapiens
gcaccccagcgctactagcctgatgttaataaagtagaggcaccccactggagttggtcaatggggatggtgtggacagtgagatccgttgcctagatgatccacctgcccagatcagggaggaggaagatgagatgggggccgctgtggcctcaggcacagccaaaggagcaagaagacggcggcagaacaactcagctaaacagtcttggctgctgaggctgtttgagtcaaaactgtttgacatctccatggccatttcatacctgtataactccaaggagcctggagtacaagcctacattggcaaccggctcttctgctttcgcaacgaggacgtggacttctatctgccccagttgcttaacatgtacatccacatggatgaggacgtgggtgatgccattaagccctacatagtccaccgttgccgccagagcattaacttttccctccagtgtgccctgttgcttggggcctattcttcagacatgcacatttccactcaacgacactcccgtgggaccaagctacggaagctgatcctctcagatgagctaaagccagctcacaggaagagggagctgccctccttgagcccggcccctgacacagggctgtctccctccaaaaggactcaccagcgctctaagtcagatgccactgccagcataagtctcagcagcaacctgaaacgaacagccagcaaccctaaagtggagaatgaggatgagcctgttcgactggctcctgagagagaattcatcaagtccctgatggcgatcggcaagcggctggccacgctccccaccaaagagcagaaaacacagaggctgatctcagagctctccctgctcaaccataagctccctgcccgagtctggctgcccactgctggctttgaccaccacgtggtccgtgtaccccacacacaggctgttgtcctcaactccaaggacaaggctccctacctgatttatgtggaagtccttgaatgtgaaaactttgacaccaccagtgtccctgcccggatccccgagaaccgaattcggagtacgaggtccgtagaaaacttgcccgaatgtggtattacccatgagcagcgagctggcagcttcagcactgtgcccaactatgacaacgatgatgaggcctggtcggtggatgacataggcgagctgcaagtggagctccccgaagtgcataccaacagctgtgacaacatctcccagttctctgtggacagcatcaccagccaggagagcaaggagcctgtgttcattgcagcaggggacatccgccggcgcctttcggaacagctggctcataccccgacagccttcaaacgagacccagaagatccttctgcagttgctctcaaagagccctggcaggagaaagtacggcggatcagagagggctccccctacggccatctccccaattggcggctcctgtcagtcattgtcaagtgtggggatgaccttcggcaagagcttctggcctttcaggtgttgaagcaactgcagtccatttgggaacaggagcgagtgcccctttggatcaagccatacaagattcttgtgatttcggctgatagtggcatgattgaaccagtggtcaatgctgtgtccatccatcaggtgaagaaacagtcacagctctccttgctcgattacttcctacaggagcacggcagttacaccactgaggcattcctcagtgcacagcgcaattttgtgcaaagttgtgctgggtactgcttggtctgctacctgctgcaagtcaaggacagacacaatgggaatatccttttggacgcagaaggccacatcatccacatcgactttggcttcatcctctccagctcaccccgaaatctgggctttgagacgtcagcctttaagctgaccacagagtttgtggatgtgatgggcggcctggatggcgacatgttcaactactataagatgctgatgctgcaagggctgattgccgctcggaaacacatggacaaggtggtgcagatcgtggagatcatgcagcaaggttctcagcttccttgcttccatggctccagcaccattcgaaacctcaaagagaggttccacatgagcatgactgaggagcagctgcagctgctggtggagcagatggtggatggcagtatgcggtctatcaccaccaaactctatgacggcttccagtacctcaccaacggcatcatgtgacacgctcctcagcccaggagtggtggggggtccagggcaccctccctagagggcccttgtctgagaaaccccaaaccaggaaaccccacctacccaaccatccacccaagggaaatggaaggcaagaaacacgaaggatcatgtggtaactgcgagagcttgctgaggggtgggagagccagctgtggggtccagacttgttggggcttccctgcccctcctggtctgtgtcagtattaccaccagactgactccaggactcactgccctccagaaaacagaggtgacaaatgtgagggacactggggcctttcttctccttgtaggggtctctcagaggttctttccacaggccatcctcttattccgttctggggcccaggaagtggggaagagtaggttctcggtacttaggacttgatcctgtggttggccactggccatgctgctgcccagctctacccctcccagggacctacccctcccagggaccgacccctggcccaagctccccttgctggcgggcgctgcgtgggccctgcacttgctgaggttccccatcatgggcaaggaagggaattcccacagccctccagtgtactgagggtactggcctagccatgtggaattccctaccctgactccttccccaaacccagggaaaagagctctcaattttttatttttaatttttgtttgaaataaagtccttagttagcca

SEQ ID NO: 350586 - DNA, 2774 bp, Homo sapiens
ggcttccaagaattgcctgttcccttctccttaagggatctcgggcccttgtcatcaatccgtaccatttacattcttactttgaacctagtcctcactcttctctgggatgcattatgatccctataactttctttagcttctctttctccctcctcaatcccccaactttctagaggtttctgtctgtaggggagagatttgacagtgcccttcccattcaggatttccaactttgacacctccctcgagtttcagggatttctctgatccttgtgacatttggtctgtttttcccgtgggcttcatgtgttctctgttacactctttatctccacataccacttatttcaggatcaactaaaccttgaactaagaagaaaaatgtgttgtgagcagggggagcctcagctgcctcaggccgttcaggacagaagggtgtttctgaaggccggagcaagttttgaagaagtccctatcagattacacttggttgactactccggagcagccactaagagggatgaacaggcctgcgtggaaattgaatgagattcctgttcgactggctcctgagagagaattcatcaagtccctgatggcgatcggcaagcggctggccacgctccccaccaaagagcagaaaacacagaggctgatctcagagctctccctgctcaaccataagctccctgcccgagtctggctgcccactgctggctttgaccaccacgtggtccgtgtaccccacacacaggctgttgtcctcaactccaaggacaaggctccctacctgatttatgtggaagtccttgaatgtgaaaactttgacaccaccagtgtccctgcccggatccccgagaaccgaattcggagtacgaggtccgtagaaaacttgcccgaatgtggtattacccatgagcagcgagctggcagcttcagcactgtgcccaactatgacaacgatgatgaggcctggtcggtggatgacataggcgagctgcaagtggagctccccgaagtgcataccaacagctgtgacaacatctcccagttctctgtggacagcatcaccagccaggagagcaaggagcctgtgttcattgcagcaggggacatccgccggcgcctttcggaacagctggctcataccccgacagccttcaaacgagacccagaagatccttctgcagttgctctcaaagagccctggcaggagaaagtacggcggatcagagagggctccccctacggccatctccccaattggcggctcctgtcagtcattgtcaagtgtggggatgaccttcggcaagagcttctggcctttcaggtgttgaagcaactgcagtccatttgggaacaggagcgagtgcccctttggatcaagccatacaagattcttgtgatttcggctgatagtggcatgattgaaccagtggtcaatgctgtgtccatccatcaggtgaagaaacagtcacagctctccttgctcgattacttcctacaggagcacggcagttacaccactgaggcattcctcagtgcacagcgcaattttgtgcaaagttgtgctgggtactgcttggtctgctacctgctgcaagtcaaggacagacacaatgggaatatccttttggacgcagaaggccacatcatccacatcgactttggcttcatcctctccagctcaccccgaaatctgggctttgagacgtcagcctttaagctgaccacagagtttgtggatgtgatgggcggcctggatggcgacatgttcaactactataagatgctgatgctgcaagggctgattgccgctcggaaacacatggacaaggtggtgcagatcgtggagatcatgcagcaaggttctcagcttccttgcttccatggctccagcaccattcgaaacctcaaagagaggttccacatgagcatgactgaggagcagctgcagctgctggtggagcagatggtggatggcagtatgcggtctatcaccaccaaactctatgacggcttccagtacctcaccaacggcatcatgtgacacgctcctcagcccaggagtggtggggggtccagggcaccctccctagagggcccttgtctgagaaaccccaaaccaggaaaccccacctacccaaccatccacccaagggaaatggaaggcaagaaacacgaaggatcatgtggtaactgcgagagcttgctgaggggtgggagagccagctgtggggtccagacttgttggggcttccctgcccctcctggtctgtgtcagtattaccaccagactgactccaggactcactgccctccagaaaacagaggtgacaaatgtgagggacactggggcctttcttctccttgtaggggtctctcagaggttctttccacaggccatcctcttattccgttctggggcccaggaagtggggaagagtaggttctcggtacttaggacttgatcctgtggttggccactggccatgctgctgcccagctctacccctcccagggacctacccctcccagggaccgacccctggcccaagctccccttgctggcgggcgctgcgtgggccctgcacttgctgaggttccccatcatgggcaaggaagggaattcccacagccctccagtgtactgagggtactggcctagccatgtggaattccctaccctgactccttccccaaacccagggaaaagagctctcaattttttatttttaatttttgtttgaaataaagtccttagttagcca

SEQ ID NO: 350587 - DNA, 1756 bp, Homo sapiens
tgagcagctgttccgaaaggcgccggggatgtcccctgctgcaatgaacacaggctccttgctcctcctggctggtgatgctgtccacagagaactgggagatgttgtcacagctgttggtatccagtgtggagagagacagccttcaaacgagacccagaagatccttctgcagttgctctcaaagagccctggcaggagaaagtacggcggatcagagagggctccccctacggccatctccccaattggcggctcctgtcagtcattgtcaagtgtggggatgaccttcggcaagagcttctggcctttcaggtgttgaagcaactgcagtccatttgggaacaggagcgagtgcccctttggatcaagccatacaagattcttgtgatttcggctgatagtggcatgattgaaccagtggtcaatgctgtgtccatccatcaggtgaagaaacagtcacagctctccttgctcgattacttcctacaggagcacggcagttacaccactgaggcattcctcagtgcacagcgcaattttgtgcaaagttgtgctgggtactgcttggtctgctacctgctgcaagtcaaggacagacacaatgggaatatccttttggacgcagaaggccacatcatccacatcgactttggcttcatcctctccagctcaccccgaaatctgggctttgagacgtcagcctttaagctgaccacagagtttgtggatgtgatgggcggcctggatggcgacatgttcaactactataagatgctgatgctgcaagggctgattgccgctcggaaacacatggacaaggtggtgcagatcgtggagatcatgcagcaaggttctcagcttccttgcttccatggctccagcaccattcgaaacctcaaagagaggttccacatgagcatgactgaggagcagctgcagctgctggtggagcagatggtggatggcagtatgcggtctatcaccaccaaactctatgacggcttccagtacctcaccaacggcatcatgtgacacgctcctcagcccaggagtggtggggggtccagggcaccctccctagagggcccttgtctgagaaaccccaaaccaggaaaccccacctacccaaccatccacccaagggaaatggaaggcaagaaacacgaaggatcatgtggtaactgcgagagcttgctgaggggtgggagagccagctgtggggtccagacttgttggggcttccctgcccctcctggtctgtgtcagtattaccaccagactgactccaggactcactgccctccagaaaacagaggtgacaaatgtgagggacactggggcctttcttctccttgtaggggtctctcagaggttctttccacaggccatcctcttattccgttctggggcccaggaagtggggaagagtaggttctcggtacttaggacttgatcctgtggttggccactggccatgctgctgcccagctctacccctcccagggacctacccctcccagggaccgacccctggcccaagctccccttgctggcgggcgctgcgtgggccctgcacttgctgaggttccccatcatgggcaaggaagggaattcccacagccctccagtgtactgagggtactggcctagccatgtggaattccctaccctgactccttccccaaacccagggaaaagagctctcaattttttatttttaatttttgtttgaaataaagtccttagttagcca

SEQ ID NO: 350588 - DNA, 2403 bp, Homo sapiens
gaatcttaaactatttttattaaattattaatagcaatttcagaccccatagcctttgttagcagttttctgatttcctttctttccactgatagctttaggtcctaggaaactggacaggagattggagttacgggcagcaggaaacatggcaggggacccccctccctggtgtcatgtggccagtgtattgctgcttaaggttccagcctcagtcagactgactactgcctcttcctctcctctattccccctcctcagacacaatgggaatatccttttggacgcagaaggccacatcatccacatcgactttggcttcatcctctccagctcaccccgaaatctgggctttgagacgtcagcctttaagctgaccacagagtttgtggatgtgatgggcggcctggatggcgacatgttcaactactataagatgctgatgctgcaagggctgattgccgctcggaaacacatggacaaggtggtgcagatcgtggagatcatgcagcaaggtggggctggggtgaggtcaggtgctatagtgcctcaggcttcccctttaagtcggagccctggagcataagaaagctgatcccacgagactcggttgagggaggggggttcccagagagtttctagctctggtccagtgccttgtttctcctttaggacattcctcctgaccctggtaaggctaagtccagaaggctggggaaggggatagcagcacctgcctccttggcatctttagggagaaaacaggcccatttacagcctcctggtcccttctcacctccccacccctgtccagctctgagtttctcagtctccttccatctgtcttctccattccactatgacctctgattgccctgtcctctgccacccttcagctctgagaagtatttcccctctcatcattatctccttccactacagtcttgccatctacagtcttttgcccaggacccccttctgtcctcatccccctcctcaaggctccaggtgtataccaggtctgaactgccagtctccccctcctccccattcctgcccctaccccacaggttgatcgccgttgctcaggatcatccccatctggccccatgatgacggtggcccaggtcatctgtgagtgtcagacgtagcataggcagaggtctgcaaccagataagtgcccagctcagggcccactccctccagcctcctcccagcctgccctctgggcccctccacccttactgagggagatgtggtgttggtccccttccttcctctgcccacatgccctcacctacagaagggcttaggcgtggggtgatgaggggttcctgccggttccttctctctgcccaagcagaactgcacccacatcatcaaggacctgaggtgggaggaaaagggcacttcagatgccccagctctgtatttgctatggctgacaccactgcccctcccgtccatccatgaccctgaactccgactgcttcccccaggttctcagcttccttgcttccatggctccagcaccattcgaaacctcaaagagaggttccacatgagcatgactgaggagcagctgcagctgctggtggagcagatggtggatggcagtatgcggtctatcaccaccaaactctatgacggcttccagtacctcaccaacggcatcatgtgacacgctcctcagcccaggagtggtggggggtccagggcaccctccctagagggcccttgtctgagaaaccccaaaccaggaaaccccacctacccaaccatccacccaagggaaatggaaggcaagaaacacgaaggatcatgtggtaactgcgagagcttgctgaggggtgggagagccagctgtggggtccagacttgttggggcttccctgcccctcctggtctgtgtcagtattaccaccagactgactccaggactcactgccctccagaaaacagaggtgacaaatgtgagggacactggggcctttcttctccttgtaggggtctctcagaggttctttccacaggccatcctcttattccgttctggggcccaggaagtggggaagagtaggttctcggtacttaggacttgatcctgtggttggccactggccatgctgctgcccagctctacccctcccagggacctacccctcccagggaccgacccctggcccaagctccccttgctggcgggcgctgcgtgggccctgcacttgctgaggttccccatcatgggcaaggaagggaattcccacagccctccagtgtactgagggtactggcctagccatgtggaattccctaccctgactccttccccaaacccagggaaaagagctctcaattttttatttttaatttttgtttgaaataaagtccttagttagcca

SEQ ID NO: 350589 - DNA, 3749 bp, Homo sapiens
gaaaaatacacaaaagcaacaccagaggcccatttgcatggcgtgtttttgtttatttgtttggcctaatatggtttcgttttgtttggaagaagggattgtgccctccaagcctttgtcgtttcactcacctctcccaacctggccctgtccagcccctccctggagggctgggcatatggatgctggaggtcacaggctgcccaggcaggttggtgacctcggaggcagaaccacggcctcgagtcgggcctctaacggcgaaaagactgacgcggttggaccgcgccattcccgaaatgttaaggagcttaaactccgcatcgtcctccaagataagtaggaaaagggcagtcagaaagaacgtcttccccgtccgccgtcttcctgcgcgcccttctaggaacccagcgtccatcccacggcctgatttactaagggagtcttgtagcatacgggagggggaaaagtcattgattgcaattacggcatgttccaggcagctcacccgactccttagattactatggaatcggtagggtcctgaccgctggggaagcaggaaagcgtatcctgggaagaaaggcttggcttggactccggagaagaatactacatcgagacctgctggggaattttattttattttattatttttttggtcttggttgtactgagggaggaagaagaggttgtgtggcccggtcgaacttgtggcagcctgaaggccccctcaggcggcgccgcgggcagccccgcagccggggcctggtgcagcctccgcggccgctgtcagggaagcgcaggcggccaatggaacccgggagcggtcgctgctgctgaggcggcagtgtcggcagtccaaccgcgactgcccgcaccccctccgcgggggtcccccagagcttggaagctcgaagtctggctgtggccatgggagatacagtagtggagcctgcccccttgaagccaacttctgagcccacttctggcccaccagggaataatggggggtccctgctaagtgtcatcacggagggggtcggggaactatcagtgattgaccctgaggtggcccagaaggcctgccaggaggtgttggagaaagtcaagcttttgcatggaggcgtggcagtctctagcagaggcaccccactggagttggtcaatggggatggtgtggacagtgagatccgttgcctagatgatccacctgcccagatcagggaggaggaagatgagatgggggccgctgtggcctcaggcacagccaaaggagcaagaagacggcggcagaacaactcagctaaacagtcttggctgctgaggctgtttgagtcaaaactgtttgacatctccatggccatttcatacctgtataactccaaggagcctggagtacaagcctacattggcaaccggctcttctgctttcgcaacgaggacgtggacttctatctgccccagttgcttaacatgtacatccacatggatgaggacgtgggtgatgccattaagccctacatagtccaccgttgccgccagagcattaacttttccctccagtgtgccctgttgcttggggcctattcttcagacatgcacatttccactcaacgacactcccgtgggaccaagctacggaagctgatcctctcagatgagctaaagccagctcacaggaagagggagctgccctccttgagcccggcccctgacacagggctgtctccctccaaaaggactcaccagcgctctaagtcagatgccactgccagcataagtctcagcagcaacctgaaacgaacagccagcaaccctaaagtggagaatgaggatgagcctgttcgactggctcctgagagagaattcatcaagtccctgatggcgatcggcaagcggctggccacgctccccaccaaagagcagaaaacacagaggctgatctcagagctctccctgctcaaccataagctccctgcccgagtctggctgcccactgctggctttgaccaccacgtggtccgtgtaccccacacacaggctgttgtcctcaactccaaggacaaggctccctacctgatttatgtggaagtccttgaatgtgaaaactttgacaccaccagtgtccctgcccggatccccgagaaccgaattcggagtacgaggtccgtagaaaacttgcccgaatgtggtattacccatgagcagcgagctggcagcttcagcactgtgcccaactatgacaacgatgatgaggcctggtcggtggatgacataggcgagctgcaagtggagctccccgaagtgcataccaacagctgtgacaacatctcccagttctctgtggacagcatcaccagccaggagagcaaggagcctgtgttcattgcagcaggggacatccgccggcgcctttcggaacagctggctcataccccgacagccttcaaacgagacccagaagatccttctgcagttgctctcaaagagccctggcaggagaaagtacggcggatcagagagggctccccctacggccatctccccaattggcggctcctgtcagtcattgtcaagtgtggggatgaccttcggcaagagcttctggcctttcaggtgttgaagcaactgcagtccatttgggaacaggagcgagtgcccctttggatcaagccatacaagattcttgtgatttcggctgatagtggcatgattgaaccagtggtcaatgctgtgtccatccatcaggtgaagaaacagtcacagctctccttgctcgattacttcctacaggagcacggcagttacaccactgaggcattcctcagtgcacagcgcaattttgtgcaaagttgtgctgggtactgcttggtctgctacctgctgcaagtcaaggacagacacaatgggaatatccttttggacgcagaaggccacatcatccacatcgactttggcttcatcctctccagctcaccccgaaatctgggctttgagacgtcagcctttaagctgaccacagagtttgtggatgtgatgggcggcctggatggcgacatgttcaactactataagatgctgatgctgcaagggctgattgccgctcggaaacacatggacaaggtggtgcagatcgtggagatcatgcagcaaggttctcagcttccttgcttccatggctccagcaccattcgaaacctcaaagagaggttccacatgagcatgactgaggagcagctgcagctgctggtggagcagatggtggatggcagtatgcggtctatcaccaccaaactctatgacggcttccagtacctcaccaacggcatcatgtgacacgctcctcagcccaggagtggtggggggtccagggcaccctccctagagggcccttgtctgagaaaccccaaaccaggaaaccccacctacccaaccatccacccaagggaaatggaaggcaagaaacacgaaggatcatgtggtaactgcgagagcttgctgaggggtgggagagccagctgtggggtccagacttgttggggcttccctgcccctcctggtctgtgtcagtattaccaccagactgactccaggactcactgccctccagaaaacagaggtgacaaatgtgagggacactggggcctttcttctccttgtaggggtatcagtggtggtatcagagtggatagtggtggtatagggtatagggtggtatagtagtgtatgtgatacgatcctctaga

SEQ ID NO: 350590 - DNA, 3286 bp, Homo sapiens
gaaaaatacacaaaagcaacaccagaggcccatttgcatggcgtgtttttgtttatttgtttggcctaatatggtttcgttttgtttggaagaagggattgtgccctccaagcctttgtcgtttcactcacctctcccaacctggccctgtccagcccctccctggagggctgggcatatggatgctggaggtcacaggctgcccaggcaggttggtgacctcggaggcagaaccacggcctcgagtcgggcctctaacggcgaaaagactgacgcggttggaccgcgccattcccgaaatgttaaggagcttaaactccgcatcgtcctccaagataagtaggaaaagggcagtcagaaagaacgtcttccccgtccgccgtcttcctgcgcgcccttctaggaacccagcgtccatcccacggcctgatttactaagggagtcttgtagcatacgggagggggaaaagtcattgattgcaattacggcatgttccaggcagctcacccgactccttagattactatggaatcggtagggtcctgaccgctggggaagcaggaaagcgtatcctgggaagaaaggcttggcttggactccggagaagaatactacatcgagacctgctggggaattttattttattttattatttttttggtcttggttgtactgagggaggaagaagaggttgtgtggcccggtcgaacttgtggcagcctgaaggccccctcaggcggcgccgcgggcagccccgcagccggggcctggtgcagcctccgcggccgctgtcagggaagcgcaggcggccaatggaacccgggagcggtcgctgctgctgaggcggcagtgtcggcagtccaaccgcgactgcccgcaccccctccgcgggggtcccccagagcttggaagctcgaagtctggctgtggccatgggagatacagtagtggagcctgcccccttgaagccaacttctgagcccacttctggcccaccagggaataatggggggtccctgctaagtgtcatcacggagggggtcggggaactatcagtgattgaccctgaggtggcccagaaggcctgccaggaggtgttggagaaagtcaagcttttgcatggaggcgtggcagtctctagcagaggcaccccactggagttggtcaatggggatggtgtggacagtgagatccgttgcctagatgatccacctgcccagatcagggaggaggaagatgagatgggggccgctgtggcctcaggcacagccaaaggagcaagaagacggcggcagaacaactcagctaaacagtcttggctgctgaggctgtttgagtcaaaactgtttgacatctccatggccatttcatacctgtataactccaaggagcctggagtacaagcctacattggcaaccggctcttctgctttcgcaacgaggacgtggacttctatctgccccagttgcttaacatgtacatccacatggatgaggacgtgggtgatgccattaagccctacatagtccaccgttgccgccagagcattaacttttccctccagtgtgccctgttgcttggggcctattcttcagacatgcacatttccactcaacgacactcccgtgggaccaagctacggaagctgatcctctcagatgagctaaagccagctcacaggaagagggagctgccctccttgagcccggcccctgacacagggctgtctccctccaaaaggactcaccagcgctctaagtcagatgccactgccagcataagtctcagcagcaacctgaaacgaacagccagcaaccctaaagtggagaatgaggatgagcctgttcgactggctcctgagagagaattcatcaagtccctgatggcgatcggcaagcggctggccacgctccccaccaaagagcagaaaacacagaggctgatctcagagctctccctgctcaaccataagctccctgcccgagtctggctgcccactgctggctttgaccaccacgtggtccgtgtaccccacacacaggctgttgtcctcaactccaaggacaaggctccctacctgatttatgtggaagtccttgaatgtgaaaactttgacaccaccagtgtccctgcccggatccccgagaaccgaattcggagtacgaggtccgtagaaaacttgcccgaatgtggtattacccatgagcagcgagctggcagcttcagcactgtgcccaactatgacaacgatgatgaggcctggtcggtggatgacataggcgagctgcaagtggagctccccgaagtgcataccaacagctgtgacaacatctcccagttctctgtggacagcatcaccagccaggagagcaaggagcctgtgttcattgcagcaggggacatccgccggcgcctttcggaacagctggctcataccccgacagccttcaaacgagacccagaagatccttctgcagttgctctcaaagagccctggcaggagaaagtacggcggatcagagagggctccccctacggccatctccccaattggcggctcctgtcagtcattgtcaagtgtggggatgaccttcggcaagagcttctggcctttcaggtgttgaagcaactgcagtccatttgggaacaggagcgagtgcccctttggatcaagccatacaagattcttgtgatttcggctgatagtggcatgattgaaccagtggtcaatgctgtgtccatccatcaggtgaagaaacagtcacagctctccttgctcgattacttcctacaggagcacggcagttacaccactgaggcattcctcagtgcacagcgcaattttgtgcaaagttgtgctgggtactgcttggtctgctacctgctgcaagtcaaggacaggtaggtgacttctgctgctcatcctaacatttctccagggttctctctgtcccttcgtgtgtagttctcaattacttattactgccctccatggcaaagatgtgaaaaatgaaacaatgtattttaagcagagacagatgtgttcccatgacattaagtcaggaggcagactaataagaactagggtaaaagggcaaagaaatgaaggatttatgggaggactaagggtttgagtgagcagggtcttcaaggacaagggaaaatgatgacagaggaagctgcaggggaggtacatcccagctagaagaaataattgaatgtgattaaagcacagactgcactgcatggcagtggagtaggaggtggtaccatgaggcaggtaa

SEQ ID NO: 350591 - DNA, 2085 bp, Homo sapiens
gaaaaatacacaaaagcaacaccagaggcccatttgcatggcgtgtttttgtttatttgtttggcctaatatggtttcgttttgtttggaagaagggattgtgccctccaagcctttgtcgtttcactcacctctcccaacctggccctgtccagcccctccctggagggctgggcatatggatgctggaggtcacaggctgcccaggcaggttggtgacctcggaggcagaaccacggcctcgagtcgggcctctaacggcgaaaagactgacgcggttggaccgcgccattcccgaaatgttaaggagcttaaactccgcatcgtcctccaagataagtaggaaaagggcagtcagaaagaacgtcttccccgtccgccgtcttcctgcgcgcccttctaggaacccagcgtccatcccacggcctgatttactaagggagtcttgtagcatacgggagggggaaaagtcattgattgcaattacggcatgttccaggcagctcacccgactccttagattactatggaatcggtagggtcctgaccgctggggaagcaggaaagcgtatcctgggaagaaaggcttggcttggactccggagaagaatactacatcgagacctgctggggaattttattttattttattatttttttggtcttggttgtactgagggaggaagaagaggttgtgtggcccggtcgaacttgtggcagcctgaaggccccctcaggcggcgccgcgggcagccccgcagccggggcctggtgcagcctccgcggccgctgtcagggaagcgcaggcggccaatggaacccgggagcggtcgctgctgctgaggcggcagtgtcggcagtccaaccgcgactgcccgcaccccctccgcgggggtcccccagagcttggaagctcgaagtctggctgtggccatgggagatacagtagtggagcctgcccccttgaagccaacttctgagcccacttctggcccaccagggaataatggggggtccctgctaagtgtcatcacggagggggtcggggaactatcagtgattgaccctgaggtggcccagaaggcctgccaggaggtgttggagaaagtcaagcttttgcatggaggcgtggcagtctctagcagaggcaccccactggagttggtcaatggggatggtgtggacagtgagatccgttgcctagatgatccacctgcccagatcagggaggaggaagatgagatgggggccgctgtggcctcaggcacagccaaaggagcaagaagacggcggcagaacaactcagctaaacagtcttggctgctgaggctgtttgagtcaaaactgtttgacatctccatggccatttcatacctgtataactccaaggagcctggagtacaagcctacattggcaaccggctcttctgctttcgcaacgaggacgtggacttctatctgccccagttgcttaacatgtacatccacatggatgaggacgtgggtgatgccattaagccctacatagtccaccgttgccgccagagcattaacttttccctccagtgtgccctgttgcttggggcctattcttcagacatgcacatttccactcaacgacactcccgtgggaccaagctacggaagctgatcctctcagatgagctaaagccagctcacaggaagagggagctgccctccttgagcccggcccctgacacagggctgtctccctccaaaaggactcaccagcgctctaagtcagatgccactgccagcataagtctcagcagcaacctgaaacgaacagccagcaaccctaaagtggagaatgaggatgagcctgttcgactggctcctgagagagaattcatcaagtccctgatggcgatcggcaagcggctggccacgctccccaccaaagagcagaaaacacagaggctgatctcagagctctccctgctcaaccataagctggaggtatcacattccctgatttcaaactatactacaaagctatagtaatcaaaacagtacgatactggcataaaaacagacataagccaacgttgagatcaggcatgt

SEQ ID NO: 350592 - DNA, 2208 bp, Homo sapiens
gaaaaatacacaaaagcaacaccagaggcccatttgcatggcgtgtttttgtttatttgtttggcctaatatggtttcgttttgtttggaagaagggattgtgccctccaagcctttgtcgtttcactcacctctcccaacctggccctgtccagcccctccctggagggctgggcatatggatgctggaggtcacaggctgcccaggcaggttggtgacctcggaggcagaaccacggcctcgagtcgggcctctaacggcgaaaagactgacgcggttggaccgcgccattcccgaaatgttaaggagcttaaactccgcatcgtcctccaagataagtaggaaaagggcagtcagaaagaacgtcttccccgtccgccgtcttcctgcgcgcccttctaggaacccagcgtccatcccacggcctgatttactaagggagtcttgtagcatacgggagggggaaaagtcattgattgcaattacggcatgttccaggcagctcacccgactccttagattactatggaatcggtagggtcctgaccgctggggaagcaggaaagcgtatcctgggaagaaaggcttggcttggactccggagaagaatactacatcgagacctgctggggaattttattttattttattatttttttggtcttggttgtactgagggaggaagaagaggttgtgtggcccggtcgaacttgtggcagcctgaaggccccctcaggcggcgccgcgggcagccccgcagccggggcctggtgcagcctccgcggccgctgtcagggaagcgcaggcggccaatggaacccgggagcggtcgctgctgctgaggcggcagtgtcggcagtccaaccgcgactgcccgcaccccctccgcgggggtcccccagaggatcaactaaaccttgaactaagaagaaaaatgtgttgtgagcagggggagcctcagctgcctcaggccgttcaggacagaagggtgtttctgaaggccggagcaagttttgaagaagtccctatcagattacacttggttgactactccggagcagccactaagagggatgaacaggcctgcgtggaaattgaatgagattagttgagtccacgctccatgagaatgctgaacaccatccaaagcagcaaattgagattccttgatttggggaagaggtttgggaggaacccttcaataattggcatgggacaagaggggacccagtccaagtgtatttgggactcgcagtagggaggaacaattcagagagagcttggaagctcgaagtctggctgtggccatgggagatacagtagtggagcctgcccccttgaagccaacttctgagcccacttctggcccaccagggaataatggggggtccctgctaagtgtcatcacggagggggtcggggaactatcagtgattgaccctgaggtggcccagaaggcctgccaggaggtgttggagaaagtcaagcttttgcatggaggcgtggcagtctctagcagaggcaccccactggagttggtcaatggggatggtgtggacagtgagatccgttgcctagatgatccacctgcccagatcagggaggaggaagatgagatgggggccgctgtggcctcaggcacagccaaaggagcaagaagacggcggcagaacaactcagctaaacagtcttggctgctgaggctgtttgagtcaaaactgtttgacatctccatggccatttcatacctgtataactccaaggagcctggagtacaagcctacattggcaaccggctcttctgctttcgcaacgaggacgtggacttctatctgccccagttgcttaacatgtacatccacatggatgaggacgtgggtgatgccattaagccctacatagtccaccgttgccgccagagcattaacttttccctccatgttctctcacccgcttcaactccacattgtccaagtcacagaaaaagagaggcctgaatggagattcgaccacaaacagttttaatggtctggttttctccctagttccccaactgtttgttagtattattattactacaagaataaaggattcctgagagcctgtcccctcctctcctgtggcccccttgacaggactcatccctaccaaccccccacccccccgccccggatttctggggaaaaaaagaagtgaaaggcactgca

SEQ ID NO: 350593 - DNA, 244 bp, Homo sapiens
ccctgcccgagtctggctgcccactgctggctttgaccaccacgtggtccgtgtaccccacacacaggctgttgtcctcaactccaaggacaaggtagatgggttctggcccaaacccctaccctggacgtgactcttcacccatggttgttcagagtttgcgtgtatgaccagtgaggccctcaccaacatcctagactcccttcatagttcatgatgcatatgtcaaccatgactctgtctc

SEQ ID NO: 350594 - DNA, 622 bp, Homo sapiens
gaatcttaaactatttttattaaattattaatagcaatttcagaccccatagcctttgttagcagttttctgatttcctttctttccactgatagctttaggtcctaggaaactggacaggagattggagttacgggcagcaggaaacatggcaggggacccccctccctggtgtcatgtggccagtgtattgctgcttaaggttccagcctcagtcagactgactactgcctcttcctctcctctattccccctcctcagacacaatgggaatatccttttggacgcagaaggccacatcatccacatcgactttggcttcatcctctccagctcaccccgaaatctgggctttgagacgtcagcctttaagctgaccacagagtttgtggatgtgatgggcggcctggatggagatgacactggcagagaagcgaggtagagtgagagtgagagctttgaaggccacagttaagaggaatgactcagaagggggagccatggttggagatgacactggcagagaagcgagagcaggtgtgcaggccaccattccagtagcccaggcaagaaccaggccatgagcaggttagaaccgtggctcagaacatagtggaaggga

SEQ ID NO: 350595 - DNA, 4307 bp, Homo sapiens
gaaaaatacacaaaagcaacaccagaggcccatttgcatggcgtgtttttgtttatttgtttggcctaatatggtttcgttttgtttggaagaagggattgtgccctccaagcctttgtcgtttcactcacctctcccaacctggccctgtccagcccctccctggagggctgggcatatggatgctggaggtcacaggctgcccaggcaggttggtgacctcggaggcagaaccacggcctcgagtcgggcctctaacggcgaaaagactgacgcggttggaccgcgccattcccgaaatgttaaggagcttaaactccgcatcgtcctccaagataagtaggaaaagggcagtcagaaagaacgtcttccccgtccgccgtcttcctgcgcgcccttctaggaacccagcgtccatcccacggcctgatttactaagggagtcttgtagcatacgggagggggaaaagtcattgattgcaattacggcatgttccaggcagctcacccgactccttagattactatggaatcggtagggtcctgaccgctggggaagcaggaaagcgtatcctgggaagaaaggcttggcttggactccggagaagaatactacatcgagacctgctggggaattttattttattttattatttttttggtcttggttgtactgagggaggaagaagaggttgtgtggcccggtcgaacttgtggcagcctgaaggccccctcaggcggcgccgcgggcagccccgcagccggggcctggtgcagcctccgcggccgctgtcagggaagcgcaggcggccaatggaacccgggagcggtcgctgctgctgaggcggcagtgtcggcagtccaaccgcgactgcccgcaccccctccgcgggggtcccccagaggatcaactaaaccttgaactaagaagaaaaatgtgttgtgagcagggggagcctcagctgcctcaggccgttcaggacagaagggtgtttctgaaggccggagcaagttttgaagaagtccctatcagattacacttggttgactactccggagcagccactaagagggatgaacaggcctgcgtggaaattgaatgagattcttggaagctcgaagtctggctgtggccatgggagatacagtagtggagcctgcccccttgaagccaacttctgagcccacttctggcccaccagggaataatggggggtccctgctaagtgtcatcacggagggggtcggggaactatcagtgattgaccctgaggtggcccagaaggcctgccaggaggtgttggagaaagtcaagcttttgcatggaggcgtggcagtctctagcagaggcaccccactggagttggtcaatggggatggtgtggacagtgagatccgttgcctagatgatccacctgcccagatcagggaggaggaagatgagatgggggccgctgtggcctcaggcacagccaaaggagcaagaagacggcggcagaacaactcagctaaacagtcttggctgctgaggctgtttgagtcaaaactgtttgacatctccatggccatttcatacctgtataactccaaggagcctggagtacaagcctacattggcaaccggctcttctgctttcgcaacgaggacgtggacttctatctgccccagttgcttaacatgtacatccacatggatgaggacgtgggtgatgccattaagccctacatagtccaccgttgccgccagagcattaacttttccctccagtgtgccctgttgcttggggcctattcttcagacatgcacatttccactcaacgacactcccgtgggaccaagctacggaagctgatcctctcagatgagctaaagccagctcacaggaagagggagctgccctccttgagcccggcccctgacacagggctgtctccctccaaaaggactcaccagcgctctaagtcagatgccactgccagcataagtctcagcagcaacctgaaacgaacagccagcaaccctaaagtggagaatgaggatgaggagctctcctccagcaccgagagtattgataattcattcagttcccctgttcgactggctcctgagagagaattcatcaagtccctgatggcgatcggcaagcggctggccacgctccccaccaaagagcagaaaacacagaggctgatctcagagctctccctgctcaaccataagctccctgcccgagtctggctgcccactgctggctttgaccaccacgtggtccgtgtaccccacacacaggctgttgtcctcaactccaaggacaaggctccctacctgatttatgtggaagtccttgaatgtgaaaactttgacaccaccagtgtccctgcccggatccccgagaaccgaattcggagtacgaggtccgtagaaaacttgcccgaatgtggtattacccatgagcagcgagctggcagcttcagcactgtgcccaactatgacaacgatgatgaggcctggtcggtggatgacataggcgagctgcaagtggagctccccgaagtgcataccaacagctgtgacaacatctcccagttctctgtggacagcatcaccagccaggagagcaaggagcctgtgttcattgcagcaggggacatccgccggcgcctttcggaacagctggctcataccccgacagccttcaaacgagacccagaagatccttctgcagttgctctcaaagagccctggcaggagaaagtacggcggatcagagagggctccccctacggccatctccccaattggcggctcctgtcagtcattgtcaagtgtggggatgaccttcggcaagagcttctggcctttcaggtgttgaagcaactgcagtccatttgggaacaggagcgagtgcccctttggatcaagccatacaagattcttgtgatttcggctgatagtggcatgattgaaccagtggtcaatgctgtgtccatccatcaggtgaagaaacagtcacagctctccttgctcgattacttcctacaggagcacggcagttacaccactgaggcattcctcagtgcacagcgcaattttgtgcaaagttgtgctgggtactgcttggtctgctacctgctgcaagtcaaggacagacacaatgggaatatccttttggacgcagaaggccacatcatccacatcgactttggcttcatcctctccagctcaccccgaaatctgggctttgagacgtcagcctttaagctgaccacagagtttgtggatgtgatgggcggcctggatggcgacatgttcaactactataagatgctgatgctgcaagggctgattgccgctcggaaacacatggacaaggtggtgcagatcgtggagatcatgcagcaaggttctcagcttccttgcttccatggctccagcaccattcgaaacctcaaagagaggttccacatgagcatgactgaggagcagctgcagctgctggtggagcagatggtggatggcagtatgcggtctatcaccaccaaactctatgacggcttccagtacctcaccaacggcatcatgtgacacgctcctcagcccaggagtggtggggggtccagggcaccctccctagagggcccttgtctgagaaaccccaaaccaggaaaccccacctacccaaccatccacccaagggaaatggaaggcaagaaacacgaaggatcatgtggtaactgcgagagcttgctgaggggtgggagagccagctgtggggtccagacttgttggggcttccctgcccctcctggtctgtgtcagtattaccaccagactgactccaggactcactgccctccagaaaacagaggtgacaaatgtgagggacactggggcctttcttctccttgtaggggtctctcagaggttctttccacaggccatcctcttattccgttctggggcccaggaagtggggaagagtaggttctcggtacttaggacttgatcctgtggttggccactggccatgctgctgcccagctctacccctcccagggacctacccctcccagggaccgacccctggcccaagctccccttgctggcgggcgctgcgtgggccctgcacttgctgaggttccccatcatgggcaaggaagggaattcccacagccctccagtgtactgagggtactggcctagccatgtggaattccctaccctgactccttccccaaacccagggaaaagagctctcaattttttatttttaatttttgtttgaaataaagtccttagttagcca

SEQ ID NO: 350596 - DNA, 3834 bp, Homo sapiens
ggcttccaagaattgcctgttcccttctccttaagggatctcgggcccttgtcatcaatccgcattatgatccctataactttctttagcttctctttctccctcctcaatcccccaactttctagaggtttctgtctgtaggggagagatttgacagtgcccttcccattcaggatttccaactttgacacctccctcgagtttcagggatttctctgatccttgtgacatttggtctgtttttcccgtgggcttcatgtgttctctgttacactctttatctccacataccacttatttcaggatcaactaaaccttgaactaagaagaaaaatgtgttgtgagcagggggagcctcagctgcctcaggccgttcaggacagaagggtgtttctgaaggccggagcaagttttgaagaagtccctatcagattacacttggttgactactccggagcagccactaagagggatgaacaggcctgcgtggaaattgaatgagattagttgagtccacgctccatgagaatgctgaacaccatccaaagcagcaaattgagattccttgatttggggaagaggtttgggaggaacccttcaataattggcatgggacaagaggggacccagtccaagtgtatttgggactcgcagtagggaggaacaattcagagagagcttggaagctcgaagtctggctgtggccatgggagatacagtagtggagcctgcccccttgaagccaacttctgagcccacttctggcccaccagggaataatggggggtccctgctaagtgtcatcacggagggggtcggggaactatcagtgattgaccctgaggtggcccagaaggcctgccaggaggtgttggagaaagtcaagcttttgcatggaggcgtggcagtctctagcagaggcaccccactggagttggtcaatggggatggtgtggacagtgagatccgttgcctagatgatccacctgcccagatcagggaggaggaagatgagatgggggccgctgtggcctcaggcacagccaaaggagcaagaagacggcggcagaacaactcagctaaacagtcttggctgctgaggctgtttgagtcaaaactgtttgacatctccatggccatttcatacctgtataactccaaggagcctggagtacaagcctacattggcaaccggctcttctgctttcgcaacgaggacgtggacttctatctgccccagttgcttaacatgtacatccacatggatgaggacgtgggtgatgccattaagccctacatagtccaccgttgccgccagagcattaacttttccctccagtgtgccctgttgcttggggcctattcttcagacatgcacatttccactcaacgacactcccgtgggaccaagctacggaagctgatcctctcagatgagctaaagccagctcacaggaagagggagctgccctccttgagcccggcccctgacacagggctgtctccctccaaaaggactcaccagcgctctaagtcagatgccactgccagcataagtctcagcagcaacctgaaacgaacagccagcaaccctaaagtggagaatgaggatgagcctgttcgactggctcctgagagagaattcatcaagtccctgatggcgatcggcaagcggctggccacgctccccaccaaagagcagaaaacacagaggctgatctcagagctctccctgctcaaccataagctccctgcccgagtctggctgcccactgctggctttgaccaccacgtggtccgtgtaccccacacacaggctgttgtcctcaactccaaggacaaggctccctacctgatttatgtggaagtccttgaatgtgaaaactttgacaccaccagtgtccctgcccggatccccgagaaccgaattcggagtacgaggtccgtagaaaacttgcccgaatgtggtattacccatgagcagcgagctggcagcttcagcactgtgcccaactatgacaacgatgatgaggcctggtcggtggatgacataggcgagctgcaagtggagctccccgaagtgcataccaacagctgtgacaacatctcccagttctctgtggacagcatcaccagccaggagagcaaggagcctgtgttcattgcagcaggggacatccgccggcgcctttcggaacagctggctcataccccgacagccttcaaacgagacccagaagatccttctgcagttgctctcaaagagccctggcaggagaaagtacggcggatcagagagggctccccctacggccatctccccaattggcggctcctgtcagtcattgtcaagtgtggggatgaccttcggcaagagcttctggcctttcaggtgttgaagcaactgcagtccatttgggaacaggagcgagtgcccctttggatcaagccatacaagattcttgtgatttcggctgatagtggcatgattgaaccagtggtcaatgctgtgtccatccatcaggtgaagaaacagtcacagctctccttgctcgattacttcctacaggagcacggcagttacaccactgaggcattcctcagtgcacagcgcaattttgtgcaaagttgtgctgggtactgcttggtctgctacctgctgcaagtcaaggacagacacaatgggaatatccttttggacgcagaaggccacatcatccacatcgactttggcttcatcctctccagctcaccccgaaatctgggctttgagacgtcagcctttaagctgaccacagagtttgtggatgtgatgggcggcctggatggcgacatgttcaactactataagatgctgatgctgcaagggctgattgccgctcggaaacacatggacaaggtggtgcagatcgtggagatcatgcagcaaggttctcagcttccttgcttccatggctccagcaccattcgaaacctcaaagagaggttccacatgagcatgactgaggagcagctgcagctgctggtggagcagatggtggatggcagtatgcggtctatcaccaccaaactctatgacggcttccagtacctcaccaacggcatcatgtgacacgctcctcagcccaggagtggtggggggtccagggcaccctccctagagggcccttgtctgagaaaccccaaaccaggaaaccccacctacccaaccatccacccaagggaaatggaaggcaagaaacacgaaggatcatgtggtaactgcgagagcttgctgaggggtgggagagccagctgtggggtccagacttgttggggcttccctgcccctcctggtctgtgtcagtattaccaccagactgactccaggactcactgccctccagaaaacagaggtgacaaatgtgagggacactggggcctttcttctccttgtaggggtctctcagaggttctttccacaggccatcctcttattccgttctggggcccaggaagtggggaagagtaggttctcggtacttaggacttgatcctgtggttggccactggccatgctgctgcccagctctacccctcccagggacctacccctcccagggaccgacccctggcccaagctccccttgctggcgggcgctgcgtgggccctgcacttgctgaggttccccatcatgggcaaggaagggaattcccacagccctccagtgtactgagggtactggcctagccatgtggaattccctaccctgactccttccccaaacccagggaaaagagctctcaattttttatttttaatttttgtttgaaataaagtccttagttagcca

SEQ ID NO: 350597 - DNA, 4741 bp, Homo sapiens
gaaaaatacacaaaagcaacaccagaggcccatttgcatggcgtgtttttgtttatttgtttggcctaatatggtttcgttttgtttggaagaagggattgtgccctccaagcctttgtcgtttcactcacctctcccaacctggccctgtccagcccctccctggagggctgggcatatggatgctggaggtcacaggctgcccaggcaggttggtgacctcggaggcagaaccacggcctcgagtcgggcctctaacggcgaaaagactgacgcggttggaccgcgccattcccgaaatgttaaggagcttaaactccgcatcgtcctccaagataagtaggaaaagggcagtcagaaagaacgtcttccccgtccgccgtcttcctgcgcgcccttctaggaacccagcgtccatcccacggcctgatttactaagggagtcttgtagcatacgggagggggaaaagtcattgattgcaattacggcatgttccaggcagctcacccgactccttagattactatggaatcggtagggtcctgaccgctggggaagcaggaaagcgtatcctgggaagaaaggcttggcttggactccggagaagaatactacatcgagacctgctggggaattttattttattttattatttttttggtcttggttgtactgagggaggaagaagaggttgtgtggcccggtcgaacttgtggcagcctgaaggccccctcaggcggcgccgcgggcagccccgcagccggggcctggtgcagcctccgcggccgctgtcagggaagcgcaggcggccaatggaacccgggagcggtcgctgctgctgaggcggcagtgtcggcagtccaaccgcgactgcccgcaccccctccgcgggggtcccccagaggatcaactaaaccttgaactaagaagaaaaatgtgttgtgagcagggggagcctcagctgcctcaggccgttcaggacagaagggtgtttctgaaggccggagcaagttttgaagaagtccctatcagattacacttggttgactactccggagcagccactaagagggatgaacaggcctgcgtggaaattgaatgagattcttggaagctcgaagtctggctgtggccatgggagatacagtagtggagcctgcccccttgaagccaacttctgagcccacttctggcccaccagggaataatggggggtccctgctaagtgtcatcacggagggggtcggggaactatcagtgattgaccctgaggtggcccagaaggcctgccaggaggtgttggagaaagtcaagcttttgcatggaggcgtggcagtctctagcagaggcaccccactggagttggtcaatggggatggtgtggacagtgagatccgttgcctagatgatccacctgcccagatcagggaggaggaagatgagatgggggccgctgtggcctcaggcacagccaaaggagcaagaagacggcggcagaacaactcagctaaacagtcttggctgctgaggctgtttgagtcaaaactgtttgacatctccatggccatttcatacctgtataactccaaggagcctggagtacaagcctacattggcaaccggctcttctgctttcgcaacgaggacgtggacttctatctgccccagttgcttaacatgtacatccacatggatgaggacgtgggtgatgccattaagccctacatagtccaccgttgccgccagagcattaacttttccctccagtgtgccctgttgcttggggcctattcttcagacatgcacatttccactcaacgacactcccgtgggaccaagctacggaagctgatcctctcagatgagctaaagccagctcacaggaagagggagctgccctccttgagcccggcccctgacacagggctgtctccctccaaaaggactcaccagcgctctaagtcagatgccactgccagcataagtctcagcagcaacctgaaacgaacagccagcaaccctaaagtggagaatgaggatgaggagctctcctccagcaccgagagtattgataattcattcagttcccctgttcgactggctcctgagagagaattcatcaagtccctgatggcgatcggcaagcggctggccacgctccccaccaaagagcagaaaacacagaggctgatctcagagctctccctgctcaaccataagctccctgcccgagtctggctgcccactgctggctttgaccaccacgtggtccgtgtaccccacacacaggctgttgtcctcaactccaaggacaaggctccctacctgatttatgtggaagtccttgaatgtgaaaactttgacaccaccagtgtccctgcccggatccccgagaaccgaattcggagtacgaggtccgtagaaaacttgcccgaatgtggtattacccatgagcagcgagctggcagcttcagcactgtgcccaactatgacaacgatgatgaggcctggtcggtggatgacataggcgagctgcaagtggagctccccgaagtgcataccaacagctgtgacaacatctcccagttctctgtggacagcatcaccagccaggagagcaaggagcctgtgttcattgcagcaggggacatccgccggcgcctttcggaacagctggctcataccccgacagccttcaaacgagacccagaagatccttctgcagttgctctcaaagagccctggcaggagaaagtacggcggatcagagagggctccccctacggccatctccccaattggcggctcctgtcagtcattgtcaagtgtggggatgaccttcggcaagagcttctggcctttcaggtgttgaagcaactgcagtccatttgggaacaggagcgagtgcccctttggatcaagccatacaagattcttgtgatttcggctgatagtggcatgattgaaccagtggtcaatgctgtgtccatccatcaggtgaagaaacagtcacagctctccttgctcgattacttcctacaggagcacggcagttacaccactgaggcattcctcagtgcacagcgcaattttgtgcaaagttgtgctgggtactgcttggtctgctacctgctgcaagtcaaggacagacacaatgggaatatccttttggacgcagaaggccacatcatccacatcgactttggcttcatcctctccagctcaccccgaaatctgggctttgagacgtcagcctttaagctgaccacagagtttgtggatgtgatgggcggcctggatggcgacatgttcaactactataagatgctgatgctgcaagggctgattgccgctcggaaacacatggacaaggtggtgcagatcgtggagatcatgcagcaaggttctcagcttccttgcttccatggctccagcaccattcgaaacctcaaagagaggttccacatgagcatgactgaggagcagctgcagctgctggtggagcagatggtggatggcagtatgcggtctatcaccaccaaactctatgacggcttccagtacctcaccaacggcatcatgtgacacgctcctcagcccaggagtggtggggggtccagggcaccctccctagagggcccttgtctgagaaaccccaaaccaggaaaccccacctacccaaccatccacccaagggaaatggaaggcaagaaacacgaaggatcatgtggtaactgcgagagcttgctgaggggtgggagagccagctgtggggtccagacttgttggggcttccctgcccctcctggtctgtgtcagtattaccaccagactgactccaggactcactgccctccagaaaacagaggtgacaaatgtgagggacactggggcctttcttctccttgtaggggtctctcagaggttctttccacaggccatcctcttattccgttctggggcccaggaagtggggaagagtaggttctcggtacttaggacttgatcctgtggttggccactggccatgctgctgcccagctctacccctcccagggacctacccctcccagggaccgacccctggcccaagctccccttgctggcgggcgctgcgtgggccctgcacttgctgaggttccccatcatgggcaaggaagggaattcccacagccctccagtgtactgagggtactggcctagccatgtggaattccctaccctgactccttccccaaacccagggaaaagagctctcaattttttatttttaatttttgtttgaaataaagtccttagttagccacttgtgtcatttccaggttttctgggggagtgcagggggagatgggtgatgaggtatgaacggatgcctcagtgtccaagatacaaaaggcaccacatagaagtttgctttttccctgcctgtcttggtcactaccacctcttccctgagaagggcgggccttccatgttctctcacccgcttcaactccacattgtccaagtcacagaaaaagagaggcctgaatggagattcgaccacaaacagttttaatggtctggttttctccctagttccccaactgtttgttagtattattattactacaagaataaaggattcctgagagcctgtcccctcctctcctgtggcccccttgacaggactcatccctaccaaccccccacccccccgccccggatttctggggaaaaaaagaagtgaaaggcactgca

SEQ ID NO: 350598 - DNA, 4233 bp, Homo sapiens
gaaaaatacacaaaagcaacaccagaggcccatttgcatggcgtgtttttgtttatttgtttggcctaatatggtttcgttttgtttggaagaagggattgtgccctccaagcctttgtcgtttcactcacctctcccaacctggccctgtccagcccctccctggagggctgggcatatggatgctggaggtcacaggctgcccaggcaggttggtgacctcggaggcagaaccacggcctcgagtcgggcctctaacggcgaaaagactgacgcggttggaccgcgccattcccgaaatgttaaggagcttaaactccgcatcgtcctccaagataagtaggaaaagggcagtcagaaagaacgtcttccccgtccgccgtcttcctgcgcgcccttctaggaacccagcgtccatcccacggcctgatttactaagggagtcttgtagcatacgggagggggaaaagtcattgattgcaattacggcatgttccaggcagctcacccgactccttagattactatggaatcggtagggtcctgaccgctggggaagcaggaaagcgtatcctgggaagaaaggcttggcttggactccggagaagaatactacatcgagacctgctggggaattttattttattttattatttttttggtcttggttgtactgagggaggaagaagaggttgtgtggcccggtcgaacttgtggcagcctgaaggccccctcaggcggcgccgcgggcagccccgcagccggggcctggtgcagcctccgcggccgctgtcagggaagcgcaggcggccaatggaacccgggagcggtcgctgctgctgaggcggcagtgtcggcagtccaaccgcgactgcccgcaccccctccgcgggggtcccccagagagttgagtccacgctccatgagaatgctgaacaccatccaaagcagcaaattgagattccttgatttggggaagaggtttgggaggaacccttcaataattggcatgggacaagaggggacccagtccaagtgtatttgggactcgcagtagggaggaacaattcagagagagcttggaagctcgaagtctggctgtggccatgggagatacagtagtggagcctgcccccttgaagccaacttctgagcccacttctggcccaccagggaataatggggggtccctgctaagtgtcatcacggagggggtcggggaactatcagtgattgaccctgaggtggcccagaaggcctgccaggaggtgttggagaaagtcaagcttttgcatggaggcgtggcagtctctagcagaggcaccccactggagttggtcaatggggatggtgtggacagtgagatccgttgcctagatgatccacctgcccagatcagggaggaggaagatgagatgggggccgctgtggcctcaggcacagccaaaggagcaagaagacggcggcagaacaactcagctaaacagtcttggctgctgaggctgtttgagtcaaaactgtttgacatctccatggccatttcatacctgtataactccaaggagcctggagtacaagcctacattggcaaccggctcttctgctttcgcaacgaggacgtggacttctatctgccccagttgcttaacatgtacatccacatggatgaggacgtgggtgatgccattaagccctacatagtccaccgttgccgccagagcattaacttttccctccagtgtgccctgttgcttggggcctattcttcagacatgcacatttccactcaacgacactcccgtgggaccaagctacggaagctgatcctctcagatgagctaaagccagctcacaggaagagggagctgccctccttgagcccggcccctgacacagggctgtctccctccaaaaggactcaccagcgctctaagtcagatgccactgccagcataagtctcagcagcaacctgaaacgaacagccagcaaccctaaagtggagaatgaggatgagcctgttcgactggctcctgagagagaattcatcaagtccctgatggcgatcggcaagcggctggccacgctccccaccaaagagcagaaaacacagaggctgatctcagagctctccctgctcaaccataagctccctgcccgagtctggctgcccactgctggctttgaccaccacgtggtccgtgtaccccacacacaggctgttgtcctcaactccaaggacaaggctccctacctgatttatgtggaagtccttgaatgtgaaaactttgacaccaccagtgtccctgcccggatccccgagaaccgaattcggagtacgaggtccgtagaaaacttgcccgaatgtggtattacccatgagcagcgagctggcagcttcagcactgtgcccaactatgacaacgatgatgaggcctggtcggtggatgacataggcgagctgcaagtggagctccccgaagtgcataccaacagctgtgacaacatctcccagttctctgtggacagcatcaccagccaggagagcaaggagcctgtgttcattgcagcaggggacatccgccggcgcctttcggaacagctggctcataccccgacagccttcaaacgagacccagaagatccttctgcagttgctctcaaagagccctggcaggagaaagtacggcggatcagagagggctccccctacggccatctccccaattggcggctcctgtcagtcattgtcaagtgtggggatgaccttcggcaagagcttctggcctttcaggtgttgaagcaactgcagtccatttgggaacaggagcgagtgcccctttggatcaagccatacaagattcttgtgatttcggctgatagtggcatgattgaaccagtggtcaatgctgtgtccatccatcaggtgaagaaacagtcacagctctccttgctcgattacttcctacaggagcacggcagttacaccactgaggcattcctcagtgcacagcgcaattttgtgcaaagttgtgctgggtactgcttggtctgctacctgctgcaagtcaaggacagacacaatgggaatatccttttggacgcagaaggccacatcatccacatcgactttggcttcatcctctccagctcaccccgaaatctgggctttgagacgtcagcctttaagctgaccacagagtttgtggatgtgatgggcggcctggatggcgacatgttcaactactataagatgctgatgctgcaagggctgattgccgctcggaaacacatggacaaggtggtgcagatcgtggagatcatgcagcaaggttctcagcttccttgcttccatggctccagcaccattcgaaacctcaaagagaggttccacatgagcatgactgaggagcagctgcagctgctggtggagcagatggtggatggcagtatgcggtctatcaccaccaaactctatgacggcttccagtacctcaccaacggcatcatgtgacacgctcctcagcccaggagtggtggggggtccagggcaccctccctagagggcccttgtctgagaaaccccaaaccaggaaaccccacctacccaaccatccacccaagggaaatggaaggcaagaaacacgaaggatcatgtggtaactgcgagagcttgctgaggggtgggagagccagctgtggggtccagacttgttggggcttccctgcccctcctggtctgtgtcagtattaccaccagactgactccaggactcactgccctccagaaaacagaggtgacaaatgtgagggacactggggcctttcttctccttgtaggggtctctcagaggttctttccacaggccatcctcttattccgttctggggcccaggaagtggggaagagtaggttctcggtacttaggacttgatcctgtggttggccactggccatgctgctgcccagctctacccctcccagggacctacccctcccagggaccgacccctggcccaagctccccttgctggcgggcgctgcgtgggccctgcacttgctgaggttccccatcatgggcaaggaagggaattcccacagccctccagtgtactgagggtactggcctagccatgtggaattccctaccctgactccttccccaaacccagggaaaagagctctcaattttttatttttaatttttgtttgaaataaagtccttagttagcca

SEQ ID NO: 350599 - DNA, 4982 bp, Homo sapiens
gaaaaatacacaaaagcaacaccagaggcccatttgcatggcgtgtttttgtttatttgtttggcctaatatggtttcgttttgtttggaagaagggattgtgccctccaagcctttgtcgtttcactcacctctcccaacctggccctgtccagcccctccctggagggctgggcatatggatgctggaggtcacaggctgcccaggcaggttggtgacctcggaggcagaaccacggcctcgagtcgggcctctaacggcgaaaagactgacgcggttggaccgcgccattcccgaaatgttaaggagcttaaactccgcatcgtcctccaagataagtaggaaaagggcagtcagaaagaacgtcttccccgtccgccgtcttcctgcgcgcccttctaggaacccagcgtccatcccacggcctgatttactaagggagtcttgtagcatacgggagggggaaaagtcattgattgcaattacggcatgttccaggcagctcacccgactccttagattactatggaatcggtagggtcctgaccgctggggaagcaggaaagcgtatcctgggaagaaaggcttggcttggactccggagaagaatactacatcgagacctgctggggaattttattttattttattatttttttggtcttggttgtactgagggaggaagaagaggttgtgtggcccggtcgaacttgtggcagcctgaaggccccctcaggcggcgccgcgggcagccccgcagccggggcctggtgcagcctccgcggccgctgtcagggaagcgcaggcggccaatggaacccgggagcggtcgctgctgctgaggcggcagtgtcggcagtccaaccgcgactgcccgcaccccctccgcgggggtcccccagagcttggaagctcgaagtctggctgtggccatgggagatacagtagtggagcctgcccccttgaagccaacttctgagcccacttctggcccaccagggaataatggggggtccctgctaagtgtcatcacggagggggtcggggaactatcagtgattgaccctgaggtggcccagaaggcctgccaggaggtgttggagaaagtcaagcttttgcatggaggcgtggcagtctctagcagaggcaccccactggagttggtcaatggggatggtgtggacagtgagatccgttgcctagatgatccacctgcccagatcagggaggaggaagatgagatgggggccgctgtggcctcaggcacagccaaaggagcaagaagacggcggcagaacaactcagctaaacagtcttggctgctgaggctgtttgagtcaaaactgtttgacatctccatggccatttcatacctgtataactccaaggagcctggagtacaagcctacattggcaaccggctcttctgctttcgcaacgaggacgtggacttctatctgccccagttgcttaacatgtacatccacatggatgaggacgtgggtgatgccattaagccctacatagtccaccgttgccgccagagcattaacttttccctccagtgtgccctgttgcttggggcctattcttcagacatgcacatttccactcaacgacactcccgtgggaccaagctacggaagctgatcctctcagatgagctaaagccagctcacaggaagagggagctgccctccttgagcccggcccctgacacagggctgtctccctccaaaaggactcaccagcgctctaagtcagatgccactgccagcataagtctcagcagcaacctgaaacgaacagccagcaaccctaaagtggagaatgaggatgagcctgttcgactggctcctgagagagaattcatcaagtccctgatggcgatcggcaagcggctggccacgctccccaccaaagagcagaaaacacagaggctgatctcagagctctccctgctcaaccataagctccctgcccgagtctggctgcccactgctggctttgaccaccacgtggtccgtgtaccccacacacaggctgttgtcctcaactccaaggacaaggctccctacctgatttatgtggaagtccttgaatgtgaaaactttgacaccaccagtgtccctgcccggatccccgagaaccgaattcggagtacgaggtccgtagaaaacttgcccgaatgtggtattacccatgagcagcgagctggcagcttcagcactgtgcccaactatgacaacgatgatgaggcctggtcggtggatgacataggcgagctgcaagtggagctccccgaagtgcataccaacagctgtgacaacatctcccagttctctgtggacagcatcaccagccaggagagcaaggagcctgtgttcattgcagcaggggacatccgccggcgcctttcggaacagctggctcataccccgacagccttcaaacgagacccagaagatccttctgcagttgctctcaaagagccctggcaggagaaagtacggcggatcagagagggctccccctacggccatctccccaattggcggctcctgtcagtcattgtcaagtgtggggatgaccttcggcaagagcttctggcctttcaggtgttgaagcaactgcagtccatttgggaacaggagcgagtgcccctttggatcaagccatacaagattcttgtgatttcggctgatagtggcatgattgaaccagtggtcaatgctgtgtccatccatcaggtgaagaaacagtcacagctctccttgctcgattacttcctacaggagcacggcagttacaccactgaggcattcctcagtgcacagcgcaattttgtgcaaagttgtgctgggtactgcttggtctgctacctgctgcaagtcaaggacagacacaatgggaatatccttttggacgcagaaggccacatcatccacatcgactttggcttcatcctctccagctcaccccgaaatctgggctttgagacgtcagcctttaagctgaccacagagtttgtggatgtgatgggcggcctggatggcgacatgttcaactactataagatgctgatgctgcaagggctgattgccgctcggaaacacatggacaaggtggtgcagatcgtggagatcatgcagcaaggtggggctggggtgaggtcaggtgctatagtgcctcaggcttcccctttaagtcggagccctggagcataagaaagctgatcccacgagactcggttgagggaggggggttcccagagagtttctagctctggtccagtgccttgtttctcctttaggacattcctcctgaccctggtaaggctaagtccagaaggctggggaaggggatagcagcacctgcctccttggcatctttagggagaaaacaggcccatttacagcctcctggtcccttctcacctccccacccctgtccagctctgagtttctcagtctccttccatctgtcttctccattccactatgacctctgattgccctgtcctctgccacccttcagctctgagaagtatttcccctctcatcattatctccttccactacagtcttgccatctacagtcttttgcccaggacccccttctgtcctcatccccctcctcaaggctccaggtgtataccaggtctgaactgccagtctccccctcctccccattcctgcccctaccccacaggttgatcgccgttgctcaggatcatccccatctggccccatgatgacggtggcccaggtcatctgtgagtgtcagacgtagcataggcagaggtctgcaaccagataagtgcccagctcagggcccactccctccagcctcctcccagcctgccctctgggcccctccacccttactgagggagatgtggtgttggtccccttccttcctctgcccacatgccctcacctacagaagggcttaggcgtggggtgatgaggggttcctgccggttccttctctctgcccaagcagaactgcacccacatcatcaaggacctgaggtgggaggaaaagggcacttcagatgccccagctctgtatttgctatggctgacaccactgcccctcccgtccatccatgaccctgaactccgactgcttcccccaggttctcagcttccttgcttccatggctccagcaccattcgaaacctcaaagagaggttccacatgagcatgactgaggagcagctgcagctgctggtggagcagatggtggatggcagtatgcggtctatcaccaccaaactctatgacggcttccagtacctcaccaacggcatcatgtgacacgctcctcagcccaggagtggtggggggtccagggcaccctccctagagggcccttgtctgagaaaccccaaaccaggaaaccccacctacccaaccatccacccaagggaaatggaaggcaagaaacacgaaggatcatgtggtaactgcgagagcttgctgaggggtgggagagccagctgtggggtccagacttgttggggcttccctgcccctcctggtctgtgtcagtattaccaccagactgactccaggactcactgtctctcagaggttctttccacaggccatcctcttattccgttctggggcccaggaagtggggaagagtaggttctcggtacttaggacttgatcctgtggttggccactggccatgctgctgcccagctctacccctcccagggacctacccctcccagggaccgacccctggcccaagctccccttgctggcgggcgctgcgtgggccctgcacttgctgaggttccccatcatgggcaaggaagggaattcccacagccctccagtgtactgagggtactggcctagccatgtggaattccctaccctgactccttccccaaacccagggaaaagagctctcaattttttatttttaatttttgtttgaaataaagtccttagttagcca

SEQ ID NO: 350600 - DNA, 1835 bp, Homo sapiens
gtcttgaactcctgacctcaggtgatccgccctccttggtctcccagagtgctgggattacaagcataagccaccgcacctggcctcttttttcttattatttgaacttacagctcccattctccctgcttgagaggggatagtgaagtttcctgttctccctgcctgtcttgggcttgctacttaggtgataccttttcccacatacctgagtgtagtttctgactttgtcaggccctagacttcctttccaaactccctggtcctcactgggttaagtgagtcttactcatttgatggcttagaattcaatgctaccaaggagagaggctggagaaagggaagagttttagccttcttctccagtgtggagaaagatacagagtcctgtatcctccatgtctcctcacagtccatttgggaacaggagcgagtgcccctttggatcaagccatacaagattcttgtgatttcggctgatagtggcatgattgaaccagtggtcaatgctgtgtccatccatcaggtgaagaaacagtcacagctctccttgctcgattacttcctacaggagcacggcagttacaccactgaggcattcctcagtgcacagcgcaattttgtgcaaagttgtgctgggtactgcttggtctgctacctgctgcaagtcaaggacagacacaatgggaatatccttttggacgcagaaggccacatcatccacatcgactttggcttcatcctctccagctcaccccgaaatctgggctttgagacgtcagcctttaagctgaccacagagtttgtggatgtgatgggcggcctggatggcgacatgttcaactactataagatgctgatgctgcaagggctgattgccgctcggaaacacatggacaaggtggtgcagatcgtggagatcatgcagcaaggttctcagcttccttgcttccatggctccagcaccattcgaaacctcaaagagaggttccacatgagcatgactgaggagcagctgcagctgctggtggagcagatggtggatggcagtatgcggtctatcaccaccaaactctatgacggcttccagtacctcaccaacggcatcatgtgacacgctcctcagcccaggagtggtggggggtccagggcaccctccctagagggcccttgtctgagaaaccccaaaccaggaaaccccacctacccaaccatccacccaagggaaatggaaggcaagaaacacgaaggatcatgtggtaactgcgagagcttgctgaggggtgggagagccagctgtggggtccagacttgttggggcttccctgcccctcctggtctgtgtcagtattaccaccagactgactccaggactcactgccctccagaaaacagaggtgacaaatgtgagggacactggggcctttcttctccttgtaggggtctctcagaggttctttccacaggccatcctcttattccgttctggggcccaggaagtggggaagagtaggttctcggtacttaggacttgatcctgtggttggccactggccatgctgctgcccagctctacccctcccagggacctacccctcccagggaccgacccctggcccaagctccccttgctggcgggcgctgcgtgggccctgcacttgctgaggttccccatcatgggcaaggaagggaattcccacagccctccagtgtactgagggtactggcctagccatgtggaattccctaccctgactccttccccaaacccagggaaaagagctctcaattttttatttttaatttttgtttgaaataaagtccttagttagcca

SEQ ID NO: 350601 - DNA, 4200 bp, Homo sapiens
gaaaaatacacaaaagcaacaccagaggcccatttgcatggcgtgtttttgtttatttgtttggcctaatatggtttcgttttgtttggaagaagggattgtgccctccaagcctttgtcgtttcactcacctctcccaacctggccctgtccagcccctccctggagggctgggcatatggatgctggaggtcacaggctgcccaggcaggttggtgacctcggaggcagaaccacggcctcgagtcgggcctctaacggcgaaaagactgacgcggttggaccgcgccattcccgaaatgttaaggagcttaaactccgcatcgtcctccaagataagtaggaaaagggcagtcagaaagaacgtcttccccgtccgccgtcttcctgcgcgcccttctaggaacccagcgtccatcccacggcctgatttactaagggagtcttgtagcatacgggagggggaaaagtcattgattgcaattacggcatgttccaggcagctcacccgactccttagattactatggaatcggtagggtcctgaccgctggggaagcaggaaagcgtatcctgggaagaaaggcttggcttggactccggagaagaatactacatcgagacctgctggggaattttattttattttattatttttttggtcttggttgtactgagggaggaagaagaggttgtgtggcccggtcgaacttgtggcagcctgaaggccccctcaggcggcgccgcgggcagccccgcagccggggcctggtgcagcctccgcggccgctgtcagggaagcgcaggcggccaatggaacccgggagcggtcgctgctgctgaggcggcagtgtcggcagtccaaccgcgactgcccgcaccccctccgcgggggtcccccagagcttggaagctcgaagtctggctgtggccatgggagatacagtagtggagcctgcccccttgaagccaacttctgagcccacttctggcccaccagggaataatggggggtccctgctaagtgtcatcacggagggggtcggggaactatcagtgattgaccctgaggtggcccagaaggcctgccaggaggtgttggagaaagtcaagcttttgcatggaggcgtggcagtctctagcagaggcaccccactggagttggtcaatggggatggtgtggacagtgagatccgttgcctagatgatccacctgcccagatcagggaggaggaagatgagatgggggccgctgtggcctcaggcacagccaaaggagcaagaagacggcggcagaacaactcagctaaacagtcttggctgctgaggctgtttgagtcaaaactgtttgacatctccatggccatttcatacctgtataactccaaggagcctggagtacaagcctacattggcaaccggctcttctgctttcgcaacgaggacgtggacttctatctgccccagttgcttaacatgtacatccacatggatgaggacgtgggtgatgccattaagccctacatagtccaccgttgccgccagagcattaacttttccctccagtgtgccctgttgcttggggcctattcttcagacatgcacatttccactcaacgacactcccgtgggaccaagctacggaagctgatcctctcagatgagctaaagccagctcacaggaagagggagctgccctccttgagcccggcccctgacacagggctgtctccctccaaaaggactcaccagcgctctaagtcagatgccactgccagcataagtctcagcagcaacctgaaacgaacagccagcaaccctaaagtggagaatgaggatgagcctgttcgactggctcctgagagagaattcatcaagtccctgatggcgatcggcaagcggctggccacgctccccaccaaagagcagaaaacacagaggctgatctcagagctctccctgctcaaccataagctccctgcccgagtctggctgcccactgctggctttgaccaccacgtggtccgtgtaccccacacacaggctgttgtcctcaactccaaggacaaggctccctacctgatttatgtggaagtccttgaatgtgaaaactttgacaccaccagtgtccctgcccggatccccgagaaccgaattcggagtacgaggtccgtagaaaacttgcccgaatgtggtattacccatgagcagcgagctggcagcttcagcactgtgcccaactatgacaacgatgatgaggcctggtcggtggatgacataggcgagctgcaagtggagctccccgaagtgcataccaacagctgtgacaacatctcccagttctctgtggacagcatcaccagccaggagagcaaggagcctgtgttcattgcagcaggggacatccgccggcgcctttcggaacagctggctcataccccgacagccttcaaacgagacccagaagatccttctgcagttgctctcaaagagccctggcaggagaaagtacggcggatcagagagggctccccctacggccatctccccaattggcggctcctgtcagtcattgtcaagtgtggggatgaccttcggcaagagcttctggcctttcaggtgttgaagcaactgcagtccatttgggaacaggagcgagtgcccctttggatcaagccatacaagattcttgtgatttcggctgatagtggcatgattgaaccagtggtcaatgctgtgtccatccatcaggtgaagaaacagtcacagctctccttgctcgattacttcctacaggagcacggcagttacaccactgaggcattcctcagtgcacagcgcaattttgtgcaaagttgtgctgggtactgcttggtctgctacctgctgcaagtcaaggacagacacaatgggaatatccttttggacgcagaaggccacatcatccacatcgactttggcttcatcctctccagctcaccccgaaatctgggctttgagacgtcagcctttaagctgaccacagagtttgtggatgtgatgggcggcctggatggcgacatgttcaactactataagatgctgatgctgcaagggctgattgccgctcggaaacacatggacaaggtggtgcagatcgtggagatcatgcagcaaggtggggctggggtgaggtcaggtgctatagtgcctcaggcttcccctttaagtcggagccctggagcataagaaagctgatcccacgagactcggttgagggaggggggttcccagagagtttctagctctggtccagtgccttgtttctcctttaggacattcctcctgaccctggtaaggctaagtccagaaggctggggaaggggatagcagcacctgcctccttggcatctttagggagaaaacaggcccatttacagcctcctggtcccttctcacctccccacccctgtccagctctgagtttctcagtctccttccatctgtcttctccattccactatgacctctgattgccctgtcctctgccacccttcagctctgagaagtatttcccctctcatcattatctccttccactacagtcttgccatctacagtcttttgcccaggacccccttctgtcctcatccccctcctcaaggctccaggtgtataccaggtctgaactgccagtctccccctcctccccattcctgcccctaccccacaggttgatcgccgttgctcaggatcatccccatctggccccatgatgacggtggcccaggtcatctgtgagtgtcagacgtagcataggcagaggtctgcaaccagataagtgcccagctcagggcccactccctccagcctcctcccagcgaagtggggaagagtaggttctcggtacttaggacttgatcctgtggttggccactggccatgctgctgcccagctctacccctcccagggacctacccctcccagggaccgacccctggcccaagctccccttgctggcgggcgctgcgtgggccctgcacttgctgaggttccccatcatgggcaaggaagggaattcccacagccctccagtgtactgagggtactggcctagccatgtggaattccctaccctgactccttccccaaacccagggaaaagagctctcaattttttatttttaatttttgtttgaaataaagtccttagttagcca

SEQ ID NO: 350602 - DNA, 2695 bp, Homo sapiens
  misc_feature (2525)..(2525): n is a, c, g, or t
gaaaaatacacaaaagcaacaccagaggcccatttgcatggcgtgtttttgtttatttgtttggcctaatatggtttcgttttgtttggaagaagggattgtgccctccaagcctttgtcgtttcactcacctctcccaacctggccctgtccagcccctccctggagggctgggcatatggatgctggaggtcacaggctgcccaggcaggttggtgacctcggaggcagaaccacggcctcgagtcgggcctctaacggcgaaaagactgacgcggttggaccgcgccattcccgaaatgttaaggagcttaaactccgcatcgtcctccaagataagtaggaaaagggcagtcagaaagaacgtcttccccgtccgccgtcttcctgcgcgcccttctaggaacccagcgtccatcccacggcctgatttactaagggagtcttgtagcatacgggagggggaaaagtcattgattgcaattacggcatgttccaggcagctcacccgactccttagattactatggaatcggtagggtcctgaccgctggggaagcaggaaagcgtatcctgggaagaaaggcttggcttggactccggagaagaatactacatcgagacctgctggggaattttattttattttattatttttttggtcttggttgtactgagggaggaagaagaggttgtgtggcccggtcgaacttgtggcagcctgaaggccccctcaggcggcgccgcgggcagccccgcagccggggcctggtgcagcctccgcggccgctgtcagggaagcgcaggcggccaatggaacccgggagcggtcgctgctgctgaggcggcagtgtcggcagtccaaccgcgactgcccgcaccccctccgcgggggtcccccagagcttggaagctcgaagtctggctgtggccatgggagatacagtagtggagcctgcccccttgaagccaacttctgagcccacttctggcccaccagggaataatggggggtccctgctaagtgtcatcacggagggggtcggggaactatcagtgattgaccctgaggtggcccagaaggcctgccaggaggtgttggagaaagtcaagcttttgcatggaggcgtggcagtctctagcagaggcaccccactggagttggtcaatggggatggtgtggacagtgagatccgttgcctagatgatccacctgcccagatcagggaggaggaagatgagatgggggccgctgtggcctcaggcacagccaaaggagcaagaagacggcggcagaacaactcagctaaacagtcttggctgctgaggctgtttgagtcaaaactgtttgacatctccatggccatttcatacctgtataactccaaggagcctggagtacaagcctacattggcaaccggctcttctgctttcgcaacgaggacgtggacttctatctgccccagttgcttaacatgtacatccacatggatgaggacgtgggtgatgccattaagccctacatagtccaccgttgccgccagagcattaacttttccctccagtgtgccctgttgcttggggcctattcttcagacatgcacatttccactcaacgacactcccgtgggaccaagctacggaagctgatcctctcagatgagctaaagccagctcacaggaagagggagctgccctccttgagcccggcccctgacacagggctgtctccctccaaaaggactcaccagcgctctaagtcagatgccactgccagcataagtctcagcagcaacctgaaacgaacagccagcaaccctaaagtggagaatgaggatgagcctgttcgactggctcctgagagagaattcatcaagtccctgatggcgatcggcaagcggctggccacgctccccaccaaagagcagaaaacacagaggctgatctcagagctctccctgctcaaccataagctccctgcccgagtctggctgcccactgctggctttgaccaccacgtggtccgtgtaccccacacacaggctgttgtcctcaactccaaggacaaggctccctacctgatttatgtggaagtccttgaatgtgaaaactttgacaccaccagtgtccctgcccggatccccgagaaccgaattcggagtacgaggtccgtagaaaacttgcccgaatgtggtattacccatgagcagcgagctggcagcttcagcactgtgcccaactatgacaacgatgatgaggcctggtcggtggatgacataggcgagctgcaagtggagctccccgaagtgcataccaacagctgtgacaacatctcccagttctctgtggacagcatcaccagccaggagagcaaggagcctgtgttcattgcagcaggggacatccgccggcgcctttcggaacagctggctcataccccgacagccttcaaacgagacccagaagatccttctgcagttgctctcaaagagccctggcaggagaaagtacggcggatcagagnaggtccccctaggcatactcccaagggggtccggcaggcatgcaggggggggtgcctcggaaaattggctcagggtgaacgacgggcaagggaaggaagaatgcctggacagcaaagactcgggacggaaagaaaacagaacggccaacgaaaaagccgaaatcagagaa

SEQ ID NO: 350603 - DNA, 1833 bp, Homo sapiens
gaaaaatacacaaaagcaacaccagaggcccatttgcatggcgtgtttttgtttatttgtttggcctaatatggtttcgttttgtttggaagaagggattgtgccctccaagcctttgtcgtttcactcacctctcccaacctggccctgtccagcccctccctggagggctgggcatatggatgctggaggtcacaggctgcccaggcaggttggtgacctcggaggcagaaccacggcctcgagtcgggcctctaacggcgaaaagactgacgcggttggaccgcgccattcccgaaatgttaaggagcttaaactccgcatcgtcctccaagataagtaggaaaagggcagtcagaaagaacgtcttccccgtccgccgtcttcctgcgcgcccttctaggaacccagcgtccatcccacggcctgatttactaagggagtcttgtagcatacgggagggggaaaagtcattgattgcaattacggcatgttccaggcagctcacccgactccttagattactatggaatcggtagggtcctgaccgctggggaagcaggaaagcgtatcctgggaagaaaggcttggcttggactccggagaagaatactacatcgagacctgctggggaattttattttattttattatttttttggtcttggttgtactgagggaggaagaagaggttgtgtggcccggtcgaacttgtggcagcctgaaggccccctcaggcggcgccgcgggcagccccgcagccggggcctggtgcagcctccgcggccgctgtcagggaagcgcaggcggccaatggaacccgggagcggtcgctgctgctgaggcggcagtgtcggcagtccaaccgcgactgcccgcaccccctccgcgggggtcccccagagcttggaagctcgaagtctggctgtggccatgggagatacagtagtggagcctgcccccttgaagccaacttctgagcccacttctggcccaccagggaataatggggggtccctgctaagtgtcatcacggagggggtcggggaactatcagtgattgaccctgaggtggcccagaaggcctgccaggaggtgttggagaaagtcaagcttttgcatggaggcgtggcagtctctagcagaggcaccccactggagttggtcaatggggatggtgtggacagtgagatccgttgcctagatgatccacctgcccagatcagggaggaggaagatgagatgggggccgctgtggcctcaggcacagccaaaggagcaagaagacggcggcagaacaactcagctaaacagtcttggctgctgaggctgtttgagtcaaaactgtttgacatctccatggccatttcatacctgtataactccaaggagcctggagtacaagcctacattggcaaccggctcttctgctttcgcaacgaggacgtggacttctatctgccccagttgcttaacatgtacatccacatggatgaggacgtgggtgatgccattaagccctacatagtccaccgttgccgccagagcattaacttttccctccatgttctctcacccgcttcaactccacattgtccaagtcacagaaaaagagaggcctgaatggagattcgaccacaaacagttttaatggtctggttttctccctagttccccaactgtttgttagtattattattactacaagaataaaggattcctgagagcctgtcccctcctctcctgtggcccccttgacaggactcatccctaccaaccccccacccccccgccccggatttctggggaaaaaaagaagtgaaaggcactgca

SEQ ID NO: 350604 - DNA, 1277 bp, Homo sapiens
gaaaaatacacaaaagcaacaccagaggcccatttgcatggcgtgtttttgtttatttgtttggcctaatatggtttcgttttgtttggaagaagggattgtgccctccaagcctttgtcgtttcactcacctctcccaacctggccctgtccagcccctccctggagggctgggcatatggatgctggaggtcacaggctgcccaggcaggttggtgacctcggaggcagaaccacggcctcgagtcgggcctctaacggcgaaaagactgacgcggttggaccgcgccattcccgaaatgttaaggagcttaaactccgcatcgtcctccaagataagtaggaaaagggcagtcagaaagaacgtcttccccgtccgccgtcttcctgcgcgcccttctaggaacccagcgtccatcccacggcctgatttactaagggagtcttgtagcatacgggagggggaaaagtcattgattgcaattacggcatgttccaggcagctcacccgactccttagattactatggaatcggtagggtcctgaccgctggggaagcaggaaagcgtatcctgggaagaaaggcttggcttggactccggagaagaatactacatcgagacctgctggggaattttattttattttattatttttttggtcttggttgtactgagggaggaagaagaggttgtgtggcccggtcgaacttgtggcagcctgaaggccccctcaggcggcgccgcgggcagccccgcagccggggcctggtgcagcctccgcggccgctgtcagggaagcgcaggcggccaatggaacccgggagcggtcgctgctgctgaggcggcagtgtcggcagtccaaccgcgactgcccgcaccccctccgcgggggtcccccagaggatcaactaaaccttgaactaagaagaaaaatgtgttgtgagcagggggagcctcagctgcctcaggccgttcaggacagaagggtgtttctgaaggccggagcaagttttgaagaagtccctatcagattacacttggttgacgacccctggcccaagctccccttgctggcgggcgctgcgtgggccctgcacttgctgaggttccccatcatgggcaaggaagggaattcccacagccctccagtgtactgagggtactggcctagccatgtggaattccctaccctgactccttccccaaacccagggaaaagagctctcaattttttatttttaatttttgtttgaaataaagtccttagttagcca

SEQ ID NO: 350605 - DNA, 2066 bp, Homo sapiens
  misc_feature (1540)..(1540): n is a, c, g, or t
gttgctctttgttttttggcatccttgtgtgtgaatacatgataagaaatatgaggatgttaccttctcaccaatttttaaaaattgtcagttcagtactttgcttttttagtggaatggcccttagcaatatccttcttttaaatggatttcttattgttccaaagatgtggcatttccaaaagaaaattcttccatttatgcatagaaccttgaactctagtctttaaaaatctaggctttagtttcagctcttttttagctgtgtggtcctggacaggcccttttacatctagacttggagatttaaagaaaatcataaagaattaaatgagatgatttctaagactcatttcattttaaaactctgatctttcagagacgcacaaatccattccctcttgctgtggaggagaaaatacatgaaaatctgaatccatatgcatttgtcagggttctccagagacataaaaccaataggatgtatgtgtttatatagagagatttgtaataaggaactggctcacccagtcatggaattccataatctgcatcatcaagtgtcatggtctgtagctgggaagctggagacccaggagagtccatggtgcagctccagccttggcctctgacagtgctgggattataggtgtaagccaccacacccagccctgagtgacattatttcatacaaaattctcatctctggaggcctttgtatttttaggggttttgtttttcaaatgctttttacctctttctatacttgttcatttttaaatgtttcctggcagagcaattagtattttctggcttactaggtgctattcgattgcattagcgtttgaatattacccagctagttgtggagtggggcagtaagctcataaagaagcaagataatggaatacacaaatattactacgactttatgggtggcataccttgattcttgatccacgtggctgtgttcagatctggttagcacacattgacatcaggggctgagccaccagtgagagtcaaacccagcagccctgtcagtctaccttctctcttgacttgatccagcctcataacttcactttccgcaggagaaacacacctcttgaggtcctctgtcacaaataggcagtgtttctggagaaagccaggaggcagattttagtgctgttcagcatctgtggtctctactttctggatctggtgcattatggagaccatgaaatgacatgaaatagctcagtgctgccagtggcggtgacagggacactagaggtgaaggagggcccttggggcaattccagcaggtgggtggtggctgaaggtccttgtcttctttctgcagagactggccacctgcttcattctttcaagaagcaccaaatccctacttcagtactttgcccactcgtcatgtcaggagcatgaaactcacgaggccttcatttacttttatcctgtaacaccttcaatttttcccacatcctcccttgattcgtggatggacaactatggaggccaatctggctgaggtgangactgcttgagtctaaattcctctctcctcaaacccaattcaaactggcctgagcaaaatgaatgtattgatccataactgaaaagtccagaatgatcaggcatcaggcatggttgcatccaggggcccatgtattagaaccatctccttccagttctgggctctgcttgcctcccagttggttttactgcacagaggcttattcaagtccagagagatcttatctttccctacaagtctgtgaccttgattctgaacctgcatctatgggaagggcttgcagtgtctgagtgagcttggactgtgtaaactttcccacttctgaagctgggggtggggttcactccactaagctacatggctctagagtcagggggttgccccctaagtaactggcagtattgttaccagaaaaatcatgaatggacactgagcagaaaactcagcagatgtttatttcctggtctttaggatttgttgaagagttttttatttgtttgttttttaagaaagactcaaaaggaaa

SEQ ID NO: 350606 - DNA, 564 bp, Homo sapiens
tgcccatgactttaacataagtagtgatgttttaaaatgaggatatcatttacagtgtttaaaatgatattttataccaggccagctcaaaagacaataaaattttacttttctttcactattgtcaatttatttatatagttctatttattttttaatccatatgtatttgtatgcctgtgcatagaaaaacttactcacttgaaaattttcaacctggaaagaccattataaacatctggactaggaaggtcttgaaattagaaagacatacccatatttggcaatcgaaaaagaaacatttcaagcttatcccatatcgccttctccgggcagtctgcacagagcagttgacaactgaaaacataaaacctaaactttcagacgcaatttttaggcactagaattttctgtttgaggcctttttgccactcagggaaatggccgatgaggaactggatgactcctcatggttagctccccacacaatcaactcagtggttgctaaagttttagtgtgtaagttagttacatagtgatatttaaaacctcacttagtgtgaa

SEQ ID NO: 350607 - DNA, 860 bp, Homo sapiens
tgcccatgactttaacataagtagtgatgttttaaaatgaggatatcatttacagtgtttaaaatgatattttataccaggccagctcaaaagacaataaaattttacttttctttaaaaaaaaaaaaaaaaaaaaaaaaaaaaaaaaaaaaaaaaaaaaaaaaaaaaaaaaaaaaaaaaaaaaaaaaaaaaaaaaaaaaaaaaaaacaaaaaaaaaaaagggggggggccggagcaaaaatgcgtcccctaccgggggaggcagacaacagatgagagggcgcaccacaccagcggtataggtgagacgagagggcgcccaacgaaggagaggaggagactaaaataaagaagaagcagcagggagagagcagacgaacgacacacgacacgaggacgtgacgagagagcgagaggcaacaacaacactggcccagaaccgcaggagagtagcagcgtaagaggaggacgagacaacaccacacgcacgacagacgggggaggcgtgcaacaacacaacaggcggaggagacggcaccgaaccccaacgaaaaagaagaagatcacacgccaagcgcggagaaggaagaaaaagcaagaaagaaaaagaacgtggcgaagcaagagaaagccgaaaatcaacagaggcatgagcacgacagcaacacagacgcagaggcgccagacaaacaagtagaaaacgaggcagagaagaggacagagaaggaaaaagaagaagcgagagcaccagcacacagggggagaggacaagatcagaaggcagagaagagaaagaaaatagacactaccagcagacggcaggaggcaaacaccagtgaacaagaaagcagcacgagggc

SEQ ID NO: 350608 - DNA, 2693 bp, Homo sapiens
gcaaataaacgtggcgggacgtatgtgtcatggcgctctccatctaaagtctgtgcagcttccggagagtggcgggttgattttctcactttggactggtttttacttcccgacttctggactcatctttcaagaggactttagactaattgcagataattaagagaatatgccttctgcatcctgtgatacactactggatgacatcgaagatatcgtgtctcaggaagattcaaaaccacaagataggcattttgtaagaaaggatgttgtcccgaaggtacgaaggcgaaatacccaaaaatatttgcaagaggaagaaaacagtccaccaagtgacagcactattccaggcatacagaaaatttggatacgaacatggggttgttctcataataattcagatggagaatatatggctggacagctagctgcttatggctataaaattacagaaaatgcatccgatgcagatttatggctcctgaacagttgcactgtaaaaaacccagctgaagaccactttagaaactcaattaaaaaagctcaagaggagaacaagaaaatcgtactggctggatgcgttcctcaagcccagcctcgccaggactaccttaagggactgagtatcattggggttcagcagatagatcgtgtggtagaagttgtggaggagacaattaaaggtcactctgtgagactgctgggtcagaaaaaggataatggaaggcggcttgggggagcacgattggatttgccgaagattaggaagaatccactgatagaaatcatttccatcaataccgggtgtctcaatgcttgtacctactgcaaaactaaacacgccagaggaaatttggccagttatccaattgatgaactagtagatagagccaaacaatcttttcaagagggtgtttgtgagatatggttgaccagtgaagacacgggggcttatggcagagatattggcaccaatctccccacactcctgtggaaactggttgaagtgattcctgagggagcaatgctgaggcttggcatgacaaatccgccctatattttagagcatctggaggaaatggcaaaaatccttaatcaccccagagtctacgcttttctgcacataccagtccagtctgcctccgacagcgtactcatggaaatgaaaagagaatactgtgtggctgacttcaaaagagtagtggattttctgaaagagaaagttcctggaataactattgctacagatattatctgtggttttcctggagaaacagatcaggattttcaagaaacagtgaaacttgttgaagagtacaaattcccaagcctgtttattaaccaattttacccaagaccaggaactcctgctgcaaaaatggaacaagttccagcacaagtgaaaaagcaaaggacaaaagatctttctcgggtgtttcattcttacagtccatatgatcacaagattggtgaaagacaacaagtgttagtaacagaagaatcttttgattccaagttttatgttgcacacaatcaattctatgagcaggttttagtgccaaagaaccctgcgttcatggggaagatggttgaagtggacatctatgaatcaggcaaacattttatgaaagggcagccagtatctgatgccaaagtgtacacgccctccatcagcaaaccgctagcaaagggagaagtctcgggtttgacaaaggacttcagaaatgggcttgggaaccagctgagttcaggatcccacacctctgctgcatctcagtgtgactcagcgagttccagaatggtgctgcccatgccaaggctacatcaagactgtgcgctgaggatgtccgtgggcttggctctgctgggtcttctttttgctttttttgtcaaggtctataattagaatacaactaatggaaacatctataaagaagaatacatttctaattaaaatcttcaatgaacaggaaagcgacatctccattctccaagggcaataatttgtactggtcatgctgcctccttctcagccactcttcttaatgaggctccccctgtctcacattgagttgggcccattggttatttgacctaaaacctaatcaccgctaccatagcacatccttcaaattaaactgcttttggtttacttttagcaagaaatgcaagcggttgcattttttctgtttgtttcaatctctaatctttaagtcagaacctaattgtacagtggctctggccatcttttcctcatgtggaagaattttctatctttaataaactttttctttgttttttttttccagatggagtttcgctcttgtcccccaggctggagtggtgcagtggcacgatctcaggtcactgcaacctctgcctcctgggttcaaacgattctcctgcctcagcctccctaatagccaggggctacaggcatataccaccatgcccaactaattttttaattttttgtagagatgagtgtcactatgttgcccaggcttgcctggaactcctagcctcaagcagtcttcttgcctcagcctcccaaagtgctgggattacaggcgtgagccactccacccagcccagattaaatgtttttatttctacctgccatcattggtctttactaagtgaagtgacttctttctttaacaataaatggaattggtatactaagcaaa

SEQ ID NO: 350609 - DNA, 990 bp, Homo sapiens
aggcacgaggtgcctgatgatctgtcactgtctcccatcacccccagatgggaccttgtagttgcaagaaaacaagctcagggctcgcactgattttatattatgaaaagctcaagaggagaacaagaaaatcgtactggctggatgcgttcctcaagcccagcctcgccaggactaccttaagggactgagtatcattggggttcagcagatagatcgtgtggtagaagttgtggaggagacaattaaaggtcactctgtgagactgctgggtcagaaaaaggataatggaaggcggcttgggggagcacgattggatttgccgaagattaggaagaatccactgatagaaatcatttccatcaataccgggtgtctcaatgcttgtacctactgcaaaactaaacacgccagaggaaatttggccagttatccaattgatgaactagtagatagagccaaacaatcttttcaagagggtgtttgtgagatatggttgaccagtgaagacacgggggcttatggcagagatattggcaccaatctccccacactcctgtggaaactggttgaagtgattcctgagggagcaatgctgaggcttggcatgacaaatccgccctatattttagagcatctggaggaaatggcaaaaatccttaatcaccccagagtctacgcttttctgcacataccagtccagtctgcctccgacagcgtactcatggaaatgaaaagagaatactgtgtggctgacttcaaaagagtagtggattttctgaaagagaaagttcctggaataactattgctacagatattatctgtggttttcctggagaaacagatcaggattttcaagaaacagtgaaacttgttgaagagtaaattccagctgttttacacaattaccagacggattgggtagaggaaattaggaaggaaggagggacagttaagggtattataacagaacaaatgaaaatttcaaa

SEQ ID NO: 350610 - DNA, 800 bp, Homo sapiens
gcaaataaacgtggcgggacgtatgtgtcatggcgctctccatctaaagtctgtgcagcttccggagagtggcgggttgattttctcactttggactggtttttacttcccgacttctggtggttggttactcgcactatgcagacgtgttgcggtgctgaatacaacatttattactaaagccagacactggatcaccgtcacggcagatgtcagcacacctgttgtaatcaactcatctttcaagaggactttagactaattgcagataattaagagaatatgccttctgcatcctgtgatacactactggatgacatcgaagatatcgtgtctcaggaagattcaaaaccacaagataggcattttgtaagaaaggatgttgtcccgaaggtacgaaggcgaaatacccaaaaatatttgcaagaggaagaaaacagtccaccaagtgacagcactattccaggcatacagaaaatttggatacgaacatggggttgttctcataataattcagatggagaatatatggctggacagctagctgcttatggctataaaattacagttatttcaggttgagtgtacgtttgcttcgtcttcaaagtagaaagttcctggagaagacctactctttctggaactgtttttgtttgacccatgctatgcaaacttactcattcatgcaaacactgggtgctttatgcaaatattaccacctgtattttttatttgtgtttctcaaaggagttttggcaaaatttgcataatgacttggctcatttagctttgtgtattgt

SEQ ID NO: 350611 - DNA, 3024 bp, Homo sapiens
gcaaataaacgtggcgggacgtatgtgtcatggcgctctccatctaaagtctgtgcagcttccggagagtggcgggttgattttctcactttggactggtttttacttcccgacttctggactcatctttcaagaggactttagactaattgcagataattaagagaatatgccttctgcatcctgtgatacactactggatgacatcgaagatatcgtgtctcaggaagattcaaaaccacaagataggcattttgtaagaaaggatgttgtcccgaaggtacgaaggcgaaatacccaaaaatatttgcaagaggaagaaaacagtccaccaagtgacagcactattccaggcatacagaaaatttggatacgaacatggggttgttctcataataattcagatggagaatatatggctggacagctagctgcttatggctataaaattacagaaaatgcatccgatgcagatttatggctcctgaacagttgcactgtaaaaaacccagctgaagaccactttagaaactcaattaaaaaagctcaagaggagaacaagaaaatcgtactggctggatgcgttcctcaagcccagcctcgccaggactaccttaagggactgagtatcattggggttcagcagatagatcgtgtggtagaagttgtggaggagacaattaaaggtcactctgtgagactgctgggtcagaaaaaggataatggaaggcggcttgggggagcacgattggatttgccgaagattaggaagaatccactgatagaaatcatttccatcaataccgggtgtctcaatgcttgtacctactgcaaaactaaacacgccagaggaaatttggccagttatccaattgatgaactagtagatagagccaaacaatcttttcaagagggtgtttgtgagatatggttgaccagtgaagacacgggggcttatggcagagatattggcaccaatctccccacactcctgtggaaactggttgaagtgattcctgagggagcaatgctgaggcttggcatgacaaatccgccctatattttagagcatctggaggaaatggcaaaaatccttaatcaccccagagtctacgcttttctgcacataccagtccagtctgcctccgacagcgtactcatggaaatgaaaagagaatactgtgtggctgacttcaaaagagtagtggattttctgaaagagaaagttcctggaataactattgctacagatattatctgtggttttcctggagaaacagatcaggattttcaagaaacagtgaaacttgttgaagagtacaaattcccaagcctgtttattaaccaattttacccaagaccaggaactcctgctgcaaaaatggaacaagttccagcacaagtgaaaaagcaaaggacaaaagatctttctcgggtgtttcattcttacagtccatatgatcacaaggacttcagaaatgggcttgggaaccagctgagttcaggatcccacacctctgctgcatctcagtgtgactcagcgagttccagaatggtgctgcccatgccaaggctacatcaagactgtgcgctgaggatgtccgtgggcttggctctgctgggtcttctttttgctttttttgtcaaggtctataattagaatacaactaatggaaacatctataaagaagaatacatttctaattaaaatcttcaatgaacaggaaagcgacatctccattctccaagggcaataatttgtactggtcatgctgcctccttctcagccactcttcttaatgaggctccccctgtctcacattgagttgggcccattggttatttgacctaaaacctaatcaccgctaccatagcacatccttcaaattaaactgcttttggtttacttttagcaagaaatgcaagcggttgcattttttctgtttgtttcaatctctaatctttaagtcagaacctaattgtacagtggctctggccatcttttcctcatgtggaagaattttctatctttaataaactttttctttgttttttttttccagatggagtttcgctcttgtcccccaggctggagtggtgcagtggcacgatctcaggtcactgcaacctctgcctcctgggttcaaacgattctcctgcctcagcctcccaagtagctgggattacaggcatgcgccaccaagcccagacaatttttttgtgttttcagtagagacggagtttcaccatgttggccaggctagtctcgaactcctgacctcaagtgatccgcccgcctcggcctcccaaagtgctaggattacaggcgtgagccactgcgcccagcctctttaataaatatttttaagtgcatcttccccttcaggctttgtttggagtcccagtgctacaaacattgtatttttcacagcagatgtgttcctgaaaagtgtatagaaacctgttctgggaacctgaatgcttttggaatgcacggggagagtctgccagctaaaggactcctggcaacattctgtgaaatatgaaactggaaaactggatttgtcgaaaactaattgtgcccattttctcacatttttgatccattggggttttttttttgtttttgtttttttttttttttgagtcaaggtctcactctgtcaccctggctggagtgcaatggcactatcttggctcactgcagccttgacctcctggactcaagcagtcctcctacctcagcctccctaatagccaggggctacaggcatataccaccatgcccaactaattttttaattttttgtagagatgagtgtcactatgttgcccaggcttgcctggaactcctagcctcaagcagtcttcttgcctcagcctcccaaagtgctgggattacaggcgtgagccactccacccagcccagattaaatgtttttatttctacctgccatcattggtctttactaagtgaagtgacttctttctttaacaataaatggaattggtatactaagcaaa

SEQ ID NO: 350612 - DNA, 2589 bp, Homo sapiens
aggcacgaggtgcctgatgatctgtcactgtctcccatcacccccagatgggaccttgtagttgcaagaaaacaagctcagggctcgcactgattttatattatgaaaagctcaagaggagaacaagaaaatcgtactggctggatgcgttcctcaagcccagcctcgccaggactaccttaagggactgagtatcattggggttcagcagatagatcgtgtggtagaagttgtggaggagacaattaaaggtcactctgtgagactgctgggtcagaaaaaggataatggaaggcggcttgggggagcacgattggatttgccgaagattaggaagaatccactgatagaaatcatttccatcaataccgggtgtctcaatgcttgtacctactgcaaaactaaacacgccagaggaaatttggccagttatccaattgatgaactagtagatagagccaaacaatcttttcaagagggtgtttgtgagatatggttgaccagtgaagacacgggggcttatggcagagatattggcaccaatctccccacactcctgtggaaactggttgaagtgattcctgagggagcaatgctgaggcttggcatgacaaatccgccctatattttagagcatctggaggaaatggcaaaaatccttaatcaccccagagtctacgcttttctgcacataccagtccagtctgcctccgacagcgtactcatggaaatgaaaagagaatactgtgtggctgacttcaaaagagtagtggattttctgaaagagaaagttcctggaataactattgctacagatattatctgtggttttcctggagaaacagatcaggattttcaagaaacagtgaaacttgttgaagagtacaaattcccaagcctgtttattaaccaattttacccaagaccaggaactcctgctgcaaaaatggaacaagttccagcacaagtgaaaaagcaaaggacaaaagatctttctcgggtgtttcattcttacagtccatatgatcacaaggacttcagaaatgggcttgggaaccagctgagttcaggatcccacacctctgctgcatctcagtgtgactcagcgagttccagaatggtgctgcccatgccaaggctacatcaagactgtgcgctgaggatgtccgtgggcttggctctgctgggtcttctttttgctttttttgtcaaggtctataattagaatacaactaatggaaacatctataaagaagaatacatttctaattaaaatcttcaatgaacaggaaagcgacatctccattctccaagggcaataatttgtactggtcatgctgcctccttctcagccactcttcttaatgaggctccccctgtctcacattgagttgggcccattggttatttgacctaaaacctaatcaccgctaccatagcacatccttcaaattaaactgcttttggtttacttttagcaagaaatgcaagcggttgcattttttctgtttgtttcaatctctaatctttaagtcagaacctaattgtacagtggctctggccatcttttcctcatgtggaagaattttctatctttaataaactttttctttgttttttttttccagatggagtttcgctcttgtcccccaggctggagtggtgcagtggcacgatctcaggtcactgcaacctctgcctcctgggttcaaacgattctcctgcctcagcctcccaagtagctgggattacaggcatgcgccaccaagcccagacaatttttttgtgttttcagtagagacggagtttcaccatgttggccaggctagtctcgaactcctgacctcaagtgatccgcccgcctcggcctcccaaagtgctaggattacaggcgtgagccactgcgcccagcctctttaataaatatttttaagtgcatcttccccttcaggctttgtttggagtcccagtgctacaaacattgtatttttcacagcagatgtgttcctgaaaagtgtatagaaacctgttctgggaacctgaatgcttttggaatgcacggggagagtctgccagctaaaggactcctggcaacattctgtgaaatatgaaactggaaaactggatttgtcgaaaactaattgtgcccattttctcacatttttgatccattggggttttttttttgtttttgtttttttttttttttgagtcaaggtctcactctgtcaccctggctggagtgcaatggcactatcttggctcactgcagccttgacctcctggactcaagcagtcctcctacctcagcctccctaatagccaggggctacaggcatataccaccatgcccaactaattttttaattttttgtagagatgagtgtcactatgttgcccaggcttgcctggaactcctagcctcaagcagtcttcttgcctcagcctcccaaagtgctgggattacaggcgtgagccactccacccagcccagattaaatgtttttatttctacctgccatcattggtctttactaagtgaagtgacttctttctttaacaataaatggaattggtatactaagcaaa

SEQ ID NO: 350613 - DNA, 3564 bp, Homo sapiens
  misc_feature (3445)..(3445): n is a, c, g, or t
gcaaataaacgtggcgggacgtatgtgtcatggcgctctccatctaaagtctgtgcagcttccggagagtggcgggttgattttctcactttggactggtttttacttcccgacttctggactcatctttcaagaggactttagactaattgcagataattaagagaatatgccttctgcatcctgtgatacactactggatgacatcgaagatatcgtgtctcaggaagattcaaaaccacaagataggcattttgtaagaaaggatgttgtcccgaaggtacgaaggcgaaatacccaaaaatatttgcaagaggaagaaaacagtccaccaagtgacagcactattccaggcatacagaaaatttggatacgaacatggggttgttctcataataattcagatggagaatatatggctggacagctagctgcttatggctataaaattacagaaaatgcatccgatgcagatttatggctcctgaacagttgcactgtaaaaaacccagctgaagaccactttagaaactcaattaaaaaagctcaagaggagaacaagaaaatcgtactggctggatgcgttcctcaagcccagcctcgccaggactaccttaagggactgagtatcattggggttcagcagatagatcgtgtggtagaagttgtggaggagacaattaaaggtcactctgtgagactgctgggtcagaaaaaggataatggaaggcggcttgggggagcacgattggatttgccgaagattaggaagaatccactgatagaaatcatttccatcaataccgggtgtctcaatgcttgtacctactgcaaaactaaacacgccagaggaaatttggccagttatccaattgatgaactagtagatagagccaaacaatcttttcaagagggtgtttgtgagatatggttgaccagtgaagacacgggggcttatggcagagatattggcaccaatctccccacactcctgtggaaactggttgaagtgattcctgagggagcaatgctgaggcttggcatgacaaatccgccctatattttagagcatctggaggaaatggcaaaaatccttaatcaccccagagtctacgcttttctgcacataccagtccagtctgcctccgacagcgtactcatggaaatgaaaagagaatactgtgtggctgacttcaaaagagtagtggattttctgaaagagaaagttcctggaataactattgctacagatattatctgtggttttcctggagaaacagatcaggattttcaagaaacagtgaaacttgttgaagagtacaaattcccaagcctgtttattaaccaattttacccaagaccaggaactcctgctgcaaaaatggaacaagttccagcacaagtgaaaaagcaaaggacaaaagatctttctcgggtgtttcattcttacagtccatatgatcacaagattggtgaaagacaacaagtgttagtaacagaagaatcttttgattccaagttttatgttgcacacaatcaattctatgagcaggttttagtgccaaagaaccctgcgttcatggggaagatggttgaagtggacatctatgaatcaggcaaacattttatgaaagggcagccagtatctgatgccaaagtgtacacgccctccatcagcaaaccgctagcaaagggagaagtctcgggtttgacaaaggacttcagaaatgggcttgggaaccagctgagttcaggatcccacacctctgctgcatctcagtgtgactcagcgagttccagaatggtgctgcccatgccaaggctacatcaagactgtgcgctgaggatgtccgtgggcttggctctgctgggtcttctttttgctttttttgtcaaggtctataattagaatacaactaatggaaacatctataaagaagaatacatttctaattaaaatcttcaatgaacaggaaagcgacatctccattctccaagggcaataatttgtactggtcatgctgcctccttctcagccactcttcttaatgaggctccccctgtctcacattgagttgggcccattggttatttgacctaaaacctaatcaccgctaccatagcacatccttcaaattaaactgcttttggtttacttttagcaagaaatgcaagcggttgcattttttctgtttgtttcaatctctaatctttaagtcagaacctaattgtacagtggctctggccatcttttcctcatgtggaagaattttctatctttaataaactttttctttgttttttttttccagatggagtttcgctcttgtcccccaggctggagtggtgcagtggcacgatctcaggtcactgcaacctctgcctcctgggttcaaacgattctcctgcctcagcctcccaagtagctgggattacaggcatgcgccaccaagcccagacaatttttttgtgttttcagtagagacggagtttcaccatgttggccaggctagtctcgaactcctgacctcaagtgatccgcccgcctcggcctcccaaagtgctaggattacaggcgtgagccactgcgcccagcctctttaataaatatttttaagtgcatcttccccttcaggctttgtttggagtcccagtgctacaaacattgtatttttcacagcagatgtgttcctgaaaagtgtatagaaacctgttctgggaacctgaatgcttttggaatgcacggggagagtctgccagctaaaggactcctggcaacattctgtgaaatatgaaactggaaaactggatttgtcgaaaactaattgtgcccattttctcacatttttgatccattggggttttttttttgtttttgtttttttttttttttgagtcaaggtctcactctgtcaccctggctggagtgcaatggcactatcttggctcactgcagccttgacctcctggactcaagcagtcctcctacctcagcctccctaatagccaggggctacaggcatataccaccatgcccaactaattttttaattttttgtagagatgagtgtcactatgttgcccaggcttgcctggaactcctagcctcaagcagtcttcttgcctcagcctcccaaagtgctgggattacaggcgtgagccactccacccagcccagattaaatgtttttatttctacctgccatcattggtctttactaagtgaagtgacttctttctttaacaataaatggaattggtatactaagcaaaaaaaaaaaaaaaaaaaaaccgcgcggttctcacggccggggcgcgggacaaatggaagaaggctactggttctatttggtccgcatctttttcggcaaggcgtgaaaccgggttcccaaggtttcgttaatgcaatatgtagcatcttcgcacacacacaacaccacacacntaaaaaaaacacacaaaaatcaaactacacgacaagagagtacacaaaaacgagacaaaccatacacaccacacctacaacaacaatcagaaaacactttataatatcctacgacataa

SEQ ID NO: 350614 - DNA, 2093 bp, Homo sapiens
  misc_feature (1974)..(1974): n is a, c, g, or t
tagaagatagagtccactttgtaggggatcccagaacagaaaaatgacattgagggacaatgaggaaacctggataattaggttttagtgccaaagaaccctgcgttcatggggaagatggttgaagtggacatctatgaatcaggcaaacattttatgaaagggcagccagtatctgatgccaaagtgtacacgccctccatcagcaaaccgctagcaaagggagaagtctcgggtttgacaaaggacttcagaaatgggcttgggaaccagctgagttcaggatcccacacctctgctgcatctcagtgtgactcagcgagttccagaatggtgctgcccatgccaaggctacatcaagactgtgcgctgaggatgtccgtgggcttggctctgctgggtcttctttttgctttttttgtcaaggtctataattagaatacaactaatggaaacatctataaagaagaatacatttctaattaaaatcttcaatgaacaggaaagcgacatctccattctccaagggcaataatttgtactggtcatgctgcctccttctcagccactcttcttaatgaggctccccctgtctcacattgagttgggcccattggttatttgacctaaaacctaatcaccgctaccatagcacatccttcaaattaaactgcttttggtttacttttagcaagaaatgcaagcggttgcattttttctgtttgtttcaatctctaatctttaagtcagaacctaattgtacagtggctctggccatcttttcctcatgtggaagaattttctatctttaataaactttttctttgttttttttttccagatggagtttcgctcttgtcccccaggctggagtggtgcagtggcacgatctcaggtcactgcaacctctgcctcctgggttcaaacgattctcctgcctcagcctcccaagtagctgggattacaggcatgcgccaccaagcccagacaatttttttgtgttttcagtagagacggagtttcaccatgttggccaggctagtctcgaactcctgacctcaagtgatccgcccgcctcggcctcccaaagtgctaggattacaggcgtgagccactgcgcccagcctctttaataaatatttttaagtgcatcttccccttcaggctttgtttggagtcccagtgctacaaacattgtatttttcacagcagatgtgttcctgaaaagtgtatagaaacctgttctgggaacctgaatgcttttggaatgcacggggagagtctgccagctaaaggactcctggcaacattctgtgaaatatgaaactggaaaactggatttgtcgaaaactaattgtgcccattttctcacatttttgatccattggggttttttttttgtttttgtttttttttttttttgagtcaaggtctcactctgtcaccctggctggagtgcaatggcactatcttggctcactgcagccttgacctcctggactcaagcagtcctcctacctcagcctccctaatagccaggggctacaggcatataccaccatgcccaactaattttttaattttttgtagagatgagtgtcactatgttgcccaggcttgcctggaactcctagcctcaagcagtcttcttgcctcagcctcccaaagtgctgggattacaggcgtgagccactccacccagcccagattaaatgtttttatttctacctgccatcattggtctttactaagtgaagtgacttctttctttaacaataaatggaattggtatactaagcaaaaaaaaaaaaaaaaaaaaaccgcgcggttctcacggccggggcgcgggacaaatggaagaaggctactggttctatttggtccgcatctttttcggcaaggcgtgaaaccgggttcccaaggtttcgttaatgcaatatgtagcatcttcgcacacacacaacaccacacacntaaaaaaaacacacaaaaatcaaactacacgacaagagagtacacaaaaacgagacaaaccatacacaccacacctacaacaacaatcagaaaacactttataatatcctacgacataa

SEQ ID NO: 350615 - DNA, 2063 bp, Homo sapiens
gcaaataaacgtggcgggacgtatgtgtcatggcgctctccatctaaagtctgtgcagcttccggagagtggcgggttgattttctcactttggactggtttttacttcccgacttctggactcatctttcaagaggactttagactaattgcagataattaagagaatatgccttctgcatcctgtgatacactactggatgacatcgaagatatcgtgtctcaggaagattcaaaaccacaagataggcattttgtaagaaaggatgttgtcccgaaggtacgaaggcgaaatacccaaaaatatttgcaagaggaagaaaacagtccaccaagtgacagcactattccaggcatacagaaaatttggatacgaacatggggttgttctcataataattcagatggagaatatatggctggacagctagctgcttatggctataaaattacagaaaatgcatccgatgcagatttatggctcctgaacagttgcactgtaaaaaacccagctgaagaccactttagaaactcaattaaaaaagctcaagaggagaacaagaaaatcgtactggctggatgcgttcctcaagcccagcctcgccaggactaccttaagggactgagtatcattggggttcagcagatagatcgtgtggtagaagttgtggaggagacaattaaaggtcactctgtgagactgctgggtcagaaaaaggataatggaaggcggcttgggggagcacgattggatttgccgaagattaggaagaatccactgatagaaatcatttccatcaataccgggtgtctcaatgcttgtacctactgcaaaactaaacacgccagaggaaatttggccagttatccaattgatgaactagtagatagagccaaacaatcttttcaagagggtgtttgtgagatatggttgaccagtgaagacacgggggcttatggcagagatattggcaccaatctccccacactcctgtggaaactggttgaagtgattcctgagggagcaatgctgaggcttggcatgacaaatccgccctatattttagagcatctggaggaaatggcaaaaatccttaatcaccccagagtctacgcttttctgcacataccagtccagtctgcctccgacagcgtactcatggaaatgaaaagagaatactgtgtggctgacttcaaaagagtagtggattttctgaaagagaaagttcctggaataactattgctacagatattatctgtggttttcctggagaaacagatcaggattttcaagaaacagtgaaacttgttgaagagtacaaattcccaagcctgtttattaaccaattttacccaagaccaggaactcctgctgcaaaaatggaacaagttccagcacaagtgaaaaagcaaaggacaaaagatctttctcgggtgtttcattcttacagtccatatgatcacaagattggtgaaagacaacaagtgttagtaacagaagaatcttttgattccaagttttatgttgcacacaatcaattctatgagcaggttttagtgccaaagaaccctgcgttcatggggaagatggttgaagtggacatctatgaatcaggcaaacattttatgaaagggcagccagtatctgatgccaaagtgtacacgccctccatcagcaaaccgctagcaaagggagaagtctcgggtttgacaaaggtaagtaaaagatgctctcctctctaccctgctagtaaaacagcagctgtggaagcacagtgattccaggccatgtttctgttatcatttatagttccctttttatgtatgcatgaggctttaatcctttctgacagattgaaatctgaattagaaagatgtgtttttgctgatgccgatagctttgcttctctggctgtaaagagaataagctctttctgcttccagtttagaagcagggggtaaaagccattatttgcaggtgaaaatgttgacaccaaaagatgatctgatccagtatgtttctatgtcagtagatcctgagtggaaggggatgaagaaaggg

SEQ ID NO: 350616 - DNA, 1073 bp, Homo sapiens
gcaaataaacgtggcgggacgtatgtgtcatggcgctctccatctaaagtctgtgcagcttccggagagtggcgggttgattttctcactttggactggtttttacttcccgacttctggactcatctttcaagaggactttagactaattgcagataattaagagaatatgccttctgcatcctgtgatacactactggatgacatcgaagatatcgtgtctcaggaagattcaaaaccacaagataggcattttgtaagaaaggatgttgtcccgaaggtacgaaggcgaaatacccaaaaatatttgcaagaggaagaaaacagtccaccaagtgacagcactattccaggcatacagaaaatttggatacgaacatggggttgttctcataataattcagatggagaatatatggctggacagctagctgcttatggctataaaattacagaaaatgcatccgatgcagatttatggctcctgaacagttgcactgtaaaaaacccagctgaagaccactttagaaactcaattaaaaaagctcaagaggagaacaagaaaatcgtactggctggatgcgttcctcaagcccagcctcgccaggactaccttaagggactgagtatcattggggttcagcagatagatcgtgtggtagaagttgtggaggagacaattaaaggtcactctgtgagactgctgggtcagaaaaaggataatggaaggcggcttgggggagcacgattggatttgccgaagattaggaagaatccactgatagaaatcatttccatcaataccgggtgtctcaatgcttgtacctactgcaaaactaaacacgccagaggaaatttggccagttatccaattgatgaactagtagatagagccaaacaatcttttcaaggtaagagtttctagaattatatgtgaaattagtcttcttaataaattatgttagccttctaagtaatacttcagtttagagaccaacttctttagttttctgaagagttttacaaatatacgaacttaattaataaaagatgtgaccagagttaatcactta

SEQ ID NO: 350617 - DNA, 3092 bp, Homo sapiens
gcaaataaacgtggcgggacgtatgtgtcatggcgctctccatctaaagtctgtgcagcttccggagagtggcgggttgattttctcactttggactggtttttacttcccgacttctggactcatctttcaagaggactttagactaattgcagataattaagagaatatgccttctgcatcctgtgatacactactggatgacatcgaagatatcgtgtctcaggaagattcaaaaccacaagataggcattttgtaagaaaggatgttgtcccgaaggtacgaaggcgaaatacccaaaaatatttgcaagaggaagaaaacagtccaccaagtgacagcactattccaggcatacagaaaatttggatacgaacatggggttgttctcataataattcagatggagaatatatggctggacagctagctgcttatggctataaaattacagaaaatgcatccgatgcagatttatggctcctgaacagttgcactgtaaaaaacccagctgaagaccactttagaaactcaattaaaaaagctcaagaggagaacaagaaaatcgtactggctggatgcgttcctcaagcccagcctcgccaggactaccttaagggactgagtatcattggggttcagcagatagatcgtgtggtagaagttgtggaggagacaattaaaggtaatcgttgaaagtgagataaacagatgtatatattttctgaactacatagtagaaacaccactcaggtcactctgtgagactgctgggtcagaaaaaggataatggaaggcggcttgggggagcacgattggatttgccgaagattaggaagaatccactgatagaaatcatttccatcaataccgggtgtctcaatgcttgtacctactgcaaaactaaacacgccagaggaaatttggccagttatccaattgatgaactagtagatagagccaaacaatcttttcaagagggtgtttgtgagatatggttgaccagtgaagacacgggggcttatggcagagatattggcaccaatctccccacactcctgtggaaactggttgaagtgattcctgagggagcaatgctgaggcttggcatgacaaatccgccctatattttagagcatctggaggaaatggcaaaaatccttaatcaccccagagtctacgcttttctgcacataccagtccagtctgcctccgacagcgtactcatggaaatgaaaagagaatactgtgtggctgacttcaaaagagtagtggattttctgaaagagaaagttcctggaataactattgctacagatattatctgtggttttcctggagaaacagatcaggattttcaagaaacagtgaaacttgttgaagagtacaaattcccaagcctgtttattaaccaattttacccaagaccaggaactcctgctgcaaaaatggaacaagttccagcacaagtgaaaaagcaaaggacaaaagatctttctcgggtgtttcattcttacagtccatatgatcacaaggacttcagaaatgggcttgggaaccagctgagttcaggatcccacacctctgctgcatctcagtgtgactcagcgagttccagaatggtgctgcccatgccaaggctacatcaagactgtgcgctgaggatgtccgtgggcttggctctgctgggtcttctttttgctttttttgtcaaggtctataattagaatacaactaatggaaacatctataaagaagaatacatttctaattaaaatcttcaatgaacaggaaagcgacatctccattctccaagggcaataatttgtactggtcatgctgcctccttctcagccactcttcttaatgaggctccccctgtctcacattgagttgggcccattggttatttgacctaaaacctaatcaccgctaccatagcacatccttcaaattaaactgcttttggtttacttttagcaagaaatgcaagcggttgcattttttctgtttgtttcaatctctaatctttaagtcagaacctaattgtacagtggctctggccatcttttcctcatgtggaagaattttctatctttaataaactttttctttgttttttttttccagatggagtttcgctcttgtcccccaggctggagtggtgcagtggcacgatctcaggtcactgcaacctctgcctcctgggttcaaacgattctcctgcctcagcctcccaagtagctgggattacaggcatgcgccaccaagcccagacaatttttttgtgttttcagtagagacggagtttcaccatgttggccaggctagtctcgaactcctgacctcaagtgatccgcccgcctcggcctcccaaagtgctaggattacaggcgtgagccactgcgcccagcctctttaataaatatttttaagtgcatcttccccttcaggctttgtttggagtcccagtgctacaaacattgtatttttcacagcagatgtgttcctgaaaagtgtatagaaacctgttctgggaacctgaatgcttttggaatgcacggggagagtctgccagctaaaggactcctggcaacattctgtgaaatatgaaactggaaaactggatttgtcgaaaactaattgtgcccattttctcacatttttgatccattggggttttttttttgtttttgtttttttttttttttgagtcaaggtctcactctgtcaccctggctggagtgcaatggcactatcttggctcactgcagccttgacctcctggactcaagcagtcctcctacctcagcctccctaatagccaggggctacaggcatataccaccatgcccaactaattttttaattttttgtagagatgagtgtcactatgttgcccaggcttgcctggaactcctagcctcaagcagtcttcttgcctcagcctcccaaagtgctgggattacaggcgtgagccactccacccagcccagattaaatgtttttatttctacctgccatcattggtctttactaagtgaagtgacttctttctttaacaataaatggaattggtatactaagcaaa

SEQ ID NO: 350618 - DNA, 3202 bp, Homo sapiens
gcaaataaacgtggcgggacgtatgtgtcatggcgctctccatctaaagtctgtgcagcttccggagagtggcgggttgattttctcactttggactggtttttacttcccgacttctggactcatctttcaagaggactttagactaattgcagataattaagagaatatgccttctgcatcctgtgatacactactggatgacatcgaagatatcgtgtctcaggaagattcaaaaccacaagataggcattttgtaagaaaggatgttgtcccgaaggtacgaaggcgaaatacccaaaaatatttgcaagaggaagaaaacagtccaccaagtgacagcactattccaggcatacagaaaatttggatacgaacatggggttgttctcataataattcagatggagaatatatggctggacagctagctgcttatggctataaaattacagaaaatgcatccgatgcagatttatggctcctgaacagttgcactgtaaaaaacccagctgaagaccactttagaaactcaattaagagttgccctgaacaagctctcttttttcctgccgtcatccatttaagatgtgacttactcctccttaccgtccgccatgactgtgaggtctccccagccacatggaactaaaagctcaagaggagaacaagaaaatcgtactggctggatgcgttcctcaagcccagcctcgccaggactaccttaagggactgagtatcattggggttcagcagatagatcgtgtggtagaagttgtggaggagacaattaaaggtaatcgttgaaagtgagataaacagatgtatatattttctgaactacatagtagaaacaccactcaggtcactctgtgagactgctgggtcagaaaaaggataatggaaggcggcttgggggagcacgattggatttgccgaagattaggaagaatccactgatagaaatcatttccatcaataccgggtgtctcaatgcttgtacctactgcaaaactaaacacgccagaggaaatttggccagttatccaattgatgaactagtagatagagccaaacaatcttttcaagagggtgtttgtgagatatggttgaccagtgaagacacgggggcttatggcagagatattggcaccaatctccccacactcctgtggaaactggttgaagtgattcctgagggagcaatgctgaggcttggcatgacaaatccgccctatattttagagcatctggaggaaatggcaaaaatccttaatcaccccagagtctacgcttttctgcacataccagtccagtctgcctccgacagcgtactcatggaaatgaaaagagaatactgtgtggctgacttcaaaagagtagtggattttctgaaagagaaagttcctggaataactattgctacagatattatctgtggttttcctggagaaacagatcaggattttcaagaaacagtgaaacttgttgaagagtacaaattcccaagcctgtttattaaccaattttacccaagaccaggaactcctgctgcaaaaatggaacaagttccagcacaagtgaaaaagcaaaggacaaaagatctttctcgggtgtttcattcttacagtccatatgatcacaaggacttcagaaatgggcttgggaaccagctgagttcaggatcccacacctctgctgcatctcagtgtgactcagcgagttccagaatggtgctgcccatgccaaggctacatcaagactgtgcgctgaggatgtccgtgggcttggctctgctgggtcttctttttgctttttttgtcaaggtctataattagaatacaactaatggaaacatctataaagaagaatacatttctaattaaaatcttcaatgaacaggaaagcgacatctccattctccaagggcaataatttgtactggtcatgctgcctccttctcagccactcttcttaatgaggctccccctgtctcacattgagttgggcccattggttatttgacctaaaacctaatcaccgctaccatagcacatccttcaaattaaactgcttttggtttacttttagcaagaaatgcaagcggttgcattttttctgtttgtttcaatctctaatctttaagtcagaacctaattgtacagtggctctggccatcttttcctcatgtggaagaattttctatctttaataaactttttctttgttttttttttccagatggagtttcgctcttgtcccccaggctggagtggtgcagtggcacgatctcaggtcactgcaacctctgcctcctgggttcaaacgattctcctgcctcagcctcccaagtagctgggattacaggcatgcgccaccaagcccagacaatttttttgtgttttcagtagagacggagtttcaccatgttggccaggctagtctcgaactcctgacctcaagtgatccgcccgcctcggcctcccaaagtgctaggattacaggcgtgagccactgcgcccagcctctttaataaatatttttaagtgcatcttccccttcaggctttgtttggagtcccagtgctacaaacattgtatttttcacagcagatgtgttcctgaaaagtgtatagaaacctgttctgggaacctgaatgcttttggaatgcacggggagagtctgccagctaaaggactcctggcaacattctgtgaaatatgaaactggaaaactggatttgtcgaaaactaattgtgcccattttctcacatttttgatccattggggttttttttttgtttttgtttttttttttttttgagtcaaggtctcactctgtcaccctggctggagtgcaatggcactatcttggctcactgcagccttgacctcctggactcaagcagtcctcctacctcagcctccctaatagccaggggctacaggcatataccaccatgcccaactaattttttaattttttgtagagatgagtgtcactatgttgcccaggcttgcctggaactcctagcctcaagcagtcttcttgcctcagcctcccaaagtgctgggattacaggcgtgagccactccacccagcccagattaaatgtttttatttctacctgccatcattggtctttactaagtgaagtgacttctttctttaacaataaatggaattggtatactaagcaaa

SEQ ID NO: 350619 - DNA, 2295 bp, Homo sapiens
  misc_feature (2176)..(2176): n is a, c, g, or t
tgttttgctttcagacagggtatcgctctgttgcccaggctggagtgcagtgctgcaatcttggctcactgtagccccaacctcctgggctcaagcagtccttccacctcagcatctcaagtagctgggactacagaaaaagcaaaggacaaaagatctttctcgggtgtttcattcttacagtccatatgatcacaagattggtgaaagacaacaagtgttagtaacagaagaatcttttgattccaagttttatgttgcacacaatcaattctatgagcaggttttagtgccaaagaaccctgcgttcatggggaagatggttgaagtggacatctatgaatcaggcaaacattttatgaaagggcagccagtatctgatgccaaagtgtacacgccctccatcagcaaaccgctagcaaagggagaagtctcgggtttgacaaaggacttcagaaatgggcttgggaaccagctgagttcaggatcccacacctctgctgcatctcagtgtgactcagcgagttccagaatggtgctgcccatgccaaggctacatcaagactgtgcgctgaggatgtccgtgggcttggctctgctgggtcttctttttgctttttttgtcaaggtctataattagaatacaactaatggaaacatctataaagaagaatacatttctaattaaaatcttcaatgaacaggaaagcgacatctccattctccaagggcaataatttgtactggtcatgctgcctccttctcagccactcttcttaatgaggctccccctgtctcacattgagttgggcccattggttatttgacctaaaacctaatcaccgctaccatagcacatccttcaaattaaactgcttttggtttacttttagcaagaaatgcaagcggttgcattttttctgtttgtttcaatctctaatctttaagtcagaacctaattgtacagtggctctggccatcttttcctcatgtggaagaattttctatctttaataaactttttctttgttttttttttccagatggagtttcgctcttgtcccccaggctggagtggtgcagtggcacgatctcaggtcactgcaacctctgcctcctgggttcaaacgattctcctgcctcagcctcccaagtagctgggattacaggcatgcgccaccaagcccagacaatttttttgtgttttcagtagagacggagtttcaccatgttggccaggctagtctcgaactcctgacctcaagtgatccgcccgcctcggcctcccaaagtgctaggattacaggcgtgagccactgcgcccagcctctttaataaatatttttaagtgcatcttccccttcaggctttgtttggagtcccagtgctacaaacattgtatttttcacagcagatgtgttcctgaaaagtgtatagaaacctgttctgggaacctgaatgcttttggaatgcacggggagagtctgccagctaaaggactcctggcaacattctgtgaaatatgaaactggaaaactggatttgtcgaaaactaattgtgcccattttctcacatttttgatccattggggttttttttttgtttttgtttttttttttttttgagtcaaggtctcactctgtcaccctggctggagtgcaatggcactatcttggctcactgcagccttgacctcctggactcaagcagtcctcctacctcagcctccctaatagccaggggctacaggcatataccaccatgcccaactaattttttaattttttgtagagatgagtgtcactatgttgcccaggcttgcctggaactcctagcctcaagcagtcttcttgcctcagcctcccaaagtgctgggattacaggcgtgagccactccacccagcccagattaaatgtttttatttctacctgccatcattggtctttactaagtgaagtgacttctttctttaacaataaatggaattggtatactaagcaaaaaaaaaaaaaaaaaaaaaccgcgcggttctcacggccggggcgcgggacaaatggaagaaggctactggttctatttggtccgcatctttttcggcaaggcgtgaaaccgggttcccaaggtttcgttaatgcaatatgtagcatcttcgcacacacacaacaccacacacntaaaaaaaacacacaaaaatcaaactacacgacaagagagtacacaaaaacgagacaaaccatacacaccacacctacaacaacaatcagaaaacactttataatatcctacgacataa

SEQ ID NO: 350620 - DNA, 1035 bp, Homo sapiens
gcaaataaacgtggcgggacgtatgtgtcatggcgctctccatctaaagtctgtgcagcttccggagagtggcgggttgattttctcactttggactggtttttacttcccgacttctggactcatctttcaagaggactttagactaattgcagataattaagagaatatgccttctgcatcctgtgatacactactggatgacatcgaagatatcgtgtctcaggaagattcaaaaccacaagataggcattttgtaagaaaggatgttgtcccgaaggtacgaaggcgaaatacccaaaaatatttgcaagaggaagaaaacagtccaccaagtgacagcactattccaggcatacagaaaatttggatacgaacatggggttgttctcataataattcagatggagaatatatggctggacagctagctgcttatggctataaaattacagaaaatgcatccgatgcagatttatggctcctgaacagttgcactgtaaaaaacccagctgaagaccactttagaaactcaattaaaaaagctcaagaggagaacaagaaaatcgtactggctggatgcgttcctcaagcccagcctcgccaggactaccttaagggactgagtatcattggggttcagcagatagatcgtgtggtagaagttgtggaggagacaattaaaggtcactctgtgagactgctgggtcagaaaaaggataatggaaggcggcttgggggagcacgattggatttgccgaagattaggaagaatccactgatagaaatcatttccatcaataccgggtgtctcaatgcttgtacctactgcaaaactaaacacgccagaggaaatttggccagttatccaattgatgaactagtagatagagccaaacaatcttttcaaggttctcttcacctgctgctctaccagaagtaactgctgccgtgaatctgttgtgtatcttttttctctatgtgtatgttttgtaagtttataatattaaataatggttttatactctcaaatat

SEQ ID NO: 350621 - DNA, 1147 bp, Homo sapiens
gcaaataaacgtggcgggacgtatgtgtcatggcgctctccatctaaagtctgtgcagcttccggagagtggcgggttgattttctcactttggactggtttttacttcccgacttctggactcatctttcaagaggactttagactaattgcagataattaagagaatatgccttctgcatcctgtgatacactactggatgacatcgaagatatcgtgtctcaggaagattcaaaaccacaagataggcattttgtaagaaaggatgttgtcccgaaggtacgaaggcgaaatacccaaaaatatttgcaagaggaagaaaacagtccaccaagtgacagcactattccaggcatacagaaaatttggatacgaacatggggttgttctcataataattcagatggagaatatatggctggacagctagctgcttatggctataaaattacagaaaatgcatccgatgcagatttatggctcctgaacagttgcactgtaaaaaacccagctgaagaccactttagaaactcaattaaaaaagctcaagaggagaacaagaaaatcgtactggctggatgcgttcctcaagcccagcctcgccaggactaccttaagggactgagtatcattggggttcagcagatagatcgtgtggtagaagttgtggaggagacaattaaaggtaatcgttgaaagtgagataaacagatgtatatattttctgaactacatagtagaaacaccactcaggtcactctgtgagactgctgggtcagaaaaaggataatggaaggcggcttgggggagcacgattggatttgccgaagattaggaagaatccactgatagaaatcatttccatcaataccggagataagatctcactttgttatgttgcccaggttggtcctgaactcctggcttcaagcaatcctcctgccttggcctcccaaagctctgggattacaggtgtgagccaccacacctagccgggacatcaatttgttaaacaaatgtagttgaacataaaaagatgagttcatgtggtatttgcccttgagaatcccatagaaaagcacaaaacaataaagttataagcaacaagcacaaaacaataaagttataagctcacattgtatgacg

SEQ ID NO: 350622 - DNA, 540 bp, Homo sapiens
tcttatgtaatagtagccagtttgcaggcactcaaacctcttctcccctcatgccactgcagtctgtcagttgaatctgatagcaaatgagcaaatttaagaaagaaaaatcagtactacaacttacttaacctaactctttcaacttcaaactttctcacctgcaaaatgagggcaaaactaattacatacctcatgaagtgcttgtgaggagtaacttagagcagattgaaagtttccttaagaggagtccagagcatttgttaaaagtactatgcccgtttaaggatcagtgttagatctgacagagtagtaatggccccagtcccccaaatggggtcacggagaagacaaatcattgccaaagcttagttttcagccttagtaatctaaagaaaggagagacgtaaaacgtttagctcaactcttcatgtttaaataaaattctgagtgacatagcatataagacttgtatttgtttttgaagtattggggcatttggaagagtttttccttcttttttttttaaactgaaataat

SEQ ID NO: 350623 - DNA, 2314 bp, Homo sapiens
ggcggaggccagaggcgggctgggaaggtggaggggcgggccggggcggggccaggccggctagaggggcgggtctagcggcggcccccggcgaagttcactgcgcttgcgctgacagacgcaagatggcggacagtgcggaactaaagcaaatggttatgagccttagagtttctgaactccaagtactgttgggctacgccgggagaaacaagcacggacgcaaacacgaacttctcacaaaagccctgcatttgctaaaggctggctgtagtcctgctgtgcaaatgaaaattaaggaactctataggcggcggttcccacagaaaatcatgacgcctgcagacttgtccatccccaacgtacattcaagtcctatgccagcaactttgtctccatctaccattccacaactcacttacgatggtcaccctgcatcatcgccattactccctgtttctcttctgggacctaaacatgaactggaactcccacatcttacatcagctcttcacccagtccatccggatataaaacttcaaaaattaccattttatgatttactggatgaactgataaaacccaccagtctagcatcagacaacagtcagcgctttcgagaaacctgttttgcatttgccttgacaccacaacaagtgcagcaaatcagtagttccatggatatttctgggaccaaatgtgacttcacagtacaggtccagttaaggttttgtttatcagaaaccagttgtccacaagaagatcacttcccacccaatctttgtgtgaaagtgaatacaaaaccttgcagccttccaggttaccttccacctacaaaaaatggcgtggaaccaaagcgacccagccgaccaattaatatcacctcacttgtccgactgtccacaacagtaccaaacacgattgttgtttcttggactgcagaaattggaagaaactattccatggcagtatatcttgtaaaacagttgtcctcaacagttcttcttcagaggttacgagcaaagggaataaggaatccggatcattctagagctttaattaaagagaagttgactgcggatccagacagtgaaatagctacaaccagcctaagggtttctctactatgtccacttggtaaaatgcggctgacaattccgtgtcgggcccttacatgttctcatctacaatgttttgacgcaactctttacattcagatgaatgagaaaaaaccaacctgggtttgtcctgtctgtgataagaaggctccatatgaacaccttattattgatggcttgtttatggaaatcctaaagtactgtacagactgtgatgaaatacaatttaaggaggatggcacttgggcaccgatgagatcaaaaaaggaagtacaggaagtttctgcctcttacaatggagtcgatggatgcttgagctccacattggagcatcaggtagcgtctcaccaccagtcctcaaataaaaacaagaaagtagaagtgattgacctaaccatagacagttcatctgatgaagaggaagaagagccatctgccaagaggacctgtccttccctatctcccacatcaccactaaataataaaggcattttaagtcttccacatcaagcatctccagtatcccgcaccccaagccttcctgctgtagacacaagctacattaatacctccctcatccaagactataggcatcctttccacatgacacccatgccttacgacttacaaggattagatttctttcctttcttatcaggagacaatcagcattacaacacctccttgcttgccgctgcagcagcagcagtttcagatgatcaagacctcctacactcgtctcggtttttcccgtatacctcctcacagatgtttcttgatcagttaagtgcaggaggcagtacttctctgccaaccaccaatggaagcagtagtggcagtaacagcagcctggtttcttccaacagcctaagggaaagccatagccacaccgtcacaaacaggagcagcacggacacggcatccatctttggcatcataccagacattatttcattggactgattcccaggccctgctgctcccatccccaccccagatcgaatgaacttggcagaaagaagagaactttgtgctctgttttaccttactctgtttagaaaagtatacaagcgtgttttttttcctttttttagggaaaaaattaaaagaaatgtacagagaacaaaactatattttcagttttacttttgtatataaatctaagactgcctgtgtgataaaacacttgtttaaaa

SEQ ID NO: 350624 - DNA, 703 bp, Homo sapiens
  misc_feature (32)..(32): n is a, c, g, or t
accttacggctaggtagcgaggcctgggtgtngcgcacccaagccttcctgctgtagacacaagctacattaatacctccctcatccaagactataggcatcctttccacatgacacccatgccttacgacttacaaggattagatttctttcctttcttatcaggagacaatcagcattacaacacctccttgcttgccgctgcagcagcagcagtttcagatgatcaagacctcctacactcgtctcggtttttcccgtatacctcctcacagatgtttcttgatcagttaagtgcaggaggcagtacttctctgccaaccaccaatggaagcagtagtggcagtaacagcagcctggtttcttccaacagcctaagggaaagccatagccacaccgtcacaaacaggagcagcacggacacggcatccatctttggcatcataccagacattatttcattggactgattcccaggccctgctgctcccatccccaccccagatcgaatgaacttggcagaaagaagagaactttgtgctctgttttaccttactctgtttagaaaagtatacaagcgtgttttttttcctttttttagggaaaaaattaaaagaaatgtacagagaacaaaactatattttcagttttacttttgtatataaatctaagactgcctgtgtgataaaacacttgtttaaaa

SEQ ID NO: 350625 - DNA, 745 bp, Homo sapiens
ggcggaggccagaggcgggctgggaaggtggaggggcgggccggggcggggccaggccggctagaggggcgggtctagcggcggcccccggcgaagttcactgcgcttgcgctgacagacgcaagatggcggacagtgcggaactaaagcaaatggttatgagccttagagtttctgaactccaagtactgttgggctacgccgggagaaacaagcacggacgcaaacacgaacttctcacaaaagccctgcatttgctaaaggctggctgtagtcctgctgtgcaaatgaaaattaaggaactctataggcggcggttcccacagaaaatcatgacgcctgcagacttgtccatccccaacgtacattcaagtcctatgccagcaactttgtctccatctaccattccacaactcacttacgatggtcaccctgcatcatcgccattactccctgtttctcttctgggacctaaacatgaactggaactcccacatcttacatcagctcttcacccagtccatccggatataaaacttcaaaaattaccattttatgatttactggatgaactgataaaacccaccagtctagaggtaagattattgtatgatagtatttggttacttttgcaggatgaattttcgttttaggcttttactttgacccagtttattattcataatgaaattttcatttgatagtaacagctggataataatgaagatctttcaaatttagataa

SEQ ID NO: 350626 - DNA, 6514 bp, Homo sapiens
ggcggaggccagaggcgggctgggaaggtggaggggcgggccggggcggggccaggccggctagaggggcgggtctagcggcggcccccggcgaagttcactgcgcttgcgctgacagacgcaagatggcggacagtgcggaactaaagcaaatggttatgagccttagagtttctgaactccaagtactgttgggctacgccgggagaaacaagcacggacgcaaacacgaacttctcacaaaagccctgcatttgctaaaggctggctgtagtcctgctgtgcaaatgaaaattaaggaactctataggcggcggttcccacagaaaatcatgacgcctgcagacttgtccatccccaacgtacattcaagtcctatgccagcaactttgtctccatctaccattccacaactcacttacgatggtcaccctgcatcatcgccattactccctgtttctcttctgggacctaaacatgaactggaactcccacatcttacatcagctcttcacccagtccatccggatataaaacttcaaaaattaccattttatgatttactggatgaactgataaaacccaccagtctagcatcagacaacagtcagcgctttcgagaaacctgttttgcatttgccttgacaccacaacaagtgcagcaaatcagtagttccatggatatttctgggaccaaatgtgacttcacagtacaggtccagttaaggttttgtttatcagaaaccagttgtccacaagaagatcacttcccacccaatctttgtgtgaaagtgaatacaaaaccttgcagccttccaggttaccttccacctacaaaaaatggcgtggaaccaaagcgacccagccgaccaattaatatcacctcacttgtccgactgtccacaacagtaccaaacacgattgttgtttcttggactgcagaaattggaagaaactattccatggcagtatatcttgtaaaacagttgtcctcaacagttcttcttcagaggttacgagcaaagggaataaggaatccggatcattctagagctttaattaaagagaagttgactgcggatccagacagtgaaatagctacaaccagcctaagggtttctctactatgtccacttggtaaaatgcggctgacaattccgtgtcgggcccttacatgttctcatctacaatgttttgacgcaactctttacattcagatgaatgagaaaaaaccaacctgggtttgtcctgtctgtgataagaaggctccatatgaacaccttattattgatggcttgtttatggaaatcctaaagtactgtacagactgtgatgaaatacaatttaaggaggatggcacttgggcaccgatgagatcaaaaaaggaagtacaggaagtttctgcctcttacaatggagtcgatggatgcttgagctccacattggagcatcaggtagcgtctcaccaccagtcctcaaataaaaacaagaaagtagaagtgattgacctaaccatagacagttcatctgatgaagaggaagaagagccatctgccaagaggacctgtccttccctatctcccacatcaccactaaataataaaggcattttaagtcttccacatcaagcatctccagtatcccgcaccccaagccttcctgctgtagacacaagctacattaatacctccctcatccaagactataggcatcctttccacatgacacccatgccttacgacttacaaggattagatttctttcctttcttatcaggagacaatcagcattacaacacctccttgcttgccgctgcagcagcagcagtttcagatgatcaagacctcctacactcgtctcggtttttcccgtatacctcctcacagatgtttcttgatcagttaagtgcaggaggcagtacttctctgccaaccaccaatggaagcagtagtggcagtaacagcagcctggtttcttccaacagcctaagggaaagccatagccacaccgtcacaaacaggagcagcacggacacggcatccatctttggcatcataccagacattatttcattggactgattcccaggccctgctgctcccatccccaccccagatcgaatgaacttggcagaaagaagagaactttgtgctctgttttaccttactctgtttagaaaagtatacaagcgtgttttttttcctttttttagggaaaaaattaaaagaaatgtacagagaacaaaactatattttcagttttacttttgtatataaatctaagactgcctgtgtgataaaacacttgtttaaaaaaaaaaaggaaagaaaagaaaaaagaaaaacaagcacccacaaaccaccttcagttcatttttttctggattctgaagatttttcattatttgtcctatggttttggttttatttgacttcgatggcattattttatttgcaataacagaaaaggaattgcatgtatgaagttttcaatcgtgggcttttctttgttgtggggagggggtcgggggatagtttgatttccattttctgaaaacgacagacttggattctgtttgtgtgtgcatattttatccagccttaagttataaagctcatctgtcccgctgcattccctgtgtattttcaggacatggctcgtgggtgtgtgtgttcattgtgtgcgtctgtatgtatttttctgtcatcactgttccctctcctcccgagtgtgcattcagttaatataatcagttgcttgcttctttcaaagtgctttgaaggtcttgaactcacgtgtgagcatctttatcaactatcccaattgcatgttctccatcacatattctcttatttgctctgtaccccctgagaatatgttttagagatattggaataaagctgtctgggtaaggagtaggcttagccgacctatgaataatacactttagtctagttctttattctaaatctggattgccagtattgtgtatttaaaccaagtctgtgaatacctgctttttttggccacagagtaacaagttttcatgtaagatcttcataccaaagtaggaagtaaaaatagcttagaaagctctgtcaggtgttttgtgcagctgacagaggtaatgttacatcacctaaaaaagaaagatacacggtcagttatcctaaaaataaattgtttggaaagtacaatgcaccacatttttgtagaagtctactatttgataaacagttgaaattcaagatgtgtttgacccttagtcatttttactctttggttctgagtatacctattttcttagcgtatctgccttgtttatctttttcttcaccttttaacaagtatgacataggaaagtcatttttttttagaattcatggatcagtctgatctactcttattcataatggaacatgtaaatatactgaaaactgtttttcaggagagaaatatgagttggagggaaggaaaagtggttctactaatgttccaaaatcctcatcagagaaggtatgatgttctcaggtgtggaaaatattttttagttgattgagaatgcaggtttaacagaagagataaggggcataatgactgctggttttccagactggattttcctaccgcaactattaatgttctcagagttgatgaggaccacctttgtgtatacacttgtagttttaaaccttgcattggtaacaaaatgatcaactttaatccaggtagaattcaagatggctgtacttcagttgtatgataaaattaatggttctcatgacttgtgtggcatctaaaaataatgtttttatagcatctctctgccactaaattgttgacttgaattttgggaaaaaaaaaagttggtgttgatatgtatatgtgtgtgtgtatatatgtatttataaacaagtgtgtttgagtaacaagtgagtttcatagtcttcccctacgcatgtgtattccacacacaaatggctgagttatagtcataaaacaatttgcaataaaaaaaaaaccaaaacagattgtcagttaaccaggaaacagttaatgttttttaatgaatctggcattatagtgagcaaatgtcgtattaatttaggctaatttctaatactaccataatttgtgtctaaatttctgttggggtagaaattactaaaattgtggggagttttttctgatttttacattgctttaggaaacatttttactaattcagctgtcttaggtaaaatgaatagttttcttcctgtttttttatgtgtcattgttagtggtctcagaattctgatcagtaactttgtgtatgatgctgaattacaaaccgtttgaatgatccagttgaaaacgtatccctctactttcttcagttgtagaaaaggttaatttccctcagtgtcccacattataccaacctaagagaagaacaggtaatagggagaaataaacatacggtggtttcagtggttttggtcatgtgtccacaggagaaactaaccattcagttgtcttaattttagttcgttctaccctgtgaggagtttgtttccatcagttgttgactttccaaaatgttgcattaagtaatagttgtcactctgttggtctcatggtcaatatcaatcagactttcatgatctctactaattattagtagagtcctgtactatgtctgtaactactaagtttaaagaaaagcacatagtcacttcatctctttttttcttagcctacgctcactccccaacccatcccaacattgacatgctatctgtggacaaatagcagttctcagaatctagtcaagttgccatcatcccccttgccttggccgttcatagtaggtatgcatatgtttgtttctgtacagtactgtgtgtgtgtgtgtatatatatatacatctgtatgcacacatctttgataaaatagctatttgactagcagggttaaagtggcttttaattacttcgtgagtgttattggatacatcttaaaaaaaaaaaatctgaaccagaaccatgccatacttggttgactattttgagcattaaaattgctttactaattatttagacatgatcacaattctgtatctttactgaggaaagattcacgtaagctctgaaaaatcggattctttggcagattttcctttgagtcaagtgtctgaaatggagtgaaaatatatcctaactaaattaatgtggaaagagcatttttttagacaatttcaattttaaacacataaaactttcaagatcttcaggactttttaaagcacatttgaaattattttagtaagaattttgttttatcaatagatgttgaattctgttttttaattaaatacaaagcttagatttcagaaagagagggaaaatagctggtggtcccagagtgtgctgctgttaattgtttaacaaaggggaaaatgtacataaacagataaagttaccataaattccatgaacttaaatctgtgattcattgccttaaaactttctctcttagaatttccataccgcatgccaaaccagtaaaatggcttttaaaaatgtatagtagacaatgtcagtttgtataaaagtaccaagtgaaaatatttattacatgcattggaaaaaaattgtttacctattgaatgttacctgtttatgtagagctctttagatgtaataaaagaaaagccttcagttaatttgtcttctgtaaaataacactgctggatgttcaaggggacaatccctatgagacaagtgataatggtttgtgcttccaaagcacctttcatccagagatttcaaagcatgacaagtaactaactaattttcttgcagcatgctttgaggtaagtaatgaatatagccatcatttccctttcttgttgaaatatggctaactctttaataaatcacagcatctgtttagtatctgcagtttgaatgctaagagcaccgtggccttcttgtaaacaacactaggtgctagagaaaccagctggaatttcaggaatgagcttgaaaccaggaccaggagtaaggtaacagcccttcctcgggtagaggtttgaatcaaacacttaataggatcttagactctggaccactgaatcccttaatgagcagggagtccgtgaagaggagccccaggttctaatgaccattccacaccaactgtgtgtttttggcaagttatatttcagattcctgttaggcaaatgagattcataaaacttgctttaaaaccatactgggactattcagtgataaatatagacatagaaaagctttgacggaaagtaccctcatttattatatccagaacttgctcttcctgtgccatctaaatcattggtatctatctcccatctaatctttggtattccaggttggctgtgcaggatttacttcctaatgtccatgactggagctcaaaagaactgtgggcctaggacctttgagctttgcctgaaagtgacagcagttctctcggcggggccagcat

SEQ ID NO: 350627 - DNA, 5906 bp, Homo sapiens
tggagttgtttctgcgcggagcttagccctggggagaggaggaagcccgggctgtgaccccggcctttcggagggtggtctgcgtttcctcactggcccctccccttgtcttccagataccctgtgtaacgaactcgaccaggagcggaaggcgcgctatgccatccagcagaaattgaaagggcagcttctccagctcccagttctggcagtgcatggtaaccttcagtgcccagctgacagaagcttccctcagcatcttctctaagtggtgtgccactggcaaggcacctgaccatgaacggcttcccccagcaccccatcacctgaagaatttgcagcaagtttcaagcaaatggttatgagccttagagtttctgaactccaagtactgttgggctacgccgggagaaacaagcacggacgcaaacacgaacttctcacaaaagccctgcatttgctaaaggctggctgtagtcctgctgtgcaaatgaaaattaaggaactctataggcggcggttcccacagaaaatcatgacgcctgcagacttgtccatccccaacgtacattcaagtcctatgccagcaactttgtctccatctaccattccacaactcacttacgatggtcaccctgcatcatcgccattactccctgtttctcttctgggacctaaacatgaactggaactcccacatcttacatcagctcttcacccagtccatccggatataaaacttcaaaaattaccattttatgatttactggatgaactgataaaacccaccagtctagcatcagacaacagtcagcgctttcgagaaacctgttttgcatttgccttgacaccacaacaagtgcagcaaatcagtagttccatggatatttctgggaccaaatgtgacttcacagtacaggtccagttaaggttttgtttatcagaaaccagttgtccacaagaagatcacttcccacccaatctttgtgtgaaagtgaatacaaaaccttgcagccttccaggttaccttccacctacaaaaaatggcgtggaaccaaagcgacccagccgaccaattaatatcacctcacttgtccgactgtccacaacagtaccaaacacgattgttgtttcttggactgcagaaattggaagaaactattccatggcagtatatcttgtaaaacagttgtcctcaacagttcttcttcagaggttacgagcaaagggaataaggaatccggatcattctagagctttaattaaagagaagttgactgcggatccagacagtgaaatagctacaaccagcctaagggtttctctactatgtccacttggtaaaatgcggctgacaattccgtgtcgggcccttacatgttctcatctacaatgttttgacgcaactctttacattcagatgaatgagaaaaaaccaacctgggtttgtcctgtctgtgataagaaggctccatatgaacaccttattattgatggcttgtttatggaaatcctaaagtactgtacagactgtgatgaaatacaatttaaggaggatggcacttgggcaccgatgagatcaaaaaaggaagtacaggaagtttctgcctcttacaatggagtcgatggatgcttgagctccacattggagcatcaggtagcgtctcaccaccagtcctcaaataaaaacaagaaagtagaagtgattgacctaaccatagacagttcatctgatgaagaggaagaagagccatctgccaagaggacctgtccttccctatctcccacatcaccactaaataataaaggcattttaagtcttccacatcaagcatctccagtatcccgcaccccaagccttcctgctgtagacacaagctacattaatacctccctcatccaagactataggcatcctttccacatgacacccatgccttacgacttacaaggattagatttctttcctttcttatcaggagacaatcagcattacaacacctccttgcttgccgctgcagcagcagcagtttcagatgatcaagacctcctacactcgtctcggtttttcccgtatacctcctcacagatgtttcttgatcagttaagtgcaggaggcagtacttctctgccaaccaccaatggaagcagtagtggcagtaacagcagcctggtttcttccaacagcctaagggaaagccatagccacaccgtcacaaacaggagcagcacggacacggcatccatctttggcatcataccagacattatttcattggactgattcccaggccctgctgctcccatccccaccccagatcgaatgaacttggcagaaagaagagaactttgtgctctgttttaccttactctgtttagaaaagtatacaagcgtgttttttttcctttttttagggaaaaaattaaaagaaatgtacagagaacaaaactatattttcagttttacttttgtatataaatctaagactgcctgtgtgataaaacacttgtttaaaaaaaaaaaggaaagaaaagaaaaaagaaaaacaagcacccacaaaccaccttcagttcatttttttctggattctgaagatttttcattatttgtcctatggttttggttttatttgacttcgatggcattattttatttgcaataacagaaaaggaattgcatgtatgaagttttcaatcgtgggcttttctttgttgtggggagggggtcgggggatagtttgatttccattttctgaaaacgacagacttggattctgtttgtgtgtgcatattttatccagccttaagttataaagctcatctgtcccgctgcattccctgtgtattttcaggacatggctcgtgggtgtgtgtgttcattgtgtgcgtctgtatgtatttttctgtcatcactgttccctctcctcccgagtgtgcattcagttaatataatcagttgcttgcttctttcaaagtgctttgaaggtcttgaactcacgtgtgagcatctttatcaactatcccaattgcatgttctccatcacatattctcttatttgctctgtaccccctgagaatatgttttagagatattggaataaagctgtctgggtaaggagtaggcttagccgacctatgaataatacactttagtctagttctttattctaaatctggattgccagtattgtgtatttaaaccaagtctgtgaatacctgctttttttggccacagagtaacaagttttcatgtaagatcttcataccaaagtaggaagtaaaaatagcttagaaagctctgtcaggtgttttgtgcagctgacagaggtaatgttacatcacctaaaaaagaaagatacacggtcagttatcctaaaaataaattgtttggaaagtacaatgcaccacatttttgtagaagtctactatttgataaacagttgaaattcaagatgtgtttgacccttagtcatttttactctttggttctgagtatacctattttcttagcgtatctgccttgtttatctttttcttcaccttttaacaagtatgacataggaaagtcatttttttttagaattcatggatcagtctgatctactcttattcataatggaacatgtaaatatactgaaaactgtttttcaggagagaaatatgagttggagggaaggaaaagtggttctactaatgttccaaaatcctcatcagagaaggtatgatgttctcaggtgtggaaaatattttttagttgattgagaatgcaggtttaacagaagagataaggggcataatgactgctggttttccagactggattttcctaccgcaactattaatgttctcagagttgatgaggaccacctttgtgtatacacttgtagttttaaaccttgcattggtaacaaaatgatcaactttaatccaggtagaattcaagatggctgtacttcagttgtatgataaaattaatggttctcatgacttgtgtggcatctaaaaataatgtttttatagcatctctctgccactaaattgttgacttgaattttgggaaaaaaaaaagttggtgttgatatgtatatgtgtgtgtgtatatatgtatttataaacaagtgtgtttgagtaacaagtgagtttcatagtcttcccctacgcatgtgtattccacacacaaatggctgagttatagtcataaaacaatttgcaataaaaaaaaaaccaaaacagattgtcagttaaccaggaaacagttaatgttttttaatgaatctggcattatagtgagcaaatgtcgtattaatttaggctaatttctaatactaccataatttgtgtctaaatttctgttggggtagaaattactaaaattgtggggagttttttctgatttttacattgctttaggaaacatttttactaattcagctgtcttaggtaaaatgaatagttttcttcctgtttttttatgtgtcattgttagtggtctcagaattctgatcagtaactttgtgtatgatgctgaattacaaaccgtttgaatgatccagttgaaaacgtatccctctactttcttcagttgtagaaaaggttaatttccctcagtgtcccacattataccaacctaagagaagaacaggtaatagggagaaataaacatacggtggtttcagtggttttggtcatgtgtccacaggagaaactaaccattcagttgtcttaattttagttcgttctaccctgtgaggagtttgtttccatcagttgttgactttccaaaatgttgcattaagtaatagttgtcactctgttggtctcatggtcaatatcaatcagactttcatgatctctactaattattagtagagtcctgtactatgtctgtaactactaagtttaaagaaaagcacatagtcacttcatctctttttttcttagcctacgctcactccccaacccatcccaacattgacatgctatctgtggacaaatagcagttctcagaatctagtcaagttgccatcatcccccttgccttggccgttcatagtaggtatgcatatgtttgtttctgtacagtactgtgtgtgtgtgtgtatatatatatacatctgtatgcacacatctttgataaaatagctatttgactagcagggttaaagtggcttttaattacttcgtgagtgttattggatacatcttaaaaaaaaaaaatctgaaccagaaccatgccatacttggttgactattttgagcattaaaattgctttactaattatttagacatgatcacaattctgtatctttactgaggaaagattcacgtaagctctgaaaaatcggattctttggcagattttcctttgagtcaagtgtctgaaatggagtgaaaatatatcctaactaaattaatgtggaaagagcatttttttagacaatttcaattttaaacacataaaactttcaagatcttcaggactttttaaagcacatttgaaattattttagtaagaattttgttttatcaatagatgttgaattctgttttttaattaaatacaaagcttagatttcagaaagagagggaaaatagctggtggtcccagagtgtgctgctgttaattgtttaacaaaggggaaaatgtacataaacagataaagttaccataaattccatgaacttaaatctgtgattcattgccttaaaactttctctcttagaatttccataccgcatgccaaaccagtaaaatggcttttaaaaatgtatagtagacaatgtcagtttgtataaaagtaccaagtgaaaatatttattacatgcattggaaaaaaattgtttacctattgaatgttacctgtttatgtagagctctttagatgtaataaaagaaaagccttca

SEQ ID NO: 350628 - DNA, 5583 bp, Homo sapiens
ggcggaggccagaggcgggctgggaaggtggaggggcgggccggggcggggccaggccggctagaggggcgggtctagcggcggcccccggcgaagttcactgcgcttgcgctgacagacgcaagatggcggacagtgcggaactaaagcaaatggttatgagccttagagtttctgaactccaagtactgttgggctacgccgggagaaacaagcacggacgcaaacacgaacttctcacaaaagccctgcatttgctaaaggctggctgtagtcctgctgtgcaaatgaaaattaaggaactctataggcggcggttcccacagaaaatcatgacgcctgcagacttgtccatccccaacgtacattcaagtcctatgccagcaactttgtctccatctaccattccacaactcacttacgatggtcaccctgcatcatcgccattactccctgtttctcttctgggacctaaacatgaactggaactcccacatcttacatcagctcttcacccagtccatccggatataaaacttcaaaaattaccattttatgatttactggatgaactgataaaacccaccagtctagcatcagacaacagtcagcgctttcgagaaacctgttttgcatttgccttgacaccacaacaagtgcagcaaatcagtagttccatggatatttctgggaccaaatgtgacttcacagtacaggtccagttaagggaaccaaagcgacccagccgaccaattaatatcacctcacttgtccgactgtccacaacagtaccaaacacgattgttgtttcttggactgcagaaattggaagaaactattccatggcagtatatcttgtaaaacagttgtcctcaacagttcttcttcagaggttacgagcaaagggaataaggaatccggatcattctagagctttaattaaagagaagttgactgcggatccagacagtgaaatagctacaaccagcctaagggtttctctactatgtccacttggtaaaatgcggctgacaattccgtgtcgggcccttacatgttctcatctacaatgttttgacgcaactctttacattcagatgaatgagaaaaaaccaacctgggtttgtcctgtctgtgataagaaggctccatatgaacaccttattattgatggcttgtttatggaaatcctaaagtactgtacagactgtgatgaaatacaatttaaggaggatggcacttgggcaccgatgagatcaaaaaaggaagtacaggaagtttctgcctcttacaatggagtcgatggatgcttgagctccacattggagcatcaggtagcgtctcaccaccagtcctcaaataaaaacaagaaagtagaagtgattgacctaaccatagacagttcatctgatgaagaggaagaagagccatctgccaagaggacctgtccttccctatctcccacatcaccactaaataataaaggcattttaagtcttccacatcaagcatctccagtatcccgcaccccaagccttcctgctgtagacacaagctacattaatacctccctcatccaagactataggcatcctttccacatgacacccatgccttacgacttacaaggattagatttctttcctttcttatcaggagacaatcagcattacaacacctccttgcttgccgctgcagcagcagcagtttcagatgatcaagacctcctacactcgtctcggtttttcccgtatacctcctcacagatgtttcttgatcagttaagtgcaggaggcagtacttctctgccaaccaccaatggaagcagtagtggcagtaacagcagcctggtttcttccaacagcctaagggaaagccatagccacaccgtcacaaacaggagcagcacggacacggcatccatctttggcatcataccagacattatttcattggactgattcccaggccctgctgctcccatccccaccccagatcgaatgaacttggcagaaagaagagaactttgtgctctgttttaccttactctgtttagaaaagtatacaagcgtgttttttttcctttttttagggaaaaaattaaaagaaatgtacagagaacaaaactatattttcagttttacttttgtatataaatctaagactgcctgtgtgataaaacacttgtttaaaaaaaaaaaggaaagaaaagaaaaaagaaaaacaagcacccacaaaccaccttcagttcatttttttctggattctgaagatttttcattatttgtcctatggttttggttttatttgacttcgatggcattattttatttgcaataacagaaaaggaattgcatgtatgaagttttcaatcgtgggcttttctttgttgtggggagggggtcgggggatagtttgatttccattttctgaaaacgacagacttggattctgtttgtgtgtgcatattttatccagccttaagttataaagctcatctgtcccgctgcattccctgtgtattttcaggacatggctcgtgggtgtgtgtgttcattgtgtgcgtctgtatgtatttttctgtcatcactgttccctctcctcccgagtgtgcattcagttaatataatcagttgcttgcttctttcaaagtgctttgaaggtcttgaactcacgtgtgagcatctttatcaactatcccaattgcatgttctccatcacatattctcttatttgctctgtaccccctgagaatatgttttagagatattggaataaagctgtctgggtaaggagtaggcttagccgacctatgaataatacactttagtctagttctttattctaaatctggattgccagtattgtgtatttaaaccaagtctgtgaatacctgctttttttggccacagagtaacaagttttcatgtaagatcttcataccaaagtaggaagtaaaaatagcttagaaagctctgtcaggtgttttgtgcagctgacagaggtaatgttacatcacctaaaaaagaaagatacacggtcagttatcctaaaaataaattgtttggaaagtacaatgcaccacatttttgtagaagtctactatttgataaacagttgaaattcaagatgtgtttgacccttagtcatttttactctttggttctgagtatacctattttcttagcgtatctgccttgtttatctttttcttcaccttttaacaagtatgacataggaaagtcatttttttttagaattcatggatcagtctgatctactcttattcataatggaacatgtaaatatactgaaaactgtttttcaggagagaaatatgagttggagggaaggaaaagtggttctactaatgttccaaaatcctcatcagagaaggtatgatgttctcaggtgtggaaaatattttttagttgattgagaatgcaggtttaacagaagagataaggggcataatgactgctggttttccagactggattttcctaccgcaactattaatgttctcagagttgatgaggaccacctttgtgtatacacttgtagttttaaaccttgcattggtaacaaaatgatcaactttaatccaggtagaattcaagatggctgtacttcagttgtatgataaaattaatggttctcatgacttgtgtggcatctaaaaataatgtttttatagcatctctctgccactaaattgttgacttgaattttgggaaaaaaaaaagttggtgttgatatgtatatgtgtgtgtgtatatatgtatttataaacaagtgtgtttgagtaacaagtgagtttcatagtcttcccctacgcatgtgtattccacacacaaatggctgagttatagtcataaaacaatttgcaataaaaaaaaaaccaaaacagattgtcagttaaccaggaaacagttaatgttttttaatgaatctggcattatagtgagcaaatgtcgtattaatttaggctaatttctaatactaccataatttgtgtctaaatttctgttggggtagaaattactaaaattgtggggagttttttctgatttttacattgctttaggaaacatttttactaattcagctgtcttaggtaaaatgaatagttttcttcctgtttttttatgtgtcattgttagtggtctcagaattctgatcagtaactttgtgtatgatgctgaattacaaaccgtttgaatgatccagttgaaaacgtatccctctactttcttcagttgtagaaaaggttaatttccctcagtgtcccacattataccaacctaagagaagaacaggtaatagggagaaataaacatacggtggtttcagtggttttggtcatgtgtccacaggagaaactaaccattcagttgtcttaattttagttcgttctaccctgtgaggagtttgtttccatcagttgttgactttccaaaatgttgcattaagtaatagttgtcactctgttggtctcatggtcaatatcaatcagactttcatgatctctactaattattagtagagtcctgtactatgtctgtaactactaagtttaaagaaaagcacatagtcacttcatctctttttttcttagcctacgctcactccccaacccatcccaacattgacatgctatctgtggacaaatagcagttctcagaatctagtcaagttgccatcatcccccttgccttggccgttcatagtaggtatgcatatgtttgtttctgtacagtactgtgtgtgtgtgtgtatatatatatacatctgtatgcacacatctttgataaaatagctatttgactagcagggttaaagtggcttttaattacttcgtgagtgttattggatacatcttaaaaaaaaaaaatctgaaccagaaccatgccatacttggttgactattttgagcattaaaattgctttactaattatttagacatgatcacaattctgtatctttactgaggaaagattcacgtaagctctgaaaaatcggattctttggcagattttcctttgagtcaagtgtctgaaatggagtgaaaatatatcctaactaaattaatgtggaaagagcatttttttagacaatttcaattttaaacacataaaactttcaagatcttcaggactttttaaagcacatttgaaattattttagtaagaattttgttttatcaatagatgttgaattctgttttttaattaaatacaaagcttagatttcagaaagagagggaaaatagctggtggtcccagagtgtgctgctgttaattgtttaacaaaggggaaaatgtacataaacagataaagttaccataaattccatgaacttaaatctgtgattcattgccttaaaactttctctcttagaatttccataccgcatgccaaaccagtaaaatggcttttaaaaatgtatagtagacaatgtcagtttgtataaaagtaccaagtgaaaatatttattacatgcattggaaaaaaattgtttacctattgaatgttacctgtttatgtagagctctttagatgtaataaaagaaaagccttca

SEQ ID NO: 350629 - DNA, 1650 bp, Homo sapiens
ggcggaggccagaggcgggctgggaaggtggaggggcgggccggggcggggccaggccggctagaggggcgggtctagcggcggcccccggcgaagttcactgcgcttgcgctgacagacgcaagatggcggacagtgcggaactaaagcaaatggttatgagccttagagtttctgaactccaagtactgttgggctacgccgggagaaacaagcacggacgcaaacacgaacttctcacaaaagccctgcatttgctaaaggctggctgtagtcctgctgtgcaaatgaaaattaaggaactctataggcggcggttcccacagaaaatcatgacgcctgcagacttgtccatccccaacgtacattcaagtcctatgccagcaactttgtctccatctaccattccacaactcacttacgatggtcaccctgcatcatcgccattactccctgtttctcttctgggacctaaacatgaactggaactcccacatcttacatcagctcttcacccagtccatccggatataaaacttcaaaaattaccattttatgatttactggatgaactgataaaacccaccagtctagcatcagacaacagtcagcgctttcgagaaacctgttttgcatttgccttgacaccacaacaagtgcagcaaatcagtagttccatggatatttctgggaccaaatgtgacttcacagtacaggtccagttaaggttttgtttatcagaaaccagttgtccacaagaagatcacttcccacccaatctttgtgtgaaagtgaatacaaaaccttgcagccttccaggttaccttccacctacaaaaaatggcgtggaaccaaagcgacccagccgaccaattaatatcacctcacttgtccgactgtccacaacagtaccaaacacgattgttgtttcttggactgcagaaattggaagaaactattccatggcagtatatcttgtaaaacagttgtcctcaacagttcttcttcagaggttacgagcaaagggaataaggaatccggatcattctagagctttaattaaagagaagttgactgcggatccagacagtgaaatagctacaaccagcctaagggtttctctactatgtccacttggtaaaatgcggctgacaattccgtgtcgggcccttacatgttctcatctacaatgttttgacgcaactctttacattcagatgaatgagaaaaaaccaacctgggtttgtcctgtctgtgataagaaggctccatatgaacaccttattattgatggcttgtttatggaaatcctaaagtactgtacagactgtgatgaaatacaatttaaggaggatggcacttgggcaccgatgagatcaaaaaaggaagtacaggaagtttctgcctcttacaatggagtcgatggatgcttgagctccacattggagcatcaggtagcgtctcaccaccagtcctcaaataaaaacaagaaagtagaagtgattgacctaaccatagacagttcatctgatgaagaggaagaagagccatctgccaagaggaccgccgcaggggtttgtccctagtcacgacgattataatacaaccgatctgatgtcattgcacgatacgagctagtctgcctgtatc

SEQ ID NO: 350630 - DNA, 3492 bp, Homo sapiens
ttagcgtggtcgcggccgaggtacagagaacaaaactatattttcagttttacttttgtatataaatctaagactgcctgtgtgataaaacacttgtttaaaaaaaaaaaggaaagaaaagaaaaaagaaaaacaagcacccacaaaccaccttcagttcatttttttctggattctgaagatttttcattatttgtcctatggttttggttttatttgacttcgatggcattattttatttgcaataacagaaaaggaattgcatgtatgaagttttcaatcgtgggcttttctttgttgtggggagggggtcgggggatagtttgatttccattttctgaaaacgacagacttggattctgtttgtgtgtgcatattttatccagccttaagttataaagctcatctgtcccgctgcattccctgtgtattttcaggacatggctcgtgggtgtgtgtgttcattgtgtgcgtctgtatgtatttttctgtcatcactgttccctctcctcccgagtgtgcattcagttaatataatcagttgcttgcttctttcaaagtgctttgaaggtcttgaactcacgtgtgagcatctttatcaactatcccaattgcatgttctccatcacatattctcttatttgctctgtaccccctgagaatatgttttagagatattggaataaagctgtctgggtaaggagtaggcttagccgacctatgaataatacactttagtctagttctttattctaaatctggattgccagtattgtgtatttaaaccaagtctgtgaatacctgctttttttggccacagagtaacaagttttcatgtaagatcttcataccaaagtaggaagtaaaaatagcttagaaagctctgtcaggtgttttgtgcagctgacagaggtaatgttacatcacctaaaaaagaaagatacacggtcagttatcctaaaaataaattgtttggaaagtacaatgcaccacatttttgtagaagtctactatttgataaacagttgaaattcaagatgtgtttgacccttagtcatttttactctttggttctgagtatacctattttcttagcgtatctgccttgtttatctttttcttcaccttttaacaagtatgacataggaaagtcatttttttttagaattcatggatcagtctgatctactcttattcataatggaacatgtaaatatactgaaaactgtttttcaggagagaaatatgagttggagggaaggaaaagtggttctactaatgttccaaaatcctcatcagagaaggtatgatgttctcaggtgtggaaaatattttttagttgattgagaatgcaggtttaacagaagagataaggggcataatgactgctggttttccagactggattttcctaccgcaactattaatgttctcagagttgatgaggaccacctttgtgtatacacttgtagttttaaaccttgcattggtaacaaaatgatcaactttaatccaggtagaattcaagatggctgtacttcagttgtatgataaaattaatggttctcatgacttgtgtggcatctaaaaataatgtttttatagcatctctctgccactaaattgttgacttgaattttgggaaaaaaaaaagttggtgttgatatgtatatgtgtgtgtgtatatatgtatttataaacaagtgtgtttgagtaacaagtgagtttcatagtcttcccctacgcatgtgtattccacacacaaatggctgagttatagtcataaaacaatttgcaataaaaaaaaaaccaaaacagattgtcagttaaccaggaaacagttaatgttttttaatgaatctggcattatagtgagcaaatgtcgtattaatttaggctaatttctaatactaccataatttgtgtctaaatttctgttggggtagaaattactaaaattgtggggagttttttctgatttttacattgctttaggaaacatttttactaattcagctgtcttaggtaaaatgaatagttttcttcctgtttttttatgtgtcattgttagtggtctcagaattctgatcagtaactttgtgtatgatgctgaattacaaaccgtttgaatgatccagttgaaaacgtatccctctactttcttcagttgtagaaaaggttaatttccctcagtgtcccacattataccaacctaagagaagaacaggtaatagggagaaataaacatacggtggtttcagtggttttggtcatgtgtccacaggagaaactaaccattcagttgtcttaattttagttcgttctaccctgtgaggagtttgtttccatcagttgttgactttccaaaatgttgcattaagtaatagttgtcactctgttggtctcatggtcaatatcaatcagactttcatgatctctactaattattagtagagtcctgtactatgtctgtaactactaagtttaaagaaaagcacatagtcacttcatctctttttttcttagcctacgctcactccccaacccatcccaacattgacatgctatctgtggacaaatagcagttctcagaatctagtcaagttgccatcatcccccttgccttggccgttcatagtaggtatgcatatgtttgtttctgtacagtactgtgtgtgtgtgtgtatatatatatacatctgtatgcacacatctttgataaaatagctatttgactagcagggttaaagtggcttttaattacttcgtgagtgttattggatacatcttaaaaaaaaaaaatctgaaccagaaccatgccatacttggttgactattttgagcattaaaattgctttactaattatttagacatgatcacaattctgtatctttactgaggaaagattcacgtaagctctgaaaaatcggattctttggcagattttcctttgagtcaagtgtctgaaatggagtgaaaatatatcctaactaaattaatgtggaaagagcatttttttagacaatttcaattttaaacacataaaactttcaagatcttcaggactttttaaagcacatttgaaattattttagtaagaattttgttttatcaatagatgttgaattctgttttttaattaaatacaaagcttagatttcagaaagagagggaaaatagctggtggtcccagagtgtgctgctgttaattgtttaacaaaggggaaaatgtacataaacagataaagttaccataaattccatgaacttaaatctgtgattcattgccttaaaactttctctcttagaatttccataccgcatgccaaaccagtaaaatggcttttaaaaatgtatagtagacaatgtcagtttgtataaaagtaccaagtgaaaatatttattacatgcattggaaaaaaattgtttacctattgaatgttacctgtttatgtagagctctttagatgtaataaaagaaaagccttca

SEQ ID NO: 350631 - DNA, 3490 bp, Homo sapiens
taaacaagtgttttatcacacaggcagtcttagatttatatacaaaagtaaaactgaaaatatagttttgttctctgtacatttcttttaattttttccctaaaaaaaggaaagaaaagaaaaaagaaaaacaagcacccacaaaccaccttcagttcatttttttctggattctgaagatttttcattatttgtcctatggttttggttttatttgacttcgatggcattattttatttgcaataacagaaaaggaattgcatgtatgaagttttcaatcgtgggcttttctttgttgtggggagggggtcgggggatagtttgatttccattttctgaaaacgacagacttggattctgtttgtgtgtgcatattttatccagccttaagttataaagctcatctgtcccgctgcattccctgtgtattttcaggacatggctcgtgggtgtgtgtgttcattgtgtgcgtctgtatgtatttttctgtcatcactgttccctctcctcccgagtgtgcattcagttaatataatcagttgcttgcttctttcaaagtgctttgaaggtcttgaactcacgtgtgagcatctttatcaactatcccaattgcatgttctccatcacatattctcttatttgctctgtaccccctgagaatatgttttagagatattggaataaagctgtctgggtaaggagtaggcttagccgacctatgaataatacactttagtctagttctttattctaaatctggattgccagtattgtgtatttaaaccaagtctgtgaatacctgctttttttggccacagagtaacaagttttcatgtaagatcttcataccaaagtaggaagtaaaaatagcttagaaagctctgtcaggtgttttgtgcagctgacagaggtaatgttacatcacctaaaaaagaaagatacacggtcagttatcctaaaaataaattgtttggaaagtacaatgcaccacatttttgtagaagtctactatttgataaacagttgaaattcaagatgtgtttgacccttagtcatttttactctttggttctgagtatacctattttcttagcgtatctgccttgtttatctttttcttcaccttttaacaagtatgacataggaaagtcatttttttttagaattcatggatcagtctgatctactcttattcataatggaacatgtaaatatactgaaaactgtttttcaggagagaaatatgagttggagggaaggaaaagtggttctactaatgttccaaaatcctcatcagagaaggtatgatgttctcaggtgtggaaaatattttttagttgattgagaatgcaggtttaacagaagagataaggggcataatgactgctggttttccagactggattttcctaccgcaactattaatgttctcagagttgatgaggaccacctttgtgtatacacttgtagttttaaaccttgcattggtaacaaaatgatcaactttaatccaggtagaattcaagatggctgtacttcagttgtatgataaaattaatggttctcatgacttgtgtggcatctaaaaataatgtttttatagcatctctctgccactaaattgttgacttgaattttgggaaaaaaaaaagttggtgttgatatgtatatgtgtgtgtgtatatatgtatttataaacaagtgtgtttgagtaacaagtgagtttcatagtcttcccctacgcatgtgtattccacacacaaatggctgagttatagtcataaaacaatttgcaataaaaaaaaaaccaaaacagattgtcagttaaccaggaaacagttaatgttttttaatgaatctggcattatagtgagcaaatgtcgtattaatttaggctaatttctaatactaccataatttgtgtctaaatttctgttggggtagaaattactaaaattgtggggagttttttctgatttttacattgctttaggaaacatttttactaattcagctgtcttaggtaaaatgaatagttttcttcctgtttttttatgtgtcattgttagtggtctcagaattctgatcagtaactttgtgtatgatgctgaattacaaaccgtttgaatgatccagttgaaaacgtatccctctactttcttcagttgtagaaaaggttaatttccctcagtgtcccacattataccaacctaagagaagaacaggtaatagggagaaataaacatacggtggtttcagtggttttggtcatgtgtccacaggagaaactaaccattcagttgtcttaattttagttcgttctaccctgtgaggagtttgtttccatcagttgttgactttccaaaatgttgcattaagtaatagttgtcactctgttggtctcatggtcaatatcaatcagactttcatgatctctactaattattagtagagtcctgtactatgtctgtaactactaagtttaaagaaaagcacatagtcacttcatctctttttttcttagcctacgctcactccccaacccatcccaacattgacatgctatctgtggacaaatagcagttctcagaatctagtcaagttgccatcatcccccttgccttggccgttcatagtaggtatgcatatgtttgtttctgtacagtactgtgtgtgtgtgtgtatatatatatacatctgtatgcacacatctttgataaaatagctatttgactagcagggttaaagtggcttttaattacttcgtgagtgttattggatacatcttaaaaaaaaaaaatctgaaccagaaccatgccatacttggttgactattttgagcattaaaattgctttactaattatttagacatgatcacaattctgtatctttactgaggaaagattcacgtaagctctgaaaaatcggattctttggcagattttcctttgagtcaagtgtctgaaatggagtgaaaatatatcctaactaaattaatgtggaaagagcatttttttagacaatttcaattttaaacacataaaactttcaagatcttcaggactttttaaagcacatttgaaattattttagtaagaattttgttttatcaatagatgttgaattctgttttttaattaaatacaaagcttagatttcagaaagagagggaaaatagctggtggtcccagagtgtgctgctgttaattgtttaacaaaggggaaaatgtacataaacagataaagttaccataaattccatgaacttaaatctgtgattcattgccttaaaactttctctcttagaatttccataccgcatgccaaaccagtaaaatggcttttaaaaatgtatagtagacaatgtcagtttgtataaaagtaccaagtgaaaatatttattacatgcattggaaaaaaattgtttacctattgaatgttacctgtttatgtagagctctttagatgtaataaaagaaaagccttca

SEQ ID NO: 350632 - DNA, 3265 bp, Homo sapiens
cccacgcgtccgcggacgcgtggggaaaaggaattgcatgtatgaagttttcaatcgtgggcttttctttgttgtggggagggggtcgggggatagtttgatttccattttctgaaaacgacagacttggattctgtttgtgtgtgcatattttatccagccttaagttataaagctcatctgtcccgctgcattccctgtgtattttcaggacatggctcgtgggtgtgtgtgttcattgtgtgcgtctgtatgtatttttctgtcatcactgttccctctcctcccgagtgtgcattcagttaatataatcagttgcttgcttctttcaaagtgctttgaaggtcttgaactcacgtgtgagcatctttatcaactatcccaattgcatgttctccatcacatattctcttatttgctctgtaccccctgagaatatgttttagagatattggaataaagctgtctgggtaaggagtaggcttagccgacctatgaataatacactttagtctagttctttattctaaatctggattgccagtattgtgtatttaaaccaagtctgtgaatacctgctttttttggccacagagtaacaagttttcatgtaagatcttcataccaaagtaggaagtaaaaatagcttagaaagctctgtcaggtgttttgtgcagctgacagaggtaatgttacatcacctaaaaaagaaagatacacggtcagttatcctaaaaataaattgtttggaaagtacaatgcaccacatttttgtagaagtctactatttgataaacagttgaaattcaagatgtgtttgacccttagtcatttttactctttggttctgagtatacctattttcttagcgtatctgccttgtttatctttttcttcaccttttaacaagtatgacataggaaagtcatttttttttagaattcatggatcagtctgatctactcttattcataatggaacatgtaaatatactgaaaactgtttttcaggagagaaatatgagttggagggaaggaaaagtggttctactaatgttccaaaatcctcatcagagaaggtatgatgttctcaggtgtggaaaatattttttagttgattgagaatgcaggtttaacagaagagataaggggcataatgactgctggttttccagactggattttcctaccgcaactattaatgttctcagagttgatgaggaccacctttgtgtatacacttgtagttttaaaccttgcattggtaacaaaatgatcaactttaatccaggtagaattcaagatggctgtacttcagttgtatgataaaattaatggttctcatgacttgtgtggcatctaaaaataatgtttttatagcatctctctgccactaaattgttgacttgaattttgggaaaaaaaaaagttggtgttgatatgtatatgtgtgtgtgtatatatgtatttataaacaagtgtgtttgagtaacaagtgagtttcatagtcttcccctacgcatgtgtattccacacacaaatggctgagttatagtcataaaacaatttgcaataaaaaaaaaaccaaaacagattgtcagttaaccaggaaacagttaatgttttttaatgaatctggcattatagtgagcaaatgtcgtattaatttaggctaatttctaatactaccataatttgtgtctaaatttctgttggggtagaaattactaaaattgtggggagttttttctgatttttacattgctttaggaaacatttttactaattcagctgtcttaggtaaaatgaatagttttcttcctgtttttttatgtgtcattgttagtggtctcagaattctgatcagtaactttgtgtatgatgctgaattacaaaccgtttgaatgatccagttgaaaacgtatccctctactttcttcagttgtagaaaaggttaatttccctcagtgtcccacattataccaacctaagagaagaacaggtaatagggagaaataaacatacggtggtttcagtggttttggtcatgtgtccacaggagaaactaaccattcagttgtcttaattttagttcgttctaccctgtgaggagtttgtttccatcagttgttgactttccaaaatgttgcattaagtaatagttgtcactctgttggtctcatggtcaatatcaatcagactttcatgatctctactaattattagtagagtcctgtactatgtctgtaactactaagtttaaagaaaagcacatagtcacttcatctctttttttcttagcctacgctcactccccaacccatcccaacattgacatgctatctgtggacaaatagcagttctcagaatctagtcaagttgccatcatcccccttgccttggccgttcatagtaggtatgcatatgtttgtttctgtacagtactgtgtgtgtgtgtgtatatatatatacatctgtatgcacacatctttgataaaatagctatttgactagcagggttaaagtggcttttaattacttcgtgagtgttattggatacatcttaaaaaaaaaaaatctgaaccagaaccatgccatacttggttgactattttgagcattaaaattgctttactaattatttagacatgatcacaattctgtatctttactgaggaaagattcacgtaagctctgaaaaatcggattctttggcagattttcctttgagtcaagtgtctgaaatggagtgaaaatatatcctaactaaattaatgtggaaagagcatttttttagacaatttcaattttaaacacataaaactttcaagatcttcaggactttttaaagcacatttgaaattattttagtaagaattttgttttatcaatagatgttgaattctgttttttaattaaatacaaagcttagatttcagaaagagagggaaaatagctggtggtcccagagtgtgctgctgttaattgtttaacaaaggggaaaatgtacataaacagataaagttaccataaattccatgaacttaaatctgtgattcattgccttaaaactttctctcttagaatttccataccgcatgccaaaccagtaaaatggcttttaaaaatgtatagtagacaatgtcagtttgtataaaagtaccaagtgaaaatatttattacatgcattggaaaaaaattgtttacctattgaatgttacctgtttatgtagagctctttagatgtaataaaagaaaagccttca

SEQ ID NO: 350633 - DNA, 1325 bp, Homo sapiens
ggcggaggccagaggcgggctgggaaggtggaggggcgggccggggcggggccaggccggctagaggggcgggtctagcggcggcccccggcgaagttcactgcgcttgcgctgacagacgcaagatggcggacagtgcggaactaaagcaaatggttatgagccttagagtttctgaactccaagtactgttgggctacgccgggagaaacaagcacggacgcaaacacgaacttctcacaaaagccctgcatttgctaaaggctggctgtagtcctgctgtgcaaatgaaaattaaggaactctataggcggcggttcccacagaaaatcatgacgcctgcagacttgtccatccccaacgtacattcaagtcctatgccagcaactttgtctccatctaccattccacaactcacttacgatggtcaccctgcatcatcgccattactccctgtttctcttctgggacctaaacatgaactggaactcccacatcttacatcagctcttcacccagtccatccggatataaaacttcaaaaattaccattttatgatttactggatgaactgataaaacccaccagtctagcatcagacaacagtcagcgctttcgagaaacctgttttgcatttgccttgacaccacaacaagtgcagcaaatcagtagttccatggatatttctgggaccaaatgtgacttcacagtacaggtccagttaaggttttgtttatcagaaaccagttgtccacaagaagatcacttcccacccaatctttgtgtgaaagtgaatacaaaaccttgcagccttccaggttaccttccacctacaaaaaatggcgtggaaccaaagcgacccagccgaccaattaatatcacctcacttgtccgactgtccacaacagtaccaaacacgattgttgtttcttggactgcagaaattggaagaaactattccatggcagtatatcttgtaaaacagttgtcctcaacagttcttcttcagaggttacgagcaaagggaataaggaatccggatcattctagagctttaagtacgtatgataaacttatttcacttattcagctattttgttaaaggttagagtagtattttctcaactcaagaaattttagaatttgtttattcactggagcctgttgtgtagttcttagagtagttctgatatctttgtcatgagctatattttataatctatattttactaatcttaaaattaactttgtgaagtcagtgcacaaacatggaagaatattattctacaacttcataaaatcaatgtttaaggaattctgggaa

SEQ ID NO: 350634 - DNA, 774 bp, Homo sapiens
gtgtttgagatggactgtttgttgtttcatatatacttataattcttccccaagaaaacaaaatattcttgagagcacatcattacgttttgccatctacatagcactcgacattctcctggagactcagtaagtgcttgataaatacctgacagtttcatcaaaacagtggaataaagtgaggtgtggttttccctggtgtatactttatcctatatttcttataaccaagggtagaagtcaatgaatttatgaatattaattttaaatttctttggttacttaacgttaaatgattaaatttgaagtttgaaataataggattataagtgagctggcctttatttgcttaagtaaaccataagaagggggttataataaagtgtcatttaatagtgtaaattatattattggaatactaatgttttacattttgttttttctctaagcaaatggttatgagccttagagtttctgaactccaagtactgttgggctacgccgggagaaacaagcacggacgcaaacacgaacttctcacaaaagccctgcatttgctaaaggctggctgtagtcctgctgtgcaaatgaaaattaaggaactctataggcggcggttcccacagaaaatcatgacgcctgcagacttgtccatccccaacgtacattcaagtcctatgccagcaactttgtctccatctaccattccacaactcacttacgatggtcaccctgcatcatcgccattactccctgtttctcttctgggaccta

SEQ ID NO: 350635 - DNA, 361 bp, Homo sapiens
aaagctgatctgtgagctgtggattttagtaaataacccttgttgtagactttccatagtcattttgtttgatagccaaagaaatactgtcattttttaacctatggatatttcacaggaaatgtgtttaatgttcttctacattgatgaaaagtcaacactgtatgctttaaatcagcatgcctacctgttgtgttctaggaaatttttgtcaaagcttaaatgttgaatagcaattatctaatatttactttttctccctttttaaagcttggtaaaatgcggctgacaattccgtgtcgggcccttacatgttctcatctacaatgttttgacgcaactctttacattcagatgaatg

SEQ ID NO: 350636 - DNA, 644 bp, Homo sapiens
catgcttaaccaaataattggcagtatcacgaagacaactacagggtgatagtcatgattaccaactctacattgacagaattatttattttaaacctatttacatatacttattaatagggtgaaaggtccagtttttatagttttcccttttggttgtttttaaatttaccatcttttaaatttatctatttaacaataatactaatgaagtcatcctttaataaaggaaatttaacttgtcctttattgtttaggttttgtttatcagaaaccagttgtccacaagaagatcacttcccacccaatctttgtgtgaaagtgaatacaaaaccttgcagccttccagtaagtcctaagagctgttttttaaaattcattgccaacataactatcaaataagtcatcacaactgttgttaaatcatagtttttccttaagaaaacatttttattttggatatatattcattgactgggtgaaacacttgtaccaactatgtacagttagcagcagtgacattagctttggggacataggatttggagttgggtatggtagctttagtgttgtactggattttggggcgaagttttttcaacaaaatctcagctgtgttcatgtgagtctataagcctatggta

SEQ ID NO: 350637 - DNA, 316 bp, Homo sapiens
ccactgttggttttctactctctggctccaacaatattgtgaatctaaactgtaactgataaactgtagtgacactgagaaaagagagatgtcatagctcttcccttgccttgtattttaatcattcccatataggatgcttgagctccacattggagcatcaggtagcgtctcaccaccagtcctcaaataaaaacaagaaagtagaagtgattgacctaaccatagacagttcatctgatgaagaggaagaagagccatctgccaagaggacctgtccttccctatctcccacatcaccactaaataataaagg

SEQ ID NO: 350638 - DNA, 540 bp, Homo sapiens
gctcaactcttcatgtttaaataaaattctgagtgacatagcatataagacttgtatttgtttttgaagtattggggcatttggaagagtttttccttcttttttttttaaactgaaataattttttcttccacaggattagatttctttcctttcttatcaggagacaatcaggtatgttatgaaaaatttactattattttaattgtacattaaaaatacagtcatgcgccacataatgacattttggtcaatgacaggccatatatgcattccataagattataatggagctgaaaaatccctacatcaattatagccatggtaacattgtagcacaaggcattactcacatgtttgtggtgttgctggtgtgaacaaacctatgctgtcagtcatgtaaaagtatcacacgtataattatgtacaatataacgataataaacaactctgttactggtttatgcatttactatattttttattgttattttagagtgtacctctactttttttttttttaagtttgctgtaaaacag

SEQ ID NO: 350639 - DNA, 872 bp, Homo sapiens
  misc_feature (780)..(780): n is a, c, g, or t
  misc_feature (850)..(850): n is a, c, g, or t
ggcggaggccagaggcgggctgggaaggtggaggggcgggccggggcggggccaggccggctagaggggcgggtctagcggcggcccccggcgaagttcactgcgcttgcgctgacagacgcaagatggcggacagtgcggaactaaagcaaatggttatgagccttagagtttctgaactccaagtactgttgggctacgccgggagaaacaagcacggacgcaaacacgaacttctcacaaaagccctgcatttgctaaaggctggctgtagtcctgctgtgcaaatgaaaattaaggaactctataggcggcggttcccacagaaaatcatgacgcctgcagacttgtccatccccaacgtacattcaagtcctatgccagcaactttgtctccatctaccattccacaactcacttacgatggtcaccctgcatcatcgccattactccctgtttctcttctgggacctaaacatgaactggaactcccacatcttacatcagctcttcacccagtccatccggatataaaacttcaaaaattaccattttatgatttactggatgaactgataaaacccaccagtctagcagaaattatctgaatacacgaagattataggagtcattttcaaacaaccatcagacaacagtcagcgctttcgagaaacctgttttgcatttgccttgacaccacaacaagtgcagcaaatcagtagttccatggatatttctgggaccaaatgtgacttcacagtacaggtccagttaagttgntatcagaaacacgtgtcacaggaggacaacttccacccaatctttgtgtggtgaatcaataccctgcagnctttcaaggtaactttcacttc

SEQ ID NO: 350640 - DNA, 5703 bp, Homo sapiens
ggcggaggccagaggcgggctgggaaggtggaggggcgggccggggcggggccaggccggctagaggggcgggtctagcggcggcccccggcgaagttcactgcgcttgcgctgacagacgcaagatggcggacagtgcggaactaaagcaaatggttatgagccttagagtttctgaactccaagtactgttgggctacgccgggagaaacaagcacggacgcaaacacgaacttctcacaaaagccctgcatttgctaaaggctggctgtagtcctgctgtgcaaatgaaaattaaggaactctataggcggcggttcccacagaaaatcatgacgcctgcagacttgtccatccccaacgtacattcaagtcctatgccagcaactttgtctccatctaccattccacaactcacttacgatggtcaccctgcatcatcgccattactccctgtttctcttctgggacctaaacatgaactggaactcccacatcttacatcagctcttcacccagtccatccggatataaaacttcaaaaattaccattttatgatttactggatgaactgataaaacccaccagtctagcatcagacaacagtcagcgctttcgagaaacctgttttgcatttgccttgacaccacaacaagtgcagcaaatcagtagttccatggatatttctgggaccaaatgtgacttcacagtacaggtccagttaaggttttgtttatcagaaaccagttgtccacaagaagatcacttcccacccaatctttgtgtgaaagtgaatacaaaaccttgcagccttccaggttaccttccacctacaaaaaatggcgtggaaccaaagcgacccagccgaccaattaatatcacctcacttgtccgactgtccacaacagtaccaaacacgattgttgtttcttggactgcagaaattggaagaaactattccatggcagtatatcttgtaaaacagttgtcctcaacagttcttcttcagaggttacgagcaaagggaataaggaatccggatcattctagagctttaattaaagagaagttgactgcggatccagacagtgaaatagctacaaccagcctaagggtttctctactatgtccacttggtaaaatgcggctgacaattccgtgtcgggcccttacatgttctcatctacaatgttttgacgcaactctttacattcagatgaatgagaaaaaaccaacctgggtttgtcctgtctgtgataagaaggctccatatgaacaccttattattgatggcttgtttatggaaatcctaaagtactgtacagactgtgatgaaatacaatttaaggaggatggcacttgggcaccgatgagatcaaaaaaggaagtacaggaagtttctgcctcttacaatggagtcgatggatgcttgagctccacattggagcatcaggtagcgtctcaccaccagtcctcaaataaaaacaagaaagtagaagtgattgacctaaccatagacagttcatctgatgaagaggaagaagagccatctgccaagaggacctgtccttccctatctcccacatcaccactaaataataaaggcattttaagtcttccacatcaagcatctccagtatcccgcaccccaagccttcctgctgtagacacaagctacattaatacctccctcatccaagactataggcatcctttccacatgacacccatgccttacgacttacaaggattagatttctttcctttcttatcaggagacaatcagcattacaacacctccttgcttgccgctgcagcagcagcagtttcagatgatcaagacctcctacactcgtctcggtttttcccgtatacctcctcacagatgtttcttgatcagttaagtgcaggaggcagtacttctctgccaaccaccaatggaagcagtagtggcagtaacagcagcctggtttcttccaacagcctaagggaaagccatagccacaccgtcacaaacaggagcagcacggacacggcatccatctttggcatcataccagacattatttcattggactgattcccaggccctgctgctcccatccccaccccagatcgaatgaacttggcagaaagaagagaactttgtgctctgttttaccttactctgtttagaaaagtatacaagcgtgttttttttcctttttttagggaaaaaattaaaagaaatgtacagagaacaaaactatattttcagttttacttttgtatataaatctaagactgcctgtgtgataaaacacttgtttaaaaaaaaaaaggaaagaaaagaaaaaagaaaaacaagcacccacaaaccaccttcagttcatttttttctggattctgaagatttttcattatttgtcctatggttttggttttatttgacttcgatggcattattttatttgcaataacagaaaaggaattgcatgtatgaagttttcaatcgtgggcttttctttgttgtggggagggggtcgggggatagtttgatttccattttctgaaaacgacagacttggattctgtttgtgtgtgcatattttatccagccttaagttataaagctcatctgtcccgctgcattccctgtgtattttcaggacatggctcgtgggtgtgtgtgttcattgtgtgcgtctgtatgtatttttctgtcatcactgttccctctcctcccgagtgtgcattcagttaatataatcagttgcttgcttctttcaaagtgctttgaaggtcttgaactcacgtgtgagcatctttatcaactatcccaattgcatgttctccatcacatattctcttatttgctctgtaccccctgagaatatgttttagagatattggaataaagctgtctgggtaaggagtaggcttagccgacctatgaataatacactttagtctagttctttattctaaatctggattgccagtattgtgtatttaaaccaagtctgtgaatacctgctttttttggccacagagtaacaagttttcatgtaagatcttcataccaaagtaggaagtaaaaatagcttagaaagctctgtcaggtgttttgtgcagctgacagaggtaatgttacatcacctaaaaaagaaagatacacggtcagttatcctaaaaataaattgtttggaaagtacaatgcaccacatttttgtagaagtctactatttgataaacagttgaaattcaagatgtgtttgacccttagtcatttttactctttggttctgagtatacctattttcttagcgtatctgccttgtttatctttttcttcaccttttaacaagtatgacataggaaagtcatttttttttagaattcatggatcagtctgatctactcttattcataatggaacatgtaaatatactgaaaactgtttttcaggagagaaatatgagttggagggaaggaaaagtggttctactaatgttccaaaatcctcatcagagaaggtatgatgttctcaggtgtggaaaatattttttagttgattgagaatgcaggtttaacagaagagataaggggcataatgactgctggttttccagactggattttcctaccgcaactattaatgttctcagagttgatgaggaccacctttgtgtatacacttgtagttttaaaccttgcattggtaacaaaatgatcaactttaatccaggtagaattcaagatggctgtacttcagttgtatgataaaattaatggttctcatgacttgtgtggcatctaaaaataatgtttttatagcatctctctgccactaaattgttgacttgaattttgggaaaaaaaaaagttggtgttgatatgtatatgtgtgtgtgtatatatgtatttataaacaagtgtgtttgagtaacaagtgagtttcatagtcttcccctacgcatgtgtattccacacacaaatggctgagttatagtcataaaacaatttgcaataaaaaaaaaaccaaaacagattgtcagttaaccaggaaacagttaatgttttttaatgaatctggcattatagtgagcaaatgtcgtattaatttaggctaatttctaatactaccataatttgtgtctaaatttctgttggggtagaaattactaaaattgtggggagttttttctgatttttacattgctttaggaaacatttttactaattcagctgtcttaggtaaaatgaatagttttcttcctgtttttttatgtgtcattgttagtggtctcagaattctgatcagtaactttgtgtatgatgctgaattacaaaccgtttgaatgatccagttgaaaacgtatccctctactttcttcagttgtagaaaaggttaatttccctcagtgtcccacattataccaacctaagagaagaacaggtaatagggagaaataaacatacggtggtttcagtggttttggtcatgtgtccacaggagaaactaaccattcagttgtcttaattttagttcgttctaccctgtgaggagtttgtttccatcagttgttgactttccaaaatgttgcattaagtaatagttgtcactctgttggtctcatggtcaatatcaatcagactttcatgatctctactaattattagtagagtcctgtactatgtctgtaactactaagtttaaagaaaagcacatagtcacttcatctctttttttcttagcctacgctcactccccaacccatcccaacattgacatgctatctgtggacaaatagcagttctcagaatctagtcaagttgccatcatcccccttgccttggccgttcatagtaggtatgcatatgtttgtttctgtacagtactgtgtgtgtgtgtgtatatatatatacatctgtatgcacacatctttgataaaatagctatttgactagcagggttaaagtggcttttaattacttcgtgagtgttattggatacatcttaaaaaaaaaaaatctgaaccagaaccatgccatacttggttgactattttgagcattaaaattgctttactaattatttagacatgatcacaattctgtatctttactgaggaaagattcacgtaagctctgaaaaatcggattctttggcagattttcctttgagtcaagtgtctgaaatggagtgaaaatatatcctaactaaattaatgtggaaagagcatttttttagacaatttcaattttaaacacataaaactttcaagatcttcaggactttttaaagcacatttgaaattattttagtaagaattttgttttatcaatagatgttgaattctgttttttaattaaatacaaagcttagatttcagaaagagagggaaaatagctggtggtcccagagtgtgctgctgttaattgtttaacaaaggggaaaatgtacataaacagataaagttaccataaattccatgaacttaaatctgtgattcattgccttaaaactttctctcttagaatttccataccgcatgccaaaccagtaaaatggcttttaaaaatgtatagtagacaatgtcagtttgtataaaagtaccaagtgaaaatatttattacatgcattggaaaaaaattgtttacctattgaatgttacctgtttatgtagagctctttagatgtaataaaagaaaagccttca

SEQ ID NO: 350641 - DNA, 4086 bp, Homo sapiens
ggcggaggccagaggcgggctgggaaggtggaggggcgggccggggcggggccaggccggctagaggggcgggtctagcggcggcccccggcgaagttcactgcgcttgcgctgacagacgcaagatggcggacagtgcggaactaaagcaaatggttatgagccttagagtttctgaactccaagtactgttgggctacgccgggagaaacaagcacggacgcaaacacgaacttctcacaaaagccctgcatttgctaaaggctggctgtagtcctgctgtgcaaatgaaaattaaggaactctataggcggcggttcccacagaaaatcatgacgcctgcagacttgtccatccccaacgtacattcaagtcctatgccagcaactttgtctccatctaccattccacaactcacttacgatggtcaccctgcatcatcgccattactccctgtttctcttctgggacctaaacatgaactggaactcccacatcttacatcagctcttcacccagtccatccggatataaaacttcaaaaattaccattttatgatttactggatgaactgataaaacccaccagtctagcatcagacaacagtcagcgctttcgagaaacctgttttgcatttgccttgacaccacaacaagtgcagcaaatcagtagttccatggatatttctgggaccaaatgtgacttcacagtacaggtccagttaaggttttgtttatcagaaaccagttgtccacaagaagatcacttcccacccaatctttgtgtgaaagtgaatacaaaaccttgcagccttccaggttaccttccacctacaaaaaatggcgtggaaccaaagcgacccagccgaccaattaatatcacctcacttgtccgactgtccacaacagtaccaaacacgattgttgtttcttggactgcagaaattggaagaaactattccatggcagtatatcttgtaaaacagttgtcctcaacagttcttcttcagaggttacgagcaaagggaataaggaatccggatcattctagagctttaattaaagagaagttgactgcggatccagacagtgaaatagctacaaccagcctaagggtttctctactatgtccacttggtaaaatgcggctgacaattccgtgtcgggcccttacatgttctcatctacaatgttttgacgcaactctttacattcagatgaatgagaaaaaaccaacctgggtttgtcctgtctgtgataagaaggctccatatgaacaccttattattgatggcttgtttatggaaatcctaaagtactgtacagactgtgatgaaatacaatttaaggaggatggcacttgggcaccgatgagatcaaaaaaggaagtacaggaagtttctgcctcttacaatggagtcgatggatgcttgagctccacattggagcatcaggtagcgtctcaccaccagtcctcaaataaaaacaagaaagtagaagtgattgacctaaccatagacagttcatctgatgaagaggaagaagagccatctgccaagaggacctgtccttccctatctcccacatcaccactaaataataaaggcattttaagtcttccacatcaagcatctccagtatcccgcaccccaagccttcctgctgtagacacaagctacattaatacctccctcatccaagactataggcatcctttccacatgacacccatgccttacgacttacaaggattagatttctttcctttcttatcaggagacaatcagcattacaacacctccttgcttgccgctgcagcagcagcagtttcagatgatcaagacctcctacactcgtctcggtttttcccgtatacctcctcacagatgtttcttgatcagttaagtgcaggaggcagtacttctctgccaaccaccaatggaagcagtagtggcagtaacagcagcctggtttcttccaacagcctaagggaaagccatagccacaccgtcacaaacaggagcagcacggacacggcatccatctttggcatcataccagacattatttcattggactgattcccaggccctgctgctcccatccccaccccagatcgaatgaacttggcagaaagaagagaactttgtgctctgttttaccttactctgtttagaaaagtatacaagcgtgttttttttcctttttttagggaaaaaattaaaagaaatgtacagagaacaaaactatattttcagttttacttttgtatataaatctaagactgcctgtgtgataaaacacttgtttaaaaaaaaaaaggaaagaaaagaaaaaagaaaaacaagcacccacaaaccaccttcagttcatttttttctggattctgaagatttttcattatttgtcctatggttttggttttatttgacttcgatggcattattttatttgcaataacagaaaaggaattgcatgtatgaagttttcaatcgtgggcttttctttgttgtggggagggggtcgggggatagtttgatttccattttctgaaaacgacagacttggattctgtttgtgtgtgcatattttatccagccttaagttataaagctcatctgtcccgctgcattccctgtgtattttcaggacatggctcgtgggtgtgtgtgttcattgtgtgcgtctgtatgtatttttctgtcatcactgttccctctcctcccgagtgtgcattcagttaatataatcagttgcttgcttctttcaaagtgctttgaaggtcttgaactcacgtgtgagcatctttatcaactatcccaattgcatgttctccatcacatattctcttatttgctctgtaccccctgagaatatgttttagagatattggaataaagctgtctgggtaaggagtaggcttagccgacctatgaataatacactttagtctagttctttattctaaatctggattgccagtattgtgtatttaaaccaagtctgtgaatacctgctttttttggccacagagtaacaagttttcatgtaagatcttcataccaaagtaggaagtaaaaatagcttagaaagctctgtcaggtgttttgtgcagctgacagaggtaatgttacatcacctaaaaaagaaagatacacggtcagttatcctaaaaataaattgtttggaaagtacaatgcaccacatttttgtagaagtctactatttgataaacagttgaaattcaagatgtgtttgacccttagtcatttttactctttggttctgagtatacctattttcttagcgtatctgccttgtttatctttttcttcaccttttaacaagtatgacataggaaagtcatttttttttagaattcatggatcagtctgatctactcttattcataatggaacatgtaaatatactgaaaactgtttttcaggagagaaatatgagttggagggaaggaaaagtggttctactaatgttccaaaatcctcatcagagaaggtatgatgttctcaggtgtggaaaatattttttagttgattgagaatgcaggtttaacagaagagataaggggcataatgactgctggttttccagactggattttcctaccgcaactattaatgttctcagagttgatgaggaccacctttgtgtatacacttgtagttttaaaccttgcattggtaacaaaatgatcaactttaatccaggtagaattcaagatggctgtacttcagttgtatgataaaattaatggttctcatgacttgtgtggcatctaaaaataatgtttttatagcatctctctgccactaaattgttgacttgaattttgggaaaaaaaaaagttggtgttgatatgtatatgtgtgtgtgtatatatgtatttataaacaccccatcctaaaaaaaaaaaaaaaaaaaaaactccggggctctctttgtcgcgggcggaccacggggtttttgatggccctggtcatagctggttccggacccagtttttggtccaggggaactgggcggcccaatagggcgatattcgaagcgtacgtttttttcacagca

SEQ ID NO: 350642 - DNA, 3282 bp, Homo sapiens
ggcggaggccagaggcgggctgggaaggtggaggggcgggccggggcggggccaggccggctagaggggcgggtctagcggcggcccccggcgaagttcactgcgcttgcgctgacagacgcaagatggcggacagtgcggaactaaagcaaatggttatgagccttagagtttctgaactccaagtactgttgggctacgccgggagaaacaagcacggacgcaaacacgaacttctcacaaaagccctgcatttgctaaaggctggctgtagtcctgctgtgcaaatgaaaattaaggaactctataggcggcggttcccacagaaaatcatgacgcctgcagacttgtccatccccaacgtacattcaagtcctatgccagcaactttgtctccatctaccattccacaactcacttacgatggtcaccctgcatcatcgccattactccctgtttctcttctgggacctaaacatgaactggaactcccacatcttacatcagctcttcacccagtccatccggatataaaacttcaaaaattaccattttatgatttactggatgaactgataaaacccaccagtctagcatcagacaacagtcagcgctttcgagaaacctgttttgcatttgccttgacaccacaacaagtgcagcaaatcagtagttccatggatatttctgggaccaaatgtgacttcacagtacaggtccagttaaggttttgtttatcagaaaccagttgtccacaagaagatcacttcccacccaatctttgtgtgaaagtgaatacaaaaccttgcagccttccaggttaccttccacctacaaaaaatggcgtggaaccaaagcgacccagccgaccaattaatatcacctcacttgtccgactgtccacaacagtaccaaacacgattgttgtttcttggactgcagaaattggaagaaactattccatggcagtatatcttgtaaaacagttgtcctcaacagttcttcttcagaggttacgagcaaagggaataaggaatccggatcattctagagctttaattaaagagaagttgactgcggatccagacagtgaaatagctacaaccagcctaagggtttctctactatgtccacttggtaaaatgcggctgacaattccgtgtcgggcccttacatgttctcatctacaatgttttgacgcaactctttacattcagatgaatgagaaaaaaccaacctgggtttgtcctgtctgtgataagaaggctccatatgaacaccttattattgatggcttgtttatggaaatcctaaagtactgtacagactgtgatgaaatacaatttaaggaggatggcacttgggcaccgatgagatcaaaaaaggaagtacaggaagtttctgcctcttacaatggagtcgatggatgcttgagctccacattggagcatcaggtagcgtctcaccaccagtcctcaaataaaaacaagaaagtagaagtgattgacctaaccatagacagttcatctgatgaagaggaagaagagccatctgccaagaggacctgtccttccctatctcccacatcaccactaaataataaaggcattttaagtcttccacatcaagcatctccagtatcccgcaccccaagccttcctgctgtagacacaagctacattaatacctccctcatccaagactataggcatcctttccacatgacacccatgccttacgacttacaaggattagatttctttcctttcttatcaggagacaatcagcattacaacacctccttgcttgccgctgcagcagcagcagtttcagatgatcaagacctcctacactcgtctcggtttttcccgtatacctcctcacagatgtttcttgatcagttaagtgcaggaggcagtacttctctgccaaccaccaatggaagcagtagtggcagtaacagcagcctggtttcttccaacagcctaagggaaagccatagccacaccgtcacaaacaggagcagcacggacacggcatccatctttggcatcataccagacattatttcattggactgattcccaggccctgctgctcccatccccaccccagatcgaatgaacttggcagaaagaagagaactttgtgctctgttttaccttactctgtttagaaaagtatacaagcgtgttttttttcctttttttagggaaaaaattaaaagaaatgtacagagaacaaaactatattttcagttttacttttgtatataaatctaagactgcctgtgtgataaaacacttgtttaaaaaaaaaaaggaaagaaaagaaaaaagaaaaacaagcacccacaaaccaccttcagttcatttttttctggattctgaagatttttcattatttgtcctatggttttggttttatttgacttcgatggcattattttatttgcaataacagaaaaggaattgcatgtatgaagttttcaatcgtgggcttttctttgttgtggggagggggtcgggggatagtttgatttccattttctgaaaacgacagacttggattctgtttgtgtgtgcatattttatccagccttaagttataaagctcatctgtcccgctgcattccctgtgtattttcaggacatggctcgtgggtgtgtgtgttcattgtgtgcgtctgtatgtatttttctgtcatcactgttccctctcctcccgagtgtgcattcagttaatataatcagttgcttgcttctttcaaagtgctttgaaggtcttgaactcacgtgtgagcatctttatcaactatcccaattgcatgttctccatcacatattctcttatttgctctgtaccccctgagaatatgttttagagatattggaataaagctgtctgggtaaggagtaggcttagccgacctatgaataatacactttagtctagttctttattctaaatctggattgccagtattgtgtatttaaaccaagtctgtgaatacctgctttttttggccacagagtaacaagttttcatgtaagatcttcataccaaagtaggaagtaaaaatagcttagaaagctctgtcaggtgttttgtgcagctgacagaggtaatgttacatcacctaaaaatgactaagggtcaaacacatcttgaatttcaactgtttatcaaatagtagacttctacaaaaatgtggtgcattgtactttccaaacaatttatttttagactaactgaccgtgtatctttcttttttgtcgacgc

SEQ ID NO: 350643 - DNA, 5649 bp, Homo sapiens
ggcggaggccagaggcgggctgggaaggtggaggggcgggccggggcggggccaggccggctagaggggcgggtctagcggcggcccccggcgaagttcactgcgcttgcgctgacagacgcaagatggcggacagtgcggaactaaagcaaatggttatgagccttagagtttctgaactccaagtactgttgggctacgccgggagaaacaagcacggacgcaaacacgaacttctcacaaaagccctgcatttgctaaaggctggctgtagtcctgctgtgcaaatgaaaattaaggaactctataggcggcggttcccacagaaaatcatgacgcctgcagacttgtccatccccaacgtacattcaagtcctatgccagcaactttgtctccatctaccattccacaactcacttacgatggtcaccctgcatcatcgccattactccctgtttctcttctgggacctaaacatgaactggaactcccacatcttacatcagctcttcacccagtccatccggatataaaacttcaaaaattaccattttatgatttactggatgaactgataaaacccaccagtctagcatcagacaacagtcagcgctttcgagaaacctgttttgcatttgccttgacaccacaacaagtgcagcaaatcagtagttccatggatatttctgggaccaaatgtgacttcacagtacaggtccagttaaggttttgtttatcagaaaccagttgtccacaagaagatcacttcccacccaatctttgtgtgaaagtgaatacaaaaccttgcagccttccaggttaccttccacctacaaaaaatggcgtggaaccaaagcgacccagccgaccaattaatatcacctcacttgtccgactgtccacaacagtaccaaacacgattgttgtttcttggactgcagaaattggaagaaactattccatggcagtatatcttgtaaaacagttgtcctcaacagttcttcttcagaggttacgagcaaagggaataaggaatccggatcattctagagctttaattaaagagaagttgactgcggatccagacagtgaaatagctacaaccagcctaagggtttctctactatgtccacttggtaaaatgcggctgacaattccgtgtcgggcccttacatgttctcatctacaatgttttgacgcaactctttacattcagatgaatgagaaaaaaccaacctgggtttgtcctgtctgtgataagaaggctccatatgaacaccttattattgatggcttgtttatggaaatcctaaagtactgtacagactgtgatgaaatacaatttaaggaggatggcacttgggcaccgatgagatcaaaaaaggaagtacaggaagtttctgcctcttacaatggagtcgatggatgcttgagctccacattggagcatcaggtagcgtctcaccaccagtcctcaaataaggaagaagagccatctgccaagaggacctgtccttccctatctcccacatcaccactaaataataaaggcattttaagtcttccacatcaagcatctccagtatcccgcaccccaagccttcctgctgtagacacaagctacattaatacctccctcatccaagactataggcatcctttccacatgacacccatgccttacgacttacaaggattagatttctttcctttcttatcaggagacaatcagcattacaacacctccttgcttgccgctgcagcagcagcagtttcagatgatcaagacctcctacactcgtctcggtttttcccgtatacctcctcacagatgtttcttgatcagttaagtgcaggaggcagtacttctctgccaaccaccaatggaagcagtagtggcagtaacagcagcctggtttcttccaacagcctaagggaaagccatagccacaccgtcacaaacaggagcagcacggacacggcatccatctttggcatcataccagacattatttcattggactgattcccaggccctgctgctcccatccccaccccagatcgaatgaacttggcagaaagaagagaactttgtgctctgttttaccttactctgtttagaaaagtatacaagcgtgttttttttcctttttttagggaaaaaattaaaagaaatgtacagagaacaaaactatattttcagttttacttttgtatataaatctaagactgcctgtgtgataaaacacttgtttaaaaaaaaaaaggaaagaaaagaaaaaagaaaaacaagcacccacaaaccaccttcagttcatttttttctggattctgaagatttttcattatttgtcctatggttttggttttatttgacttcgatggcattattttatttgcaataacagaaaaggaattgcatgtatgaagttttcaatcgtgggcttttctttgttgtggggagggggtcgggggatagtttgatttccattttctgaaaacgacagacttggattctgtttgtgtgtgcatattttatccagccttaagttataaagctcatctgtcccgctgcattccctgtgtattttcaggacatggctcgtgggtgtgtgtgttcattgtgtgcgtctgtatgtatttttctgtcatcactgttccctctcctcccgagtgtgcattcagttaatataatcagttgcttgcttctttcaaagtgctttgaaggtcttgaactcacgtgtgagcatctttatcaactatcccaattgcatgttctccatcacatattctcttatttgctctgtaccccctgagaatatgttttagagatattggaataaagctgtctgggtaaggagtaggcttagccgacctatgaataatacactttagtctagttctttattctaaatctggattgccagtattgtgtatttaaaccaagtctgtgaatacctgctttttttggccacagagtaacaagttttcatgtaagatcttcataccaaagtaggaagtaaaaatagcttagaaagctctgtcaggtgttttgtgcagctgacagaggtaatgttacatcacctaaaaaagaaagatacacggtcagttatcctaaaaataaattgtttggaaagtacaatgcaccacatttttgtagaagtctactatttgataaacagttgaaattcaagatgtgtttgacccttagtcatttttactctttggttctgagtatacctattttcttagcgtatctgccttgtttatctttttcttcaccttttaacaagtatgacataggaaagtcatttttttttagaattcatggatcagtctgatctactcttattcataatggaacatgtaaatatactgaaaactgtttttcaggagagaaatatgagttggagggaaggaaaagtggttctactaatgttccaaaatcctcatcagagaaggtatgatgttctcaggtgtggaaaatattttttagttgattgagaatgcaggtttaacagaagagataaggggcataatgactgctggttttccagactggattttcctaccgcaactattaatgttctcagagttgatgaggaccacctttgtgtatacacttgtagttttaaaccttgcattggtaacaaaatgatcaactttaatccaggtagaattcaagatggctgtacttcagttgtatgataaaattaatggttctcatgacttgtgtggcatctaaaaataatgtttttatagcatctctctgccactaaattgttgacttgaattttgggaaaaaaaaaagttggtgttgatatgtatatgtgtgtgtgtatatatgtatttataaacaagtgtgtttgagtaacaagtgagtttcatagtcttcccctacgcatgtgtattccacacacaaatggctgagttatagtcataaaacaatttgcaataaaaaaaaaaccaaaacagattgtcagttaaccaggaaacagttaatgttttttaatgaatctggcattatagtgagcaaatgtcgtattaatttaggctaatttctaatactaccataatttgtgtctaaatttctgttggggtagaaattactaaaattgtggggagttttttctgatttttacattgctttaggaaacatttttactaattcagctgtcttaggtaaaatgaatagttttcttcctgtttttttatgtgtcattgttagtggtctcagaattctgatcagtaactttgtgtatgatgctgaattacaaaccgtttgaatgatccagttgaaaacgtatccctctactttcttcagttgtagaaaaggttaatttccctcagtgtcccacattataccaacctaagagaagaacaggtaatagggagaaataaacatacggtggtttcagtggttttggtcatgtgtccacaggagaaactaaccattcagttgtcttaattttagttcgttctaccctgtgaggagtttgtttccatcagttgttgactttccaaaatgttgcattaagtaatagttgtcactctgttggtctcatggtcaatatcaatcagactttcatgatctctactaattattagtagagtcctgtactatgtctgtaactactaagtttaaagaaaagcacatagtcacttcatctctttttttcttagcctacgctcactccccaacccatcccaacattgacatgctatctgtggacaaatagcagttctcagaatctagtcaagttgccatcatcccccttgccttggccgttcatagtaggtatgcatatgtttgtttctgtacagtactgtgtgtgtgtgtgtatatatatatacatctgtatgcacacatctttgataaaatagctatttgactagcagggttaaagtggcttttaattacttcgtgagtgttattggatacatcttaaaaaaaaaaaatctgaaccagaaccatgccatacttggttgactattttgagcattaaaattgctttactaattatttagacatgatcacaattctgtatctttactgaggaaagattcacgtaagctctgaaaaatcggattctttggcagattttcctttgagtcaagtgtctgaaatggagtgaaaatatatcctaactaaattaatgtggaaagagcatttttttagacaatttcaattttaaacacataaaactttcaagatcttcaggactttttaaagcacatttgaaattattttagtaagaattttgttttatcaatagatgttgaattctgttttttaattaaatacaaagcttagatttcagaaagagagggaaaatagctggtggtcccagagtgtgctgctgttaattgtttaacaaaggggaaaatgtacataaacagataaagttaccataaattccatgaacttaaatctgtgattcattgccttaaaactttctctcttagaatttccataccgcatgccaaaccagtaaaatggcttttaaaaatgtatagtagacaatgtcagtttgtataaaagtaccaagtgaaaatatttattacatgcattggaaaaaaattgtttacctattgaatgttacctgtttatgtagagctctttagatgtaataaaagaaaagccttca

SEQ ID NO: 350644 - DNA, 5861 bp, Homo sapiens
tttgtgcccacacttgaggcacactagtttttgtctggagtccaggaggaataaggtctcacaaacgaattgaaggtggtaaatgtgggggatttcattgccaatgaaagtggctctcagtgagaaagggagctggaaaggggacggaacaagaaggtaatcttcacctgagattctccagccatccctgccagactcctctcttcagaggatgataaaaactatatgcctacatttaggatgagtctctctctccgacatccaaccatactctccaacatccagctccttctcgtctctctcccagcaaatggttatgagccttagagtttctgaactccaagtactgttgggctacgccgggagaaacaagcacggacgcaaacacgaacttctcacaaaagccctgcatttgctaaaggctggctgtagtcctgctgtgcaaatgaaaattaaggaactctataggcggcggttcccacagaaaatcatgacgcctgcagacttgtccatccccaacgtacattcaagtcctatgccagcaactttgtctccatctaccattccacaactcacttacgatggtcaccctgcatcatcgccattactccctgtttctcttctgggacctaaacatgaactggaactcccacatcttacatcagctcttcacccagtccatccggatataaaacttcaaaaattaccattttatgatttactggatgaactgataaaacccaccagtctagcatcagacaacagtcagcgctttcgagaaacctgttttgcatttgccttgacaccacaacaagtgcagcaaatcagtagttccatggatatttctgggaccaaatgtgacttcacagtacaggtccagttaaggttttgtttatcagaaaccagttgtccacaagaagatcacttcccacccaatctttgtgtgaaagtgaatacaaaaccttgcagccttccaggttaccttccacctacaaaaaatggcgtggaaccaaagcgacccagccgaccaattaatatcacctcacttgtccgactgtccacaacagtaccaaacacgattgttgtttcttggactgcagaaattggaagaaactattccatggcagtatatcttgtaaaacagttgtcctcaacagttcttcttcagaggttacgagcaaagggaataaggaatccggatcattctagagctttaattaaagagaagttgactgcggatccagacagtgaaatagctacaaccagcctaagggtttctctactatgtccacttggtaaaatgcggctgacaattccgtgtcgggcccttacatgttctcatctacaatgttttgacgcaactctttacattcagatgaatgagaaaaaaccaacctgggtttgtcctgtctgtgataagaaggctccatatgaacaccttattattgatggcttgtttatggaaatcctaaagtactgtacagactgtgatgaaatacaatttaaggaggatggcacttgggcaccgatgagatcaaaaaaggaagtacaggaagtttctgcctcttacaatggagtcgatggatgcttgagctccacattggagcatcaggtagcgtctcaccaccagtcctcaaataaaaacaagaaagtagaagtgattgacctaaccatagacagttcatctgatgaagaggaagaagagccatctgccaagaggacctgtccttccctatctcccacatcaccactaaataataaaggcattttaagtcttccacatcaagcatctccagtatcccgcaccccaagccttcctgctgtagacacaagctacattaatacctccctcatccaagactataggcatcctttccacatgacacccatgccttacgacttacaaggattagatttctttcctttcttatcaggagacaatcagcattacaacacctccttgcttgccgctgcagcagcagcagtttcagatgatcaagacctcctacactcgtctcggtttttcccgtatacctcctcacagatgtttcttgatcagttaagtgcaggaggcagtacttctctgccaaccaccaatggaagcagtagtggcagtaacagcagcctggtttcttccaacagcctaagggaaagccatagccacaccgtcacaaacaggagcagcacggacacggcatccatctttggcatcataccagacattatttcattggactgattcccaggccctgctgctcccatccccaccccagatcgaatgaacttggcagaaagaagagaactttgtgctctgttttaccttactctgtttagaaaagtatacaagcgtgttttttttcctttttttagggaaaaaattaaaagaaatgtacagagaacaaaactatattttcagttttacttttgtatataaatctaagactgcctgtgtgataaaacacttgtttaaaaaaaaaaaggaaagaaaagaaaaaagaaaaacaagcacccacaaaccaccttcagttcatttttttctggattctgaagatttttcattatttgtcctatggttttggttttatttgacttcgatggcattattttatttgcaataacagaaaaggaattgcatgtatgaagttttcaatcgtgggcttttctttgttgtggggagggggtcgggggatagtttgatttccattttctgaaaacgacagacttggattctgtttgtgtgtgcatattttatccagccttaagttataaagctcatctgtcccgctgcattccctgtgtattttcaggacatggctcgtgggtgtgtgtgttcattgtgtgcgtctgtatgtatttttctgtcatcactgttccctctcctcccgagtgtgcattcagttaatataatcagttgcttgcttctttcaaagtgctttgaaggtcttgaactcacgtgtgagcatctttatcaactatcccaattgcatgttctccatcacatattctcttatttgctctgtaccccctgagaatatgttttagagatattggaataaagctgtctgggtaaggagtaggcttagccgacctatgaataatacactttagtctagttctttattctaaatctggattgccagtattgtgtatttaaaccaagtctgtgaatacctgctttttttggccacagagtaacaagttttcatgtaagatcttcataccaaagtaggaagtaaaaatagcttagaaagctctgtcaggtgttttgtgcagctgacagaggtaatgttacatcacctaaaaaagaaagatacacggtcagttatcctaaaaataaattgtttggaaagtacaatgcaccacatttttgtagaagtctactatttgataaacagttgaaattcaagatgtgtttgacccttagtcatttttactctttggttctgagtatacctattttcttagcgtatctgccttgtttatctttttcttcaccttttaacaagtatgacataggaaagtcatttttttttagaattcatggatcagtctgatctactcttattcataatggaacatgtaaatatactgaaaactgtttttcaggagagaaatatgagttggagggaaggaaaagtggttctactaatgttccaaaatcctcatcagagaaggtatgatgttctcaggtgtggaaaatattttttagttgattgagaatgcaggtttaacagaagagataaggggcataatgactgctggttttccagactggattttcctaccgcaactattaatgttctcagagttgatgaggaccacctttgtgtatacacttgtagttttaaaccttgcattggtaacaaaatgatcaactttaatccaggtagaattcaagatggctgtacttcagttgtatgataaaattaatggttctcatgacttgtgtggcatctaaaaataatgtttttatagcatctctctgccactaaattgttgacttgaattttgggaaaaaaaaaagttggtgttgatatgtatatgtgtgtgtgtatatatgtatttataaacaagtgtgtttgagtaacaagtgagtttcatagtcttcccctacgcatgtgtattccacacacaaatggctgagttatagtcataaaacaatttgcaataaaaaaaaaaccaaaacagattgtcagttaaccaggaaacagttaatgttttttaatgaatctggcattatagtgagcaaatgtcgtattaatttaggctaatttctaatactaccataatttgtgtctaaatttctgttggggtagaaattactaaaattgtggggagttttttctgatttttacattgctttaggaaacatttttactaattcagctgtcttaggtaaaatgaatagttttcttcctgtttttttatgtgtcattgttagtggtctcagaattctgatcagtaactttgtgtatgatgctgaattacaaaccgtttgaatgatccagttgaaaacgtatccctctactttcttcagttgtagaaaaggttaatttccctcagtgtcccacattataccaacctaagagaagaacaggtaatagggagaaataaacatacggtggtttcagtggttttggtcatgtgtccacaggagaaactaaccattcagttgtcttaattttagttcgttctaccctgtgaggagtttgtttccatcagttgttgactttccaaaatgttgcattaagtaatagttgtcactctgttggtctcatggtcaatatcaatcagactttcatgatctctactaattattagtagagtcctgtactatgtctgtaactactaagtttaaagaaaagcacatagtcacttcatctctttttttcttagcctacgctcactccccaacccatcccaacattgacatgctatctgtggacaaatagcagttctcagaatctagtcaagttgccatcatcccccttgccttggccgttcatagtaggtatgcatatgtttgtttctgtacagtactgtgtgtgtgtgtgtatatatatatacatctgtatgcacacatctttgataaaatagctatttgactagcagggttaaagtggcttttaattacttcgtgagtgttattggatacatcttaaaaaaaaaaaatctgaaccagaaccatgccatacttggttgactattttgagcattaaaattgctttactaattatttagacatgatcacaattctgtatctttactgaggaaagattcacgtaagctctgaaaaatcggattctttggcagattttcctttgagtcaagtgtctgaaatggagtgaaaatatatcctaactaaattaatgtggaaagagcatttttttagacaatttcaattttaaacacataaaactttcaagatcttcaggactttttaaagcacatttgaaattattttagtaagaattttgttttatcaatagatgttgaattctgttttttaattaaatacaaagcttagatttcagaaagagagggaaaatagctggtggtcccagagtgtgctgctgttaattgtttaacaaaggggaaaatgtacataaacagataaagttaccataaattccatgaacttaaatctgtgattcattgccttaaaactttctctcttagaatttccataccgcatgccaaaccagtaaaatggcttttaaaaatgtatagtagacaatgtcagtttgtataaaagtaccaagtgaaaatatttattacatgcattggaaaaaaattgtttacctattgaatgttacctgtttatgtagagctctttagatgtaataaaagaaaagccttca

SEQ ID NO: 350645 - DNA, 5771 bp, Homo sapiens
  misc_feature (1951)..(1951): n is a, c, g, or t
  misc_feature (1966)..(1966): n is a, c, g, or t
  misc_feature (1973)..(1973): n is a, c, g, or t
  misc_feature (1980)..(1980): n is a, c, g, or t
  misc_feature (1983)..(1983): n is a, c, g, or t
  misc_feature (1991)..(1991): n is a, c, g, or t
ggcggaggccagaggcgggctgggaaggtggaggggcgggccggggcggggccaggccggctagaggggcgggtctagcggcggcccccggcgaagttcactgcgcttgcgctgacagacgcaagatggcggacagtgcggaactaaagcaaatggttatgagccttagagtttctgaactccaagtactgttgggctacgccgggagaaacaagcacggacgcaaacacgaacttctcacaaaagccctgcatttgctaaaggctggctgtagtcctgctgtgcaaatgaaaattaaggaactctataggcggcggttcccacagaaaatcatgacgcctgcagacttgtccatccccaacgtacattcaagtcctatgccagcaactttgtctccatctaccattccacaactcacttacgatggtcaccctgcatcatcgccattactccctgtttctcttctgggacctaaacatgaactggaactcccacatcttacatcagctcttcacccagtccatccggatataaaacttcaaaaattaccattttatgatttactggatgaactgataaaacccaccagtctagcatcagacaacagtcagcgctttcgagaaacctgttttgcatttgccttgacaccacaacaagtgcagcaaatcagtagttccatggatatttctgggaccaaatgtgacttcacagtacaggtccagttaaggttttgtttatcagaaaccagttgtccacaagaagatcacttcccacccaatctttgtgtgaaagtgaatacaaaaccttgcagccttccaggttaccttccacctacaaaaaatggcgtggaaccaaagcgacccagccgaccaattaatatcacctcacttgtccgactgtccacaacagtaccaaacacgattgttgtttcttggactgcagaaattggaagaaactattccatggcagtatatcttgtaaaacagttgtcctcaacagttcttcttcagaggttacgagcaaagggaataaggaatccggatcattctagagctttaattaaagagaagttgactgcggatccagacagtgaaatagctacaaccagcctaagggtttctctactatgtccacttggtaaaatgcggctgacaattccgtgtcgggcccttacatgttctcatctacaatgttttgacgcaactctttacattcagatgaatgagaaaaaaccaacctgggtttgtcctgtctgtgataagaaggctccatatgaacaccttattattgatggcttgtttatggaaatcctaaagtactgtacagactgtgatgaaatacaatttaaggaggatggcacttgggcaccgatgagatcaaaaaaggaagtacaggaagtttctgcctcttacaatggagtcgatggatgcttgagctccacattggagcatcaggtagcgtctcaccaccagtcctcaaataaaaacaagaaagtagaagtgattgacctaaccatagacagttcatctgatgaagaggaagaagagccatctgccaagaggacctgtccttccctatctcccacatcaccactaaataataaaggcattttaagtcttccacatcaagcatctccagtatcccgcaccccaagccttcctgctgtagacacaagctacattaatacctccctcatccaagactataggcatcctttccacatgacacccatgccttacgacttacaaggattagatttctttcctttcttatcaggagacaatcagcattacaacacctccttgcttgccgctgcagcagcagcagtttcagatgatcaagacctcctacactcgtctcggtttttcccgtatacctccagatgttctgtcagtagtcgaaaaaaaggggggggggggggggggggccccccccaaaaaggggggttttnaaaaccccttttttntcctttntcttttnggncccccaanaaacccccccaaccaatggaagcagtagtggcagtaacagcagcctggtttcttccaacagcctaagggaaagccatagccacaccgtcacaaacaggagcagcacggacacggcatccatctttggcatcataccagacattatttcattggactgattcccaggccctgctgctcccatccccaccccagatcgaatgaacttggcagaaagaagagaactttgtgctctgttttaccttactctgtttagaaaagtatacaagcgtgttttttttcctttttttagggaaaaaattaaaagaaatgtacagagaacaaaactatattttcagttttacttttgtatataaatctaagactgcctgtgtgataaaacacttgtttaaaaaaaaaaaggaaagaaaagaaaaaagaaaaacaagcacccacaaaccaccttcagttcatttttttctggattctgaagatttttcattatttgtcctatggttttggttttatttgacttcgatggcattattttatttgcaataacagaaaaggaattgcatgtatgaagttttcaatcgtgggcttttctttgttgtggggagggggtcgggggatagtttgatttccattttctgaaaacgacagacttggattctgtttgtgtgtgcatattttatccagccttaagttataaagctcatctgtcccgctgcattccctgtgtattttcaggacatggctcgtgggtgtgtgtgttcattgtgtgcgtctgtatgtatttttctgtcatcactgttccctctcctcccgagtgtgcattcagttaatataatcagttgcttgcttctttcaaagtgctttgaaggtcttgaactcacgtgtgagcatctttatcaactatcccaattgcatgttctccatcacatattctcttatttgctctgtaccccctgagaatatgttttagagatattggaataaagctgtctgggtaaggagtaggcttagccgacctatgaataatacactttagtctagttctttattctaaatctggattgccagtattgtgtatttaaaccaagtctgtgaatacctgctttttttggccacagagtaacaagttttcatgtaagatcttcataccaaagtaggaagtaaaaatagcttagaaagctctgtcaggtgttttgtgcagctgacagaggtaatgttacatcacctaaaaaagaaagatacacggtcagttatcctaaaaataaattgtttggaaagtacaatgcaccacatttttgtagaagtctactatttgataaacagttgaaattcaagatgtgtttgacccttagtcatttttactctttggttctgagtatacctattttcttagcgtatctgccttgtttatctttttcttcaccttttaacaagtatgacataggaaagtcatttttttttagaattcatggatcagtctgatctactcttattcataatggaacatgtaaatatactgaaaactgtttttcaggagagaaatatgagttggagggaaggaaaagtggttctactaatgttccaaaatcctcatcagagaaggtatgatgttctcaggtgtggaaaatattttttagttgattgagaatgcaggtttaacagaagagataaggggcataatgactgctggttttccagactggattttcctaccgcaactattaatgttctcagagttgatgaggaccacctttgtgtatacacttgtagttttaaaccttgcattggtaacaaaatgatcaactttaatccaggtagaattcaagatggctgtacttcagttgtatgataaaattaatggttctcatgacttgtgtggcatctaaaaataatgtttttatagcatctctctgccactaaattgttgacttgaattttgggaaaaaaaaaagttggtgttgatatgtatatgtgtgtgtgtatatatgtatttataaacaagtgtgtttgagtaacaagtgagtttcatagtcttcccctacgcatgtgtattccacacacaaatggctgagttatagtcataaaacaatttgcaataaaaaaaaaaccaaaacagattgtcagttaaccaggaaacagttaatgttttttaatgaatctggcattatagtgagcaaatgtcgtattaatttaggctaatttctaatactaccataatttgtgtctaaatttctgttggggtagaaattactaaaattgtggggagttttttctgatttttacattgctttaggaaacatttttactaattcagctgtcttaggtaaaatgaatagttttcttcctgtttttttatgtgtcattgttagtggtctcagaattctgatcagtaactttgtgtatgatgctgaattacaaaccgtttgaatgatccagttgaaaacgtatccctctactttcttcagttgtagaaaaggttaatttccctcagtgtcccacattataccaacctaagagaagaacaggtaatagggagaaataaacatacggtggtttcagtggttttggtcatgtgtccacaggagaaactaaccattcagttgtcttaattttagttcgttctaccctgtgaggagtttgtttccatcagttgttgactttccaaaatgttgcattaagtaatagttgtcactctgttggtctcatggtcaatatcaatcagactttcatgatctctactaattattagtagagtcctgtactatgtctgtaactactaagtttaaagaaaagcacatagtcacttcatctctttttttcttagcctacgctcactccccaacccatcccaacattgacatgctatctgtggacaaatagcagttctcagaatctagtcaagttgccatcatcccccttgccttggccgttcatagtaggtatgcatatgtttgtttctgtacagtactgtgtgtgtgtgtgtatatatatatacatctgtatgcacacatctttgataaaatagctatttgactagcagggttaaagtggcttttaattacttcgtgagtgttattggatacatcttaaaaaaaaaaaatctgaaccagaaccatgccatacttggttgactattttgagcattaaaattgctttactaattatttagacatgatcacaattctgtatctttactgaggaaagattcacgtaagctctgaaaaatcggattctttggcagattttcctttgagtcaagtgtctgaaatggagtgaaaatatatcctaactaaattaatgtggaaagagcatttttttagacaatttcaattttaaacacataaaactttcaagatcttcaggactttttaaagcacatttgaaattattttagtaagaattttgttttatcaatagatgttgaattctgttttttaattaaatacaaagcttagatttcagaaagagagggaaaatagctggtggtcccagagtgtgctgctgttaattgtttaacaaaggggaaaatgtacataaacagataaagttaccataaattccatgaacttaaatctgtgattcattgccttaaaactttctctcttagaatttccataccgcatgccaaaccagtaaaatggcttttaaaaatgtatagtagacaatgtcagtttgtataaaagtaccaagtgaaaatatttattacatgcattggaaaaaaattgtttacctattgaatgttacctgtttatgtagagctctttagatgtaataaaagaaaagccttca

SEQ ID NO: 350646 - DNA, 1429 bp, Homo sapiens
ctgctgctgtgtgtccgctccggggtgtgtttcgcccatatagccgcccgtcgtgtccgtgctggtgtggtggtgctactctcctgcgtaggggttgtggccgccaggcggcgagtctcgtgttgggtagccgttgtctgcttgtgggcggctgatattggtgtccgcgttggtggcgccgtgttgggcgaggccgagcggttccgtctggtgcgcgtcgcgccgtccgcgcgccgatgtcccttgtgggggggcctgttccggataggtgcatggtgtggggtcgtgctagttgggtttggcgttggttttgtggcgatcattgttgcttgcgcgtttgggaccatgtgcgctgtcgtccttgtgcgtggagtggctgagctttggtatgccactggtccgcaatttcgtgtgggtggccgctgttcggcaggtgcgcgtggcagtggggcccatccgtcggggtgcgcgtggctcgcatggcgcggccatgtgtagcgatcgttggcggtcgctgcgtagtggtccgctcggctgtggcgggggtgcagtgcccaggtgtgtctcagtagtctgcgagtcttgcgtgccggtggagggtgcaggcgggccggttgcagtgcgtgagggaatggagaacacagcgcgcagcgggaggcagggcaatggcgtgtccgtcggagaagagagaaaggagggtgccgccgctgggtcaccgcggccgcgcgcgtgcttgggcccacgcgtcttgcgagggcagggacagggccaggaaagctgactgtgccggggacgccttgacctagggcaccagagaagcgggcacgggtgccgggcccacaaccgggacaggtacacgagaagttggccccaggttgggcccgcctcgccctgcctcgcccacagccgccggcacagtaggaggcaccccgcccccgtgaacccagaggtccctgagctcgctcacctgcagccgagtcaccactaggctgtaggcgacgctgggtcgacccacgcgtcggggtggatgacaagccctccagaggcaggcagcaggccccggggcccaggaggggtgacagaggggtgagaggcaggcaagtcttcagacacgtgttctgtggtcctggtgcttccaccctaaggccacatgggctcaggccaggccttcatcccctcaaaggcctctggctgctcagtctcccttatggggcagaggccgcccaaagttgggacaggtcaatgttcgctcacccttcaggcctcagctgcaagatcagccacagacctcatgctggacacaggagcccaggacatgcctgggtcctggctgatgactgattagtctcttctgtcacaggggtgcctggagaccccttaataagcagcataaataaatatctgacacagattggaggcctctggccac

SEQ ID NO: 350647 - DNA, 678 bp, Homo sapiens
tcagagctgtgcctggggccgactttgctgctcagcaggaggtgggagtttccaaaccctgcgttctttaccagttgcttctgccctttttaggagctgaaggagagcctggagggaggttgaaattgactttggagccactgatggctcagaatctgggctcaggtgtgagtaacctggcagttttgggagtgcccagttacaggacagctgctgctgcccccctgtgggggccatgctgtgaacttgcaggagacaaagggagggtctaggcttgcagggggatgtggcatggagcagccacacaggcccccaggtgtgctggcacctgagggtgacatgggagcgcactggggccccggtcagcatcactgatgggctgtcttcatttccagtccattttcgctgcgtggtgtttcatccattcctagatgagattctcattgggaagatcaaaggctgcagcccagaaggagtgcacggtaacagtggccctgacgcctcagacaagacttgggaacactgtgggggcaggaggtctgtgtccacccacatggtcaggggagggctcaggtgtcgaggccgaaccttccccgtggtgtcagagaagcttgcccaccctcccttttatgtgttgtgtgaggacctccatcagcagtgcggtttcactgtgagccg

SEQ ID NO: 350648 - DNA, 4480 bp, Homo sapiens
  misc_feature (55)..(55): n is a, c, g, or t
ggacgcgtggcgcaagcgcgagcggctgtgcgcggtgcggcggtgcgcggtgcgnggtgcgtggtgcgtgatacgagcggcggcacgtggcgcgggtgcggggcgtggagtggcgtggcgtggagtggcgtggcgtggcggggtctcgcggcgcgggcgcgcacccggagctgtggacggagagtgcctccctctggcctcagtttcctcatgttgtagtagcggagcatggcccggaccgggcccccgagaccgccccgtgcaacctcaccgccagcctgggggcctcagcgactgggacgggaccaaggggctcggggattctccctgcccccggccctggtgcgtgactgaccctcctgttcccagagcccccagcgcaggccgggatgttcgtcctggtggaaatggtggacaccgtccggatccccccttggcagtttgagaggaagctcaacgactccattgccgaggagctgaacaagaagttggccaacaaggtcgtgtacaacgtgggactctgcatttgtctgtttgatatcaccaaactggaggatgcctatgtattccctggggatggcgcatcacacaccaaagtccattttcgctgcgtggtgtttcatccattcctagatgagattctcattgggaagatcaaaggctgcagcccagaaggagtgcacgtctctctaggcttcttcgatgacattctcatccccccagagtcactgcagcagccagccaagttcgacgaagcggagcaggtgtgggtgtgggagtacgagacggaggaaggagcacacgacctctacatggacaccggcgaggagatccgcttccgggtggtggacgagagctttgttgacacgtcccccacagggcccagctcagcagatgccaccacttccagtgaggagctgccaaagaaggaggctccgtacacgcttgtgggatccatcagtgagccaggcctgggccttctctcctggtggaccagcaactagccctggggctggacagtggaccctaccagcctgcgggaaggtggtatggccggctgtgaagacaacagcagctgaggccgatgctaaggagatagtgtctcgagctggacagtgaggcaaggccaggagtgcccaccagcttgccccgctcctccaccatctaggccctgctcctccttcactgcagtgatggatccatctgtggctgtggctgttgggcctccactgaccttgactgaaaagacccttcctggaccctggacttgacaacaaacggcacagacaccaatcactcacagaacagtcactggttttggattcttgttttccttgcaagaacaaaaggttctctagaatccttcagccaccaatgaaatgatcaggcaggagaaaaactttagatgggagtcttgtcatcaaaaataaatacagttgcatggagctgcttaagatctgaaccaaactcaaaataggaagacgggggctaaaaagttattttaagaacccccccaccacaaccacagtcactccgtgggctaagcggggagcaggaagcatgtctggtcacaccatcttggaataggaagccatggctggacggatcggatccactgatggcacacgtggagctgaacttgacgccagcggcggggcggggaggcactgccctcactgttgcagttccttcattctgttgagggcactgccagcgcggaaccactcaatctgcgtctcgttgaaggtgtggttcaggaggatggtctcctgggtcccgttggggtgcttgatgatgcacttcaggggctgcaaggagaaggtgggtgtgggtggaagtggtgggtactgtgtgcccttggccccgcaggggggtcagggagacagggcactgcctggggacctaagaggtcagcaggcaaaccaaatcctaggccagtctgtgcctgatggcccaggtcagacccaggtggcacctacaggggattcctggggcccagagggtcctgcagtgggtgggctgtcccctgagtgccaggtcctggtgagtaaagggaggttggggaggtgtgagggccccgggttgactccaacccccaactctgagaagccactttgctttctctgtggggccacctggagaactgggggcctttccagctggaatgaagcctcctgggagaagctaccctggggccagtgcaggaggggaaacaaggtggctgcccctcaccccaccacctcagggggacccgggcccctaaccttgccaggggtgaagtccttcaggccctgaatggtcagcttgtccacagggtgaatcttgttgtagtcagccgggtcagcgaaggtcagaggcagcaggccctgtttcttcaggttggtctctggaaagcaggcggcattcggtcatcgggggcctgactagcctggagagcttcattttctgaacccatctggggctctgggagatgcccctaatcctgctgcctgggacaatgcccgggcagtgactatggggccctggtctgctccctttcactaggggtgcccctagcaagtgtgcgctggtgctgaggtctgcgaggccttcctgctgcacattcatgatcagaaagaaccccctggcacatgtcctagatctcagcggctcagatctacaagcctggaagcagggcctgcgggaagccgggaagctgagcgtcggatgtgcactgtgtgagcctaagaaggggcaagaggctgacgggcctgtgggctgcagtggacacagcctagaaccaggcccaactcagccacgggcagggagagtgaccttgatcactagggatgggatgaggatggcctgggtacagactccagctcaccgtggatcctggcaaagctcttggtgatgatggcccggcccccaaggtggcgaggctccagagctgcatgctcccggctcgagccctcgccgtagttctcgtctccgatcaccacccacctgatgccatgtttctgtcaggcaagcgggggtaaggttataaggcagaggagggcaccgtcctcacctgtctggccctacctgcctggcctcacccacctggcgcctgggcatcctgaggctcccggtaaaggggctggaggggcccttcctcgcctgctgcctaagggcaagtgaagcctgcgtgaatgagacccaaacgaggccccgaggggacagaggcacgtggttgtttgcagtggcaaagaagacagaagccacccattggtgcttggcagaggcaggtgtgtgtggagggaggttgggtgagacagggacggcctccgggccccacacaagatgcatctgtgaagctcaaggcgcccccttcctgggagcaccctctgccccacccagccaccagggggtgccagagtcctttcacccggctgggccaggacttgggttcagccctggttctgtttgtttctcaaagcagaaaaagtccaatcacctcagaccctctctgcctgctcactgtgaggccccgtgtagccccctctctgagcttttggcctctgacttcctgagtcggcccccttccttgtctttgtctagggccagatatcctaagatatctctcactaactcctcctggtgcagggacccggctgtaccaccggacctgggcctcatgccttctcagccacagggaggggctgcaggcctctcctcccttccacagcagtcccctttgggcttggtcggcctccttcccagtttccactcccctaatgtcctccctgcacctgccttgcaggccccttcaggagtgaccactggcattgcccctatcaactctgacccaccttgtagtagcgggcagtgtcagggacggggccaaactcctgagtgacggcattgcgcacggagttggccttgccgttttcaatgttgatggcaccaatgagcaggttgttggagatgttatccaagtgcccacggaacttgagccaggggccagcagctgagatgtggtcagtggtacacttccctttgaccttgggtggtaagtagagaggacagaggtcagggcatggccctggaggggtggatgacaagccctccagaggcaggcagcaggccccggggcccaggaggggtgacagaggggtgagaggcaggcaagtcttcagacacgtgttctgtggtcctggtgcttccaccctaaggccacatgggctcaggccaggccttcatcccctcaaaggcctctggctgctcagtctcccttatggggcagaggccgcccaaagttgggacaggtcaatgttcgctcacccttcaggcctcagctgcaagatcagccacagacctcatgctggacacaggagcccaggacatgcctgggtcctggctgatgactgattagtctcttctgtcacaggggtgcctggagaccccttaataagcagcataaataaatatctgacacagattggaggcctctggccac

SEQ ID NO: 350649 - DNA, 4469 bp, Homo sapiens
  misc_feature (44)..(44): n is a, c, g, or t
ctcgcccgcagtcgcgcaagcgcgagcggcggtgcgcggtgcgnggtgcgtggtgcgtgatacgagcggcggcacgtggcgcgggtgcggggcgtggagtggcgtggcgtggagtggcgtggcgtggcggggtctcgcggcgcgggcgcgcacccggagctgtggacggagagtgcctccctctggcctcagtttcctcatgttgtagtagcggagcatggcccggaccgggcccccgagaccgccccgtgcaacctcaccgccagcctgggggcctcagcgactgggacgggaccaaggggctcggggattctccctgcccccggccctggtgcgtgactgaccctcctgttcccagagcccccagcgcaggccgggatgttcgtcctggtggaaatggtggacaccgtccggatccccccttggcagtttgagaggaagctcaacgactccattgccgaggagctgaacaagaagttggccaacaaggtcgtgtacaacgtgggactctgcatttgtctgtttgatatcaccaaactggaggatgcctatgtattccctggggatggcgcatcacacaccaaagtccattttcgctgcgtggtgtttcatccattcctagatgagattctcattgggaagatcaaaggctgcagcccagaaggagtgcacgtctctctaggcttcttcgatgacattctcatccccccagagtcactgcagcagccagccaagttcgacgaagcggagcaggtgtgggtgtgggagtacgagacggaggaaggagcacacgacctctacatggacaccggcgaggagatccgcttccgggtggtggacgagagctttgttgacacgtcccccacagggcccagctcagcagatgccaccacttccagtgaggagctgccaaagaaggaggctccgtacacgcttgtgggatccatcagtgagccaggcctgggccttctctcctggtggaccagcaactagccctggggctggacagtggaccctaccagcctgcgggaaggtggtatggccggctgtgaagacaacagcagctgaggccgatgctaaggagatagtgtctcgagctggacagtgaggcaaggccaggagtgcccaccagcttgccccgctcctccaccatctaggccctgctcctccttcactgcagtgatggatccatctgtggctgtggctgttgggcctccactgaccttgactgaaaagacccttcctggaccctggacttgacaacaaacggcacagacaccaatcactcacagaacagtcactggttttggattcttgttttccttgcaagaacaaaaggttctctagaatccttcagccaccaatgaaatgatcaggcaggagaaaaactttagatgggagtcttgtcatcaaaaataaatacagttgcatggagctgcttaagatctgaaccaaactcaaaataggaagacgggggctaaaaagttattttaagaacccccccaccacaaccacagtcactccgtgggctaagcggggagcaggaagcatgtctggtcacaccatcttggaataggaagccatggctggacggatcggatccactgatggcacacgtggagctgaacttgacgccagcggcggggcggggaggcactgccctcactgttgcagttccttcattctgttgagggcactgccagcgcggaaccactcaatctgcgtctcgttgaaggtgtggttcaggaggatggtctcctgggtcccgttggggtgcttgatgatgcacttcaggggctgcaaggagaaggtgggtgtgggtggaagtggtgggtactgtgtgcccttggccccgcaggggggtcagggagacagggcactgcctggggacctaagaggtcagcaggcaaaccaaatcctaggccagtctgtgcctgatggcccaggtcagacccaggtggcacctacaggggattcctggggcccagagggtcctgcagtgggtgggctgtcccctgagtgccaggtcctggtgagtaaagggaggttggggaggtgtgagggccccgggttgactccaacccccaactctgagaagccactttgctttctctgtggggccacctggagaactgggggcctttccagctggaatgaagcctcctgggagaagctaccctggggccagtgcaggaggggaaacaaggtggctgcccctcaccccaccacctcagggggacccgggcccctaaccttgccaggggtgaagtccttcaggccctgaatggtcagcttgtccacagggtgaatcttgttgtagtcagccgggtcagcgaaggtcagaggcagcaggccctgtttcttcaggttggtctctggaaagcaggcggcattcggtcatcgggggcctgactagcctggagagcttcattttctgaacccatctggggctctgggagatgcccctaatcctgctgcctgggacaatgcccgggcagtgactatggggccctggtctgctccctttcactaggggtgcccctagcaagtgtgcgctggtgctgaggtctgcgaggccttcctgctgcacattcatgatcagaaagaaccccctggcacatgtcctagatctcagcggctcagatctacaagcctggaagcagggcctgcgggaagccgggaagctgagcgtcggatgtgcactgtgtgagcctaagaaggggcaagaggctgacgggcctgtgggctgcagtggacacagcctagaaccaggcccaactcagccacgggcagggagagtgaccttgatcactagggatgggatgaggatggcctgggtacagactccagctcaccgtggatcctggcaaagctcttggtgatgatggcccggcccccaaggtggcgaggctccagagctgcatgctcccggctcgagccctcgccgtagttctcgtctccgatcaccacccacctgatgccatgtttctgtcaggcaagcgggggtaaggttataaggcagaggagggcaccgtcctcacctgtctggccctacctgcctggcctcacccacctggcgcctgggcatcctgaggctcccggtaaaggggctggaggggcccttcctcgcctgctgcctaagggcaagtgaagcctgcgtgaatgagacccaaacgaggccccgaggggacagaggcacgtggttgtttgcagtggcaaagaagacagaagccacccattggtgcttggcagaggcaggtgtgtgtggagggaggttgggtgagacagggacggcctccgggccccacacaagatgcatctgtgaagctcaaggcgcccccttcctgggagcaccctctgccccacccagccaccagggggtgccagagtcctttcacccggctgggccaggacttgggttcagccctggttctgtttgtttctcaaagcagaaaaagtccaatcacctcagaccctctctgcctgctcactgtgaggccccgtgtagccccctctctgagcttttggcctctgacttcctgagtcggcccccttccttgtctttgtctagggccagatatcctaagatatctctcactaactcctcctggtgcagggacccggctgtaccaccggacctgggcctcatgccttctcagccacagggaggggctgcaggcctctcctcccttccacagcagtcccctttgggcttggtcggcctccttcccagtttccactcccctaatgtcctccctgcacctgccttgcaggccccttcaggagtgaccactggcattgcccctatcaactctgacccaccttgtagtagcgggcagtgtcagggacggggccaaactcctgagtgacggcattgcgcacggagttggccttgccgttttcaatgttgatggcaccaatgagcaggttgttggagatgttatccaagtgcccacggaacttgagccaggggccagcagctgagatgtggtcagtggtacacttccctttgaccttgggtggtaagtagagaggacagaggtcagggcatggccctggaggggtggatgacaagccctccagaggcaggcagcaggccccggggcccaggaggggtgacagaggggtgagaggcaggcaagtcttcagacacgtgttctgtggtcctggtgcttccaccctaaggccacatgggctcaggccaggccttcatcccctcaaaggcctctggctgctcagtctcccttatggggcagaggccgcccaaagttgggacaggtcaatgttcgctcacccttcaggcctcagctgcaagatcagccacagacctcatgctggacacaggagcccaggacatgcctgggtcctggctgatgactgattagtctcttctgtcacaggggtgcctggagaccccttaataagcagcataaataaatatctgacacagattggaggcctctggccac

SEQ ID NO: 350650 - DNA, 4196 bp, Homo sapiens
  misc_feature (55)..(55): n is a, c, g, or t
ggacgcgtggcgcaagcgcgagcggctgtgcgcggtgcggcggtgcgcggtgcgnggtgcgtggtgcgtgatacgagcggcggcgagcccccagcgcaggccgggatgttcgtcctggtggaaatggtggacaccgtccggatccccccttggcagtttgagaggaagctcaacgactccattgccgaggagctgaacaagaagttggccaacaaggtcgtgtacaacgtgggactctgcatttgtctgtttgatatcaccaaactggaggatgcctatgtattccctggggatggcgcatcacacaccaaagtccattttcgctgcgtggtgtttcatccattcctagatgagattctcattgggaagatcaaaggctgcagcccagaaggagtgcacgtctctctaggcttcttcgatgacattctcatccccccagagtcactgcagcagccagccaagttcgacgaagcggagcaggtgtgggtgtgggagtacgagacggaggaaggagcacacgacctctacatggacaccggcgaggagatccgcttccgggtggtggacgagagctttgttgacacgtcccccacagggcccagctcagcagatgccaccacttccagtgaggagctgccaaagaaggaggctccgtacacgcttgtgggatccatcagtgagccaggcctgggccttctctcctggtggaccagcaactagccctggggctggacagtggaccctaccagcctgcgggaaggtggtatggccggctgtgaagacaacagcagctgaggccgatgctaaggagatagtgtctcgagctggacagtgaggcaaggccaggagtgcccaccagcttgccccgctcctccaccatctaggccctgctcctccttcactgcagtgatggatccatctgtggctgtggctgttgggcctccactgaccttgactgaaaagacccttcctggaccctggacttgacaacaaacggcacagacaccaatcactcacagaacagtcactggttttggattcttgttttccttgcaagaacaaaaggttctctagaatccttcagccaccaatgaaatgatcaggcaggagaaaaactttagatgggagtcttgtcatcaaaaataaatacagttgcatggagctgcttaagatctgaaccaaactcaaaataggaagacgggggctaaaaagttattttaagaacccccccaccacaaccacagtcactccgtgggctaagcggggagcaggaagcatgtctggtcacaccatcttggaataggaagccatggctggacggatcggatccactgatggcacacgtggagctgaacttgacgccagcggcggggcggggaggcactgccctcactgttgcagttccttcattctgttgagggcactgccagcgcggaaccactcaatctgcgtctcgttgaaggtgtggttcaggaggatggtctcctgggtcccgttggggtgcttgatgatgcacttcaggggctgcaaggagaaggtgggtgtgggtggaagtggtgggtactgtgtgcccttggccccgcaggggggtcagggagacagggcactgcctggggacctaagaggtcagcaggcaaaccaaatcctaggccagtctgtgcctgatggcccaggtcagacccaggtggcacctacaggggattcctggggcccagagggtcctgcagtgggtgggctgtcccctgagtgccaggtcctggtgagtaaagggaggttggggaggtgtgagggccccgggttgactccaacccccaactctgagaagccactttgctttctctgtggggccacctggagaactgggggcctttccagctggaatgaagcctcctgggagaagctaccctggggccagtgcaggaggggaaacaaggtggctgcccctcaccccaccacctcagggggacccgggcccctaaccttgccaggggtgaagtccttcaggccctgaatggtcagcttgtccacagggtgaatcttgttgtagtcagccgggtcagcgaaggtcagaggcagcaggccctgtttcttcaggttggtctctggaaagcaggcggcattcggtcatcgggggcctgactagcctggagagcttcattttctgaacccatctggggctctgggagatgcccctaatcctgctgcctgggacaatgcccgggcagtgactatggggccctggtctgctccctttcactaggggtgcccctagcaagtgtgcgctggtgctgaggtctgcgaggccttcctgctgcacattcatgatcagaaagaaccccctggcacatgtcctagatctcagcggctcagatctacaagcctggaagcagggcctgcgggaagccgggaagctgagcgtcggatgtgcactgtgtgagcctaagaaggggcaagaggctgacgggcctgtgggctgcagtggacacagcctagaaccaggcccaactcagccacgggcagggagagtgaccttgatcactagggatgggatgaggatggcctgggtacagactccagctcaccgtggatcctggcaaagctcttggtgatgatggcccggcccccaaggtggcgaggctccagagctgcatgctcccggctcgagccctcgccgtagttctcgtctccgatcaccacccacctgatgccatgtttctgtcaggcaagcgggggtaaggttataaggcagaggagggcaccgtcctcacctgtctggccctacctgcctggcctcacccacctggcgcctgggcatcctgaggctcccggtaaaggggctggaggggcccttcctcgcctgctgcctaagggcaagtgaagcctgcgtgaatgagacccaaacgaggccccgaggggacagaggcacgtggttgtttgcagtggcaaagaagacagaagccacccattggtgcttggcagaggcaggtgtgtgtggagggaggttgggtgagacagggacggcctccgggccccacacaagatgcatctgtgaagctcaaggcgcccccttcctgggagcaccctctgccccacccagccaccagggggtgccagagtcctttcacccggctgggccaggacttgggttcagccctggttctgtttgtttctcaaagcagaaaaagtccaatcacctcagaccctctctgcctgctcactgtgaggccccgtgtagccccctctctgagcttttggcctctgacttcctgagtcggcccccttccttgtctttgtctagggccagatatcctaagatatctctcactaactcctcctggtgcagggacccggctgtaccaccggacctgggcctcatgccttctcagccacagggaggggctgcaggcctctcctcccttccacagcagtcccctttgggcttggtcggcctccttcccagtttccactcccctaatgtcctccctgcacctgccttgcaggccccttcaggagtgaccactggcattgcccctatcaactctgacccaccttgtagtagcgggcagtgtcagggacggggccaaactcctgagtgacggcattgcgcacggagttggccttgccgttttcaatgttgatggcaccaatgagcaggttgttggagatgttatccaagtgcccacggaacttgagccaggggccagcagctgagatgtggtcagtggtacacttccctttgaccttgggtggtaagtagagaggacagaggtcagggcatggccctggaggggtggatgacaagccctccagaggcaggcagcaggccccggggcccaggaggggtgacagaggggtgagaggcaggcaagtcttcagacacgtgttctgtggtcctggtgcttccaccctaaggccacatgggctcaggccaggccttcatcccctcaaaggcctctggctgctcagtctcccttatggggcagaggccgcccaaagttgggacaggtcaatgttcgctcacccttcaggcctcagctgcaagatcagccacagacctcatgctggacacaggagcccaggacatgcctgggtcctggctgatgactgattagtctcttctgtcacaggggtgcctggagaccccttaataagcagcataaataaatatctgacacagattggaggcctctggccac

SEQ ID NO: 350651 - DNA, 4535 bp, Homo sapiens
  misc_feature (55)..(55): n is a, c, g, or t
ggacgcgtggcgcaagcgcgagcggctgtgcgcggtgcggcggtgcgcggtgcgnggtgcgtggtgcgtgatacgagcggcggcacgtggcgcgggtgcggggcgtggagtggcgtggcgtggagtggcgtggcgtggcggggtctcgcggcgcgggcgcgcacccggagctgtggacggagagtgcctccctctggcctcagtttcctcatgttgtagtagcggagcatggcccggaccgggcccccgagaccgccccgtgcaacctcaccgccagcctgggggcctcagcgactgggacgggaccaaggggctcggggattctccctgcccccggccctggtgcgtgactgaccctcctgttcccagagcccccagcgcaggccgggatgttcgtcctggtggaaatggtggacaccgtccggatccccccttggcagtttgagaggaagctcaacgactccattgccgaggagctgaacaagaagttggccaacaaggtcgtgtacaacgtgggactctgcatttgtctgtttgatatcaccaaactggaggatgcctatgtattccctggggatggcgcatcacacaccaaagtccattttcgctgcgtggtgtttcatccattcctagatgagattctcattgggaagatcaaaggctgcagcccagaaggagtgcacggtaacagtggccctgacgcctcagacaagacttgggaacactgtgggggcaggagtctctctaggcttcttcgatgacattctcatccccccagagtcactgcagcagccagccaagttcgacgaagcggagcaggtgtgggtgtgggagtacgagacggaggaaggagcacacgacctctacatggacaccggcgaggagatccgcttccgggtggtggacgagagctttgttgacacgtcccccacagggcccagctcagcagatgccaccacttccagtgaggagctgccaaagaaggaggctccgtacacgcttgtgggatccatcagtgagccaggcctgggccttctctcctggtggaccagcaactagccctggggctggacagtggaccctaccagcctgcgggaaggtggtatggccggctgtgaagacaacagcagctgaggccgatgctaaggagatagtgtctcgagctggacagtgaggcaaggccaggagtgcccaccagcttgccccgctcctccaccatctaggccctgctcctccttcactgcagtgatggatccatctgtggctgtggctgttgggcctccactgaccttgactgaaaagacccttcctggaccctggacttgacaacaaacggcacagacaccaatcactcacagaacagtcactggttttggattcttgttttccttgcaagaacaaaaggttctctagaatccttcagccaccaatgaaatgatcaggcaggagaaaaactttagatgggagtcttgtcatcaaaaataaatacagttgcatggagctgcttaagatctgaaccaaactcaaaataggaagacgggggctaaaaagttattttaagaacccccccaccacaaccacagtcactccgtgggctaagcggggagcaggaagcatgtctggtcacaccatcttggaataggaagccatggctggacggatcggatccactgatggcacacgtggagctgaacttgacgccagcggcggggcggggaggcactgccctcactgttgcagttccttcattctgttgagggcactgccagcgcggaaccactcaatctgcgtctcgttgaaggtgtggttcaggaggatggtctcctgggtcccgttggggtgcttgatgatgcacttcaggggctgcaaggagaaggtgggtgtgggtggaagtggtgggtactgtgtgcccttggccccgcaggggggtcagggagacagggcactgcctggggacctaagaggtcagcaggcaaaccaaatcctaggccagtctgtgcctgatggcccaggtcagacccaggtggcacctacaggggattcctggggcccagagggtcctgcagtgggtgggctgtcccctgagtgccaggtcctggtgagtaaagggaggttggggaggtgtgagggccccgggttgactccaacccccaactctgagaagccactttgctttctctgtggggccacctggagaactgggggcctttccagctggaatgaagcctcctgggagaagctaccctggggccagtgcaggaggggaaacaaggtggctgcccctcaccccaccacctcagggggacccgggcccctaaccttgccaggggtgaagtccttcaggccctgaatggtcagcttgtccacagggtgaatcttgttgtagtcagccgggtcagcgaaggtcagaggcagcaggccctgtttcttcaggttggtctctggaaagcaggcggcattcggtcatcgggggcctgactagcctggagagcttcattttctgaacccatctggggctctgggagatgcccctaatcctgctgcctgggacaatgcccgggcagtgactatggggccctggtctgctccctttcactaggggtgcccctagcaagtgtgcgctggtgctgaggtctgcgaggccttcctgctgcacattcatgatcagaaagaaccccctggcacatgtcctagatctcagcggctcagatctacaagcctggaagcagggcctgcgggaagccgggaagctgagcgtcggatgtgcactgtgtgagcctaagaaggggcaagaggctgacgggcctgtgggctgcagtggacacagcctagaaccaggcccaactcagccacgggcagggagagtgaccttgatcactagggatgggatgaggatggcctgggtacagactccagctcaccgtggatcctggcaaagctcttggtgatgatggcccggcccccaaggtggcgaggctccagagctgcatgctcccggctcgagccctcgccgtagttctcgtctccgatcaccacccacctgatgccatgtttctgtcaggcaagcgggggtaaggttataaggcagaggagggcaccgtcctcacctgtctggccctacctgcctggcctcacccacctggcgcctgggcatcctgaggctcccggtaaaggggctggaggggcccttcctcgcctgctgcctaagggcaagtgaagcctgcgtgaatgagacccaaacgaggccccgaggggacagaggcacgtggttgtttgcagtggcaaagaagacagaagccacccattggtgcttggcagaggcaggtgtgtgtggagggaggttgggtgagacagggacggcctccgggccccacacaagatgcatctgtgaagctcaaggcgcccccttcctgggagcaccctctgccccacccagccaccagggggtgccagagtcctttcacccggctgggccaggacttgggttcagccctggttctgtttgtttctcaaagcagaaaaagtccaatcacctcagaccctctctgcctgctcactgtgaggccccgtgtagccccctctctgagcttttggcctctgacttcctgagtcggcccccttccttgtctttgtctagggccagatatcctaagatatctctcactaactcctcctggtgcagggacccggctgtaccaccggacctgggcctcatgccttctcagccacagggaggggctgcaggcctctcctcccttccacagcagtcccctttgggcttggtcggcctccttcccagtttccactcccctaatgtcctccctgcacctgccttgcaggccccttcaggagtgaccactggcattgcccctatcaactctgacccaccttgtagtagcgggcagtgtcagggacggggccaaactcctgagtgacggcattgcgcacggagttggccttgccgttttcaatgttgatggcaccaatgagcaggttgttggagatgttatccaagtgcccacggaacttgagccaggggccagcagctgagatgtggtcagtggtacacttccctttgaccttgggtggtaagtagagaggacagaggtcagggcatggccctggaggggtggatgacaagccctccagaggcaggcagcaggccccggggcccaggaggggtgacagaggggtgagaggcaggcaagtcttcagacacgtgttctgtggtcctggtgcttccaccctaaggccacatgggctcaggccaggccttcatcccctcaaaggcctctggctgctcagtctcccttatggggcagaggccgcccaaagttgggacaggtcaatgttcgctcacccttcaggcctcagctgcaagatcagccacagacctcatgctggacacaggagcccaggacatgcctgggtcctggctgatgactgattagtctcttctgtcacaggggtgcctggagaccccttaataagcagcataaataaatatctgacacagattggaggcctctggccac

SEQ ID NO: 350652 - DNA, 3939 bp, Homo sapiens
gtgtcatctggtatctcttcatattcatagtcatcttcagatgcttcagttatggtgacctgttccaggtagtaggcgccctcagcctgccaccgctgtctgcctgtgtccctcgctgtcccggctgccgtcaaacccatgcccaacgcctcttccaggaccctcacggcggagctgggcatccctcgctgagcagccagccaagttcgacgaagcggagcaggtgtgggtgtgggagtacgagacggaggaaggagcacacgacctctacatggacaccggcgaggagatccgcttccgggtggtggacgagagctttgttgacacgtcccccacagggcccagctcagcagatgccaccacttccagtgaggagctgccaaagaaggaggctccgtacacgcttgtgggatccatcagtgagccaggcctgggccttctctcctggtggaccagcaactagccctggggctggacagtggaccctaccagcctgcgggaaggtggtatggccggctgtgaagacaacagcagctgaggccgatgctaaggagatagtgtctcgagctggacagtgaggcaaggccaggagtgcccaccagcttgccccgctcctccaccatctaggccctgctcctccttcactgcagtgatggatccatctgtggctgtggctgttgggcctccactgaccttgactgaaaagacccttcctggaccctggacttgacaacaaacggcacagacaccaatcactcacagaacagtcactggttttggattcttgttttccttgcaagaacaaaaggttctctagaatccttcagccaccaatgaaatgatcaggcaggagaaaaactttagatgggagtcttgtcatcaaaaataaatacagttgcatggagctgcttaagatctgaaccaaactcaaaataggaagacgggggctaaaaagttattttaagaacccccccaccacaaccacagtcactccgtgggctaagcggggagcaggaagcatgtctggtcacaccatcttggaataggaagccatggctggacggatcggatccactgatggcacacgtggagctgaacttgacgccagcggcggggcggggaggcactgccctcactgttgcagttccttcattctgttgagggcactgccagcgcggaaccactcaatctgcgtctcgttgaaggtgtggttcaggaggatggtctcctgggtcccgttggggtgcttgatgatgcacttcaggggctgcaaggagaaggtgggtgtgggtggaagtggtgggtactgtgtgcccttggccccgcaggggggtcagggagacagggcactgcctggggacctaagaggtcagcaggcaaaccaaatcctaggccagtctgtgcctgatggcccaggtcagacccaggtggcacctacaggggattcctggggcccagagggtcctgcagtgggtgggctgtcccctgagtgccaggtcctggtgagtaaagggaggttggggaggtgtgagggccccgggttgactccaacccccaactctgagaagccactttgctttctctgtggggccacctggagaactgggggcctttccagctggaatgaagcctcctgggagaagctaccctggggccagtgcaggaggggaaacaaggtggctgcccctcaccccaccacctcagggggacccgggcccctaaccttgccaggggtgaagtccttcaggccctgaatggtcagcttgtccacagggtgaatcttgttgtagtcagccgggtcagcgaaggtcagaggcagcaggccctgtttcttcaggttggtctctggaaagcaggcggcattcggtcatcgggggcctgactagcctggagagcttcattttctgaacccatctggggctctgggagatgcccctaatcctgctgcctgggacaatgcccgggcagtgactatggggccctggtctgctccctttcactaggggtgcccctagcaagtgtgcgctggtgctgaggtctgcgaggccttcctgctgcacattcatgatcagaaagaaccccctggcacatgtcctagatctcagcggctcagatctacaagcctggaagcagggcctgcgggaagccgggaagctgagcgtcggatgtgcactgtgtgagcctaagaaggggcaagaggctgacgggcctgtgggctgcagtggacacagcctagaaccaggcccaactcagccacgggcagggagagtgaccttgatcactagggatgggatgaggatggcctgggtacagactccagctcaccgtggatcctggcaaagctcttggtgatgatggcccggcccccaaggtggcgaggctccagagctgcatgctcccggctcgagccctcgccgtagttctcgtctccgatcaccacccacctgatgccatgtttctgtcaggcaagcgggggtaaggttataaggcagaggagggcaccgtcctcacctgtctggccctacctgcctggcctcacccacctggcgcctgggcatcctgaggctcccggtaaaggggctggaggggcccttcctcgcctgctgcctaagggcaagtgaagcctgcgtgaatgagacccaaacgaggccccgaggggacagaggcacgtggttgtttgcagtggcaaagaagacagaagccacccattggtgcttggcagaggcaggtgtgtgtggagggaggttgggtgagacagggacggcctccgggccccacacaagatgcatctgtgaagctcaaggcgcccccttcctgggagcaccctctgccccacccagccaccagggggtgccagagtcctttcacccggctgggccaggacttgggttcagccctggttctgtttgtttctcaaagcagaaaaagtccaatcacctcagaccctctctgcctgctcactgtgaggccccgtgtagccccctctctgagcttttggcctctgacttcctgagtcggcccccttccttgtctttgtctagggccagatatcctaagatatctctcactaactcctcctggtgcagggacccggctgtaccaccggacctgggcctcatgccttctcagccacagggaggggctgcaggcctctcctcccttccacagcagtcccctttgggcttggtcggcctccttcccagtttccactcccctaatgtcctccctgcacctgccttgcaggccccttcaggagtgaccactggcattgcccctatcaactctgacccaccttgtagtagcgggcagtgtcagggacggggccaaactcctgagtgacggcattgcgcacggagttggccttgccgttttcaatgttgatggcaccaatgagcaggttgttggagatgttatccaagtgcccacggaacttgagccaggggccagcagctgagatgtggtcagtggtacacttccctttgaccttgggtggtaagtagagaggacagaggtcagggcatggccctggaggggtggatgacaagccctccagaggcaggcagcaggccccggggcccaggaggggtgacagaggggtgagaggcaggcaagtcttcagacacgtgttctgtggtcctggtgcttccaccctaaggccacatgggctcaggccaggccttcatcccctcaaaggcctctggctgctcagtctcccttatggggcagaggccgcccaaagttgggacaggtcaatgttcgctcacccttcaggcctcagctgcaagatcagccacagacctcatgctggacacaggagcccaggacatgcctgggtcctggctgatgactgattagtctcttctgtcacaggggtgcctggagaccccttaataagcagcataaataaatatctgacacagattggaggcctctggccac

SEQ ID NO: 350653 - DNA, 3061 bp, Homo sapiens
  misc_feature (55)..(55): n is a, c, g, or t
ggacgcgtggcgcaagcgcgagcggctgtgcgcggtgcggcggtgcgcggtgcgnggtgcgtggtgcgtgatacgagcggcggcacgtggcgcgggtgcggggcgtggagtggcgtggcgtggagtggcgtggcgtggcggggtctcgcggcgcgggcgcgcacccggagctgtggacggagagtgcctccctctggcctcagtttcctcatgttgtagtagcggagcatggcccggaccgggcccccgagaccgccccgtgcaacctcaccgccagcctgggggcctcagcgactgggacgggaccaaggggctcggggattctccctgcccccggccctggtgcgtgactgaccctcctgttcccagagcccccagcgcaggccgggatgttcgtcctggtggaaatggtggacaccgtccggatccccccttggcagtttgagaggaagctcaacgactccattgccgaggagctgaacaagaagttggccaacaaggtcgtgtacaacgtgggactctgcatttgtctgtttgatatcaccaaactggaggatgcctatgtattccctggggatggcgcatcacacaccaaagtccattttcgctgcgtggtgtttcatccattcctagatgagattctcattgggaagatcaaaggctgcagcccagaaggagtgcacgtctctctaggcttcttcgatgacattctcatccccccagagtcactgcagcagccagccaagttcgacgaagcggagcaggtgtgggtgtgggagtacgagacggaggaaggagcacacgacctctacatggacaccggcgaggagatccgcttccgggtggtggacgagagctttgttgacacgtcccccacagggcccagctcagcagatgccaccacttccagtgaggagctgccaaagaaggaggctccgtacacgcttgtgggatccatcagtgagccaggcctgggccttctctcctggtggaccagcaactagccctggggctggacagtggaccctaccagcctgcgggaaggtggtatggccggctgtgaagacaacagcagctgaggccgatgctaaggagatagtgtctcgagctggacagtgaggcaaggccaggagtgcccaccagcttgccccgctcctccaccatctaggccctgctcctccttcactgcagtgatggatccatctgtggctgtggctgttgggcctccactgaccttgactgaaaagacccttcctggaccctggacttgacaacaaacggcacagacaccaatcactcacagaacagtcactggttttggattcttgttttccttgcaagaacaaaaggttctctagaatccttcagccaccaatgaaatgatcaggcaggagaaaaactttagatgggagtcttgtcatcaaaaataaatacagttgcatggagctgcttaagatctgaaccaaactcaaaataggaagacgggggctaaaaagttattttaagaacccccccaccacaaccacagtcactccgtgggctaagcggggagcaggaagcatgtctggtcacaccatcttggaataggaagccatggctggacggatcggatccactgatggcacacgtggagctgaacttgacgccagcggcggggcggggaggcactgccctcactgttgcagttccttcattctgttgagggcactgccagcgcggaaccactcaatctgcgtctcgttgaaggtgtggttcaggaggatggtctcctgggtcccgttggggtgcttgatgatgcacttcaggggctgcaaggagaaggtgggtgtgggtggaagtggtgggtactgtgtgcccttggccccgcaggggggtcagggagacagggcactgcctggggacctaagaggtcagcaggcaaaccaaatcctaggccagtctgtgcctgatggcccaggtcagacccaggtggcacctacaggggattcctggggcccagagggtcctgcagtgggtgggctgtcccctgagtgccaggtcctggtgagtaaagggaggttggggaggtgtgagggccccgggttgactccaacccccaactctgagaagccactttgctttctctgtggggccacctggagaactgggggcctttccagctggaatgaagcctcctgggagaagctaccctggggccagtgcaggaggggaaacaaggtggctgcccctcaccccaccacctcagggggacccgggcccctaaccttgccaggggtgaagtccttcaggccctgaatggtcagcttgtccacagggtgaatcttgttgtagtcagccgggtcagcgaaggtcagaggcagcaggccctgtttcttcaggttggtctctggaaagcaggcggcattcggtcatcgggggcctgactagcctggagagcttcattttctgaacccatctggggctctgggagatgcccctaatcctgctgcctgggacaatgcccgggcagtgactatggggccctggtctgctccctttcactaggggtgcccctagcaagtgtgcgctggtgctgaggtctgcgaggccttcctgctgcacattcatgatcagaaagaaccccctggcacatgtctgcaagatcagccacagacctcatgctggacacaggagcccaggacatgcctgggtcctggctgatgactgattagtctcttctgtcacaggggtgcctggagaccccttaataagcagcataaataaatatctgacacagattggaggcctctggccacaccaaaaggcttgtttttggtcggtgccaaacacaagccatcccatatccacgggtgcccaactgtgggggcaggagttgtccatggcttccagagcctgtgtggacgtgccaggtgtggagcctgctgtgcaatcacacacactgtcccagcccagcctgagctgtactcacctgcccacacccactggaggtggctctgatcagctgctgctggatggctgagggccccagacggaggctggccagatctagctctgcccagtt

SEQ ID NO: 350654 - DNA, 845 bp, Homo sapiens
  misc_feature (55)..(55): n is a, c, g, or t
  misc_feature (772)..(773): n is a, c, g, or t
  misc_feature (780)..(780): n is a, c, g, or t
  misc_feature (782)..(782): n is a, c, g, or t
  misc_feature (795)..(795): n is a, c, g, or t
  misc_feature (814)..(814): n is a, c, g, or t
  misc_feature (819)..(819): n is a, c, g, or t
ggacgcgtggcgcaagcgcgagcggctgtgcgcggtgcggcggtgcgcggtgcgnggtgcgtggtgcgtgatacgagcggcggcacgtggcgcgggtgcggggcgtggagtggcgtggcgtggagtggcgtggcgtggcggggtctcgcggcgcgggcgcgcacccggagctgtggacggagagtgcctccctctggcctcagtttcctcatgttgtagtagcggagcatggcccggaccgggcccccgagaccgccccgtgcaacctcaccgccagcctgggggcctcagcgactgggacgggaccaaggggctcggggattctccctgcccccggccctggtgcgtgactgaccctcctgttcccagagcccccagcgcaggccgggatgttcgtcctggtggaaatggtggacaccgtccggatccccccttggcagtttgagaggaagctcaacgactccattgccgaggagctgaacaagaagttggccaacaaggtcgtgtacaacgtgggactctgcatttgtctgtttgatatcaccaaactggaggatgcctatgtattccctggggatggcgcatcacacaccaaagtccattttcgctgcgtggtgtttcatccattcctagatgagattctcattgggaagatcaaaggctgcagcccagaaggagtgcacgtctctctaggcttcttcgatgacattctcatccccccagagtcactgcagcagccagccaagttcgacgaagcggagcagtgtggttnnggagtcnanacgggaggagccngactctactgcccgggagnaaccntcggggtggccaacttgtgagtccca

SEQ ID NO: 350655 - DNA, 491 bp, Homo sapiens
gcagggcttgcctgtcaagcataagaccccgcagtgtttggcgtccactgggacccccatctcaggccgtcacctgcttccttccttccagtctctctaggcttcttcgatgacattctcatccccccagagtcactgcagcagccagccaagttgtatcctccaagggttaaagtggtttgtcacagggagctcaggcctctccaaaggaaggtccccactccttagggtggcctttggggcctgtaacctgatgtcactggcctctgtgcctgcccctcgcctgtgcttttgctccagaggcaccagcctgtctgtgcctcccatgcagggagtcatgtgatgcccacatgcctgtctttgtcggggccatcaggcttggctgtctgggttgtacactgcacaccattagagctgtggtgtcctgggggacaccattcacttccggttcacttcacttaggttgtccctgcaggaatcatcttaaagat

SEQ ID NO: 350656 - DNA, 4746 bp, Homo sapiens
  misc_feature (55)..(55): n is a, c, g, or t
ggacgcgtggcgcaagcgcgagcggctgtgcgcggtgcggcggtgcgcggtgcgnggtgcgtggtgcgtgatacgagcggcggcacgtggcgcgggtgcggggcgtggagtggcgtggcgtggagtggcgtggcgtggcggggtctcgcggcgcgggcgcgcacccggagctgtggacggagagtgcctccctctggcctcagtttcctcatgttgtagtagcggagcatggcccggaccgggcccccgagaccgccccgtgcaacctcaccgccagcctgggggcctcagcgactgggacgggaccaaggggctcggggattctccctgcccccggccctggtgcgtgactgaccctcctgttcccagagcccccagcgcaggccgggatgttcgtcctggtggaaatggtggacaccgtccggatccccccttggcagtttgagaggaagctcaacgactccattgccgaggagctgaacaagaagttggccaacaaggtcgtgtacaacgtgggactctgcatttgtctgtttgatatcaccaaactggaggatgcctatgtattccctggggatggcgcatcacacaccaaagtccattttcgctgcgtggtgtttcatccattcctagatgagattctcattgggaagatcaaaggctgcagcccagaaggagtgcacgtctctctaggcttcttcgatgacattctcatccccccagagtcactgcagcagccagccaagttcgacgaagcggagcaggtgtgggtgtgggagtacgagacggaggaaggagcacacgacctctacatggacaccggcgaggagatccgcttccgggtggtggacgagagctttgttgacacgtcccccacagggcccagctcagcagatgccaccacttccagtgaggagctgccaaagaaggaggctccgtacacgcttgtgggatccatcagtgagccaggcctgggccttctctcctggtggaccagcaactagccctggggctggacagtggaccctaccagcctgcgggaaggtggtatggccggctgtgaagacaacagcagctgaggccgatgctaaggagatagtgtctcgagctggacagtgaggcaaggccaggagtgcccaccagcttgccccgctcctccaccatctaggccctgctcctccttcactgcagtgatggatccatctgtggctgtggctgttgggcctccactgaccttgactgaaaagacccttcctggaccctggacttgacaacaaacggcacagacaccaatcactcacagaacagtcactggttttggattcttgttttccttgcaagaacaaaaggttctctagaatccttcagccaccaatgaaatgatcaggcaggagaaaaactttagatgggagtcttgtcatcaaaaataaatacagttgcatggagctgcttaagatctgaaccaaactcaaaataggaagacgggggctaaaaagttattttaagaacccccccaccacaaccacagtcactccgtgggctaagcggggagcaggaagcatgtctggtcacaccatcttggaataggaagccatggctggacggatcggatccactgatggcacacgtggagctgaacttgacgccagcggcggggcggggaggcactgccctcactgttgcagttccttcattctgttgagggcactgccagcgcggaaccactcaatctgcgtctcgttgaaggtgtggttcaggaggatggtctcctgggtcccgttggggtgcttgatgatgcacttcaggggctgcaaggagaaggtgggtgtgggtggaagtggtgggtactgtgtgcccttggccccgcaggggggtcagggagacagggcactgcctggggacctaagaggtcagcaggcaaaccaaatcctaggccagtctgtgcctgatggcccaggtcagacccaggtggcacctacaggggattcctggggcccagagggtcctgcagtgggtgggctgtcccctgagtgccaggtcctggtgagtaaagggaggttggggaggtgtgagggccccgggttgactccaacccccaactctgagaagccactttgctttctctgtggggccacctggagaactgggggcctttccagctggaatgaagcctcctgggagaagctaccctggggccagtgcaggaggggaaacaaggtggctgcccctcaccccaccacctcagggggacccgggcccctaaccttgccaggggtgaagtccttcaggccctgaatggtcagcttgtccacagggtgaatcttgttgtagtcagccgggtcagcgaaggtcagaggcagcaggccctgtttcttcaggttggtctctggaaagcaggcggcattcggtcatcgggggcctgactagcctggagagcttcattttctgaacccatctggggctctgggagatgcccctaatcctgctgcctgggacaatgcccgggcagtgactatggggccctggtctgctccctttcactaggggtgcccctagcaagtgtgcgctggtgctgaggtctgcgaggccttcctgctgcacattcatgatcagaaagaaccccctggcacatgtcctagatctcagcggctcagatctacaagcctggaagcagggcctgcgggaagccgggaagctgagcgtcggatgtgcactgtgtgagcctaagaaggggcaagaggctgacgggcctgtgggctgcagtggacacagcctagaaccaggcccaactcagccacgggcagggagagtgaccttgatcactagggatgggatgaggatggcctgggtacagactccagctcaccgtggatcctggcaaagctcttggtgatgatggcccggcccccaaggtggcgaggctccagagctgcatgctcccggctcgagccctcgccgtagttctcgtctccgatcaccacccacctgatgccatgtttctgtcaggcaagcgggggtaaggttataaggcagaggagggcaccgtcctcacctgtctggccctacctgcctggcctcacccacctggcgcctgggcatcctgaggctcccggtaaaggggctggaggggcccttcctcgcctgctgcctaagggcaagtgaagcctgcgtgaatgagacccaaacgaggccccgaggggacagaggcacgtggttgtttgcagtggcaaagaagacagaagccacccattggtgcttggcagaggcaggtgtgtgtggagggaggttgggtgagacagggacggcctccgggccccacacaagatgcatctgtgaagctcaaggcgcccccttcctgggagcaccctctgccccacccagccaccagggggtgccagagtcctttcacccggctgggccaggacttgggttcagccctggttctgtttgtttctcaaagcagaaaaagtccaatcacctcagaccctctctgcctgctcactgtgaggccccgtgtagccccctctctgagcttttggcctctgacttcctgagtcggcccccttccttgtctttgtctagggccagatatcctaagatatctctcactaactcctcctggtgcagggacccggctgtaccaccggacctgggcctcatgccttctcagccacagggaggggctgcaggcctctcctcccttccacagcagtcccctttgggcttggtcggcctccttcccagtttccactcccctaatgtcctccctgcacctgccttgcaggccccttcaggagtgaccactggcattgcccctatcaactctgacccaccttgtagtagcgggcagtgtcagggacggggccaaactcctgagtgacggcattgcgcacggagttggccttgccgttttcaatgttgatggcaccaatgagcaggttgttggagatgttatccaagtgcccacggaacttgagccaggggccagcagctgagatgtggtcagtggtacacttccctttgaccttgggtggtaagtagagaggacagaggtcagggcatggccctggaggggtggatgacaagccctccagaggcaggcagcaggccccggggcccaggaggggtgacagaggggtgagaggcaggcaagtcttcagacacgtgttctgtggtcctggtgcttccaccctaaggccacatgggctcaggccaggccttcatcccctcaaaggcctctggctgctcagtctcccttatggggcagaggccgcccaaagttgggacaggtcaatgttcgctcacccttcaggcctcagctgcaagatcagccacagacctcatgctggacacaggagcccaggacatgcctgggtcctggctgatgactgattagtctcttctgtcacaggggtgcctggagaccccttaataagcagcataaataaatatctgacacagattggaggcctctggccacaccaaaaggcttgtttttggtcggtgccaaacacaagccatcccatatccacgggtgcccaactgtgggggcaggagttgtccatggcttccagagcctgtgtggacgtgccaggtgtggagcctgctgtgcaatcacacacactgtcccagcccagcctgagctgtactcacctgcccacacccactggaggtggctctgatcagctgctgctggatggctgagggccccagacggaggctggccagatctagctctgcccagtt

SEQ ID NO: 350657 - DNA, 4304 bp, Homo sapiens
  misc_feature (55)..(55): n is a, c, g, or t
ggacgcgtggcgcaagcgcgagcggctgtgcgcggtgcggcggtgcgcggtgcgnggtgcgtggtgcgtgatacgagcggcggcacgtggcgcgggtgcggggcgtggagtggcgtggcgtggagtggcgtggcgtggcggggtctcgcggcgcgggcgcgcacccggagctgtggacggagagtgcctccctctggcctcagtttcctcatgttgtagtagcggagcatggcccggaccgggcccccgagaccgccccgtgcaacctcaccgccagcctgggggcctcagcgactgggacgggaccaaggggctcggggattctccctgcccccggccctggtgcgtgactgaccctcctgttcccagagcccccagcgcaggccgggatgttcgtcctggtggaaatggtggacaccgtccggatccccccttggcagtttgagaggaagctcaacgactccattgccgaggagctgaacaagaagttggccaacaagtgttctttcaggcttctttcgatgcacatttttcattcccccccagagtcaattgcagcagccagccaagttcgacgaagcggagcaggtgtgggtgtgggagtacgagacggaggaaggagcacacgacctctacatggacaccggcgaggagatccgcttccgggtggtggacgagagctttgttgacacgtcccccacagggcccagctcagcagatgccaccacttccagtgaggagctgccaaagaaggaggctccgtacacgcttgtgggatccatcagtgagccaggcctgggccttctctcctggtggaccagcaactagccctggggctggacagtggaccctaccagcctgcgggaaggtggtatggccggctgtgaagacaacagcagctgaggccgatgctaaggagatagtgtctcgagctggacagtgaggcaaggccaggagtgcccaccagcttgccccgctcctccaccatctaggccctgctcctccttcactgcagtgatggatccatctgtggctgtggctgttgggcctccactgaccttgactgaaaagacccttcctggaccctggacttgacaacaaacggcacagacaccaatcactcacagaacagtcactggttttggattcttgttttccttgcaagaacaaaaggttctctagaatccttcagccaccaatgaaatgatcaggcaggagaaaaactttagatgggagtcttgtcatcaaaaataaatacagttgcatggagctgcttaagatctgaaccaaactcaaaataggaagacgggggctaaaaagttattttaagaacccccccaccacaaccacagtcactccgtgggctaagcggggagcaggaagcatgtctggtcacaccatcttggaataggaagccatggctggacggatcggatccactgatggcacacgtggagctgaacttgacgccagcggcggggcggggaggcactgccctcactgttgcagttccttcattctgttgagggcactgccagcgcggaaccactcaatctgcgtctcgttgaaggtgtggttcaggaggatggtctcctgggtcccgttggggtgcttgatgatgcacttcaggggctgcaaggagaaggtgggtgtgggtggaagtggtgggtactgtgtgcccttggccccgcaggggggtcagggagacagggcactgcctggggacctaagaggtcagcaggcaaaccaaatcctaggccagtctgtgcctgatggcccaggtcagacccaggtggcacctacaggggattcctggggcccagagggtcctgcagtgggtgggctgtcccctgagtgccaggtcctggtgagtaaagggaggttggggaggtgtgagggccccgggttgactccaacccccaactctgagaagccactttgctttctctgtggggccacctggagaactgggggcctttccagctggaatgaagcctcctgggagaagctaccctggggccagtgcaggaggggaaacaaggtggctgcccctcaccccaccacctcagggggacccgggcccctaaccttgccaggggtgaagtccttcaggccctgaatggtcagcttgtccacagggtgaatcttgttgtagtcagccgggtcagcgaaggtcagaggcagcaggccctgtttcttcaggttggtctctggaaagcaggcggcattcggtcatcgggggcctgactagcctggagagcttcattttctgaacccatctggggctctgggagatgcccctaatcctgctgcctgggacaatgcccgggcagtgactatggggccctggtctgctccctttcactaggggtgcccctagcaagtgtgcgctggtgctgaggtctgcgaggccttcctgctgcacattcatgatcagaaagaaccccctggcacatgtcctagatctcagcggctcagatctacaagcctggaagcagggcctgcgggaagccgggaagctgagcgtcggatgtgcactgtgtgagcctaagaaggggcaagaggctgacgggcctgtgggctgcagtggacacagcctagaaccaggcccaactcagccacgggcagggagagtgaccttgatcactagggatgggatgaggatggcctgggtacagactccagctcaccgtggatcctggcaaagctcttggtgatgatggcccggcccccaaggtggcgaggctccagagctgcatgctcccggctcgagccctcgccgtagttctcgtctccgatcaccacccacctgatgccatgtttctgtcaggcaagcgggggtaaggttataaggcagaggagggcaccgtcctcacctgtctggccctacctgcctggcctcacccacctggcgcctgggcatcctgaggctcccggtaaaggggctggaggggcccttcctcgcctgctgcctaagggcaagtgaagcctgcgtgaatgagacccaaacgaggccccgaggggacagaggcacgtggttgtttgcagtggcaaagaagacagaagccacccattggtgcttggcagaggcaggtgtgtgtggagggaggttgggtgagacagggacggcctccgggccccacacaagatgcatctgtgaagctcaaggcgcccccttcctgggagcaccctctgccccacccagccaccagggggtgccagagtcctttcacccggctgggccaggacttgggttcagccctggttctgtttgtttctcaaagcagaaaaagtccaatcacctcagaccctctctgcctgctcactgtgaggccccgtgtagccccctctctgagcttttggcctctgacttcctgagtcggcccccttccttgtctttgtctagggccagatatcctaagatatctctcactaactcctcctggtgcagggacccggctgtaccaccggacctgggcctcatgccttctcagccacagggaggggctgcaggcctctcctcccttccacagcagtcccctttgggcttggtcggcctccttcccagtttccactcccctaatgtcctccctgcacctgccttgcaggccccttcaggagtgaccactggcattgcccctatcaactctgacccaccttgtagtagcgggcagtgtcagggacggggccaaactcctgagtgacggcattgcgcacggagttggccttgccgttttcaatgttgatggcaccaatgagcaggttgttggagatgttatccaagtgcccacggaacttgagccaggggccagcagctgagatgtggtcagtggtacacttccctttgaccttgggtggtaagtagagaggacagaggtcagggcatggccctggaggggtggatgacaagccctccagaggcaggcagcaggccccggggcccaggaggggtgacagaggggtgagaggcaggcaagtcttcagacacgtgttctgtggtcctggtgcttccaccctaaggccacatgggctcaggccaggccttcatcccctcaaaggcctctggctgctcagtctcccttatggggcagaggccgcccaaagttgggacaggtcaatgttcgctcacccttcaggcctcagctgcaagatcagccacagacctcatgctggacacaggagcccaggacatgcctgggtcctggctgatgactgattagtctcttctgtcacaggggtgcctggagaccccttaataagcagcataaataaatatctgacacagattggaggcctctggccac

SEQ ID NO: 350658 - DNA, 1452 bp, Homo sapiens
  misc_feature (55)..(55): n is a, c, g, or t
ggacgcgtggcgcaagcgcgagcggctgtgcgcggtgcggcggtgcgcggtgcgnggtgcgtggtgcgtgatacgagcggcggcacgtggcgcgggtgcggggcgtggagtggcgtggcgtggagtggcgtggcgtggcggggtctcgcggcgcgggcgcgcacccggagctgtggacggagagtgcctccctctggcctcagtttcctcatgttgtagtagcggagcatggcccggaccgggcccccgagaccgccccgtgcaacctcaccgccagcctgggggcctcagcgactgggacgggaccaaggggctcggggattctccctgcccccggccctggtgcgtgactgaccctcctgttcccagagcccccagcgcaggccgggatgttcgtcctggtggaaatggtggacaccgtccggatccccccttggcagtttgagaggaagctcaacgactccattgccgaggagctgaacaagaagttggccaacaaggtcgtgtacaacgtgggactctgcatttgtctgtttgatatcaccaaactggaggatgcctatgtattccctggggatggcgcatcacacaccaaagtccattttcgctgcgtggtgtttcatccattcctagatgagattctcattgggaagatcaaaggctgcagcccagaaggagtgcacgtctctctaggcttcttcgatgacattctcatccccccagagtcactgcagcagccagccaagttcgacgaagcggagcaggtgtgggtgtgggagtacgagacggaggaaggagcacacgacctctacatggacaccggcgaggagatccgcttccgggtggtggacgagagctttgttgacacgtcccccacagggcccagctcagcagatgccaccacttccagtgaggagctgccaaagaaggaggctccgtacacgcttgtgggatccatcagtgagccaggcctgggccttctctcctggtggaccagcaactagccctggggctggacagtggaccctaccagcctgcgggaaggtggtatggccggctgtgaagacaacagcagctgaggccgatgctaaggagatagtgtctcgagctggacagtgaggcaagtcttcagacacgtgttctgtggtcctggtgcttccaccctaaggccacatgggctcaggccaggccttcatcccctcaaaggcctctggctgctcagtctcccttatggggcagaggccgcccaaagttgggacaggtcaatgttcgctcacccttcaggcctcagctgcaagatcagccacagacctcatgctggacacaggagcccaggacatgcctgggtcctggctgatgactgattagtctcttctgtcacaggggtgcctggagaccccttaataagcagcataaataaatatctgacacagattggaggcctctggccac

SEQ ID NO: 350659 - DNA, 1566 bp, Homo sapiens
aaaacataaaatattcataagtagaatcactgacagtggcagctatgaacaaaatcttccatatattcccataggttaagaatgtctgaggggtcaggcggtgctggcaagatggctgcacttgagaagatgacgtttcccaagaagatgacatttccagagaaaccaagccacaaaaagtacagggccgccctgaagaaggagaaacgaaagaaacgtcggcaggaacttgctcgactgagagactcaggactctcacaggaggaggaagaggacacttttattgaagaacaacaactagaagaagagaagctattggaaagagagagggaaagattacatgaggagtggttgctgagggagcagaaggcacaagaagaattcagaataaagaaggaaaaggaagaggcggctaaaaaatggctagaagaacaagagagaaagttaaaggaacaatggaaagaacagcagaggaaagagagagaagaggaggagcagaaacaacaggagaagaaagaaaaagaggaagctgtgcagaagatgctggatcaggctgaaaatgatttagaaaatagtaccacatggcaaaacccagaaccacccgtggatttcagagtaatggagaaggatcgagctaattgtcccttctacagtaaaacaggagcttgcagatttggagacagatgttcacgtaaacataatttcccaacatctagtcctacccttcttattaagagcatgtttacaacgtttggaatggagcagtgcaggagggatgactatgaccctgacgcaagcctggagtacagcgaggaagaaacctaccaacagttcctagatttctatgaggatgtgttgcccgagttcaagaacgtggggaaagtgattcagttcaaggtcagctgcaatttggaacctcacctgaggggcaatgtatatgttcagtaccagtcggaagaagaatgccaagcagccctttctctgtttaacggacgatggtatgcaggacgacagctgcaatgtgaattctgcccagtgacccggtggaaaatggcgatttgtggtttatttgaaatacaacaatgtccaagaggaaaacactgcaactttcttcatgtgttcagaaatcccaacaatgaattctgggaagctaatagagacatctacttgtcttcagatcagactggctcctcctttggcaagaactccgagaggagggagaagatgggccaccacgaccactactacagcaggcagcggggaaggagaaaccctagtccagaccacacctacaaaagaaatggggaatccgagagaaaaaagagtagtcatagggggaagaaatctcacaaacgcacatcaaagagtcgggagaggcacaattcaccaagcagaggaagaaataggcaccgcagctgggaccagggccgccggagccagagccgcaggagccaccgcagccggagccaaagttcctctaggtgccgaagtcgtgggaggaggaagtcgggtaatagagacagaactgttcagagtccccaatccaaataaactagttttgttctt

SEQ ID NO: 350660 - DNA, 1777 bp, Homo sapiens
cagagccgggttcctcccgggtttctgccgggtttctccctgcggctcctgggttgttgagactcttgtgaagatggcttgcgctgccgcgcggtccccggccgaccaggacaggtttatttgtatctatcctgcttatttaaataataagaagaccatcgcagagggaaggcgaatccccataagtaagtgtttatgtttttaactgttcaggctgttgaaaatcctacagctacagagattcaagatgtatgttcagcagttggacttaacgtatttcttgaggttaagaatgtctgaggggtcaggcggtgctggcaagatggctgcacttgagaagatgacgtttcccaagaagatgacatttccagagaaaccaagccacaaaaagtacagggccgccctgaagaaggagaaacgaaagaaacgtcggcaggaacttgctcgactgagagactcaggactctcacaggaggaggaagaggacacttttattgaagaacaacaactagaagaagagaagctattggaaagagagagggaaagattacatgaggagtggttgctgagggagcagaaggcacaagaagaattcagaataaagaaggaaaaggaagaggcggctaaaaaatggctagaagaacaagagagaaagttaaaggaacaatggaaagaacagcagaggaaagagagagaagaggaggagcagaaacaacaggagaagaaagaaaaagaggaagctgtgcagaagatgctggatcaggctgaaaatgatttagaaaatagtaccacatggcaaaacccagaaccacccgtggatttcagagtaatggagaaggatcgagctaattgtcccttctacagtaaaacaggagcttgcagatttggagacagatgttcacgtaaacataatttcccaacatctagtcctacccttcttattaagagcatgtttacaacgtttggaatggagcagtgcaggagggatgactatgaccctgacgcaagcctggagtacagcgaggaagaaacctaccaacagttcctagatttctatgaggatgtgttgcccgagttcaagaacgtggggaaagtgattcagttcaaggtcagctgcaatttggaacctcacctgaggggcaatgtatatgttcagtaccagtcggaagaagaatgccaagcagccctttctctgtttaacggacgatggtatgcaggacgacagctgcaatgtgaattctgcccagtgacccggtggaaaatggcgatttgtggtttatttgaaatacaacaatgtccaagaggaaaacactgcaactttcttcatgtgttcagaaatcccaacaatgaattctgggaagctaatagagacatctacttgtcttcagatcagactggctcctcctttggcaagaactccgagaggagggagaagatgggccaccacgaccactactacagcaggcagcggggaaggagaaaccctagtccagaccacacctacaaaagaaatggggaatccgagagaaaaaagagtagtcatagggggaagaaatctcacaaacgcacatcaaagagtcgggagaggcacaattcaccaagcagaggaagaaataggcaccgcagctgggaccagggccgccggagccagagccgcaggagccaccgcagccggagccaaagttcctctaggtgccgaagtcgtgggaggaggaagtcgggtaatagagacagaactgttcagagtccccaatccaaataaactagttttgttctt

SEQ ID NO: 350661 - DNA, 1866 bp, Homo sapiens
cagagccgggttcctcccgggtttctgccgggtttctccctgcggctcctgggttgttgagactcttgtgaagatggcttgcgctgccgcgcggtccccggccgaccaggacaggtttatttgtatctatcctgcttatttaaataataagaagaccatcgcagagggaaggcgaatccccataagtaaggctgttgaaaatcctacagctacagagattcaagatgtatgttcagcagttggacttaacgtatttcttgagaaaaataaaatgtactctagagaatggaatcgtgatgtccaatacagaggcagagtccgggtccagctcaaacaggaagatgggagcctctgccttgtacagttcccatcacgttaagaatgtctgaggggtcaggcggtgctggcaagatggctgcacttgagaagatgacgtttcccaagaagatgacatttccagagaaaccaagccacaaaaagtacagggccgccctgaagaaggagaaacgaaagaaacgtcggcaggaacttgctcgactgagagactcaggactctcacaggaggaggaagaggacacttttattgaagaacaacaactagaagaagagaagctattggaaagagagagggaaagattacatgaggagtggttgctgagggagcagaaggcacaagaagaattcagaataaagaaggaaaaggaagaggcggctaaaaaatggctagaagaacaagagagaaagttaaaggaacaatggaaagaacagcagaggaaagagagagaagaggaggagcagaaacaacaggagaagaaagaaaaagaggaagctgtgcagaagatgctggatcaggctgaaaatgatttagaaaatagtaccacatggcaaaacccagaaccacccgtggatttcagagtaatggagaaggatcgagctaattgtcccttctacagtaaaacaggagcttgcagatttggagacagatgttcacgtaaacataatttcccaacatctagtcctacccttcttattaagagcatgtttacaacgtttggaatggagcagtgcaggagggatgactatgaccctgacgcaagcctggagtacagcgaggaagaaacctaccaacagttcctagatttctatgaggatgtgttgcccgagttcaagaacgtggggaaagtgattcagttcaaggtcagctgcaatttggaacctcacctgaggggcaatgtatatgttcagtaccagtcggaagaagaatgccaagcagccctttctctgtttaacggacgatggtatgcaggacgacagctgcaatgtgaattctgcccagtgacccggtggaaaatggcgatttgtggtttatttgaaatacaacaatgtccaagaggaaaacactgcaactttcttcatgtgttcagaaatcccaacaatgaattctgggaagctaatagagacatctacttgtcttcagatcagactggctcctcctttggcaagaactccgagaggagggagaagatgggccaccacgaccactactacagcaggcagcggggaaggagaaaccctagtccagaccacacctacaaaagaaatggggaatccgagagaaaaaagagtagtcatagggggaagaaatctcacaaacgcacatcaaagagtcgggagaggcacaattcaccaagcagaggaagaaataggcaccgcagctgggaccagggccgccggagccagagccgcaggagccaccgcagccggagccaaagttcctctaggtgccgaagtcgtgggaggaggaagtcgggtaatagagacagaactgttcagagtccccaatccaaataaactagttttgttctt

SEQ ID NO: 350662 - DNA, 381 bp, Homo sapiens
acttataaagcattcagttttccaaatttatttattgctttgggcctgtggcttctgcactttgcaataagcttttaattaaacagaaaaaaaaatggatgtcttttatccttttgtttctttgaaaactgttttgtagttttgatgcagtccatttagttaaaaaatattgccatgtctttatgatcaattcctttcacttatttgattaaatattaaaattgcatcattatttcagtgcgtattgtacaatactggggagcccgttgtgagcttctgttgtttcattttgaagtatagcccattgttctgtcatgccaaagaattgacaaaacaaataataacaaaaattctccccaaaccttgagtgatgaaaaaaaa

SEQ ID NO: 350663 - DNA, 6036 bp, Homo sapiens
ggcgcggtgcatgccgggacggcgggggtggtgcatgcgctcgcatcatggcggctgagtgggcttctcgtttctggctttgggctacgctgctgattcctgcggccgcggtctacgaagaccaagtgggcaagtttgattggagacagcaatatgttgggaaggtcaagtttgcctccttggaattttcccctggatccaagaagttggttgtagccacagagaagaatgtgattgcagcattaaattcccgaactggggagatcttgtggcgccatgttgacaagggcacggcagaaggggctgtggatgccatgctgctgcacggacaggatgtgatcactgtgtccaatggaggccgaatcatgcgttcctgggagactaacatcgggggcctgaactgggagataaccctggacagtggcagtttccaggcacttgggctggttggcctgcaggagtctgtaaggtacatcgcagtcctgaagaagactacacttgccctccatcacctctccagtgggcacctcaagtgggtggaacatctcccagaaagtgacagcatccactaccagatggtgtattcttacggctctggggtggtgtgggccctcggagttgttcccttcagccatgtgaacattgtcaagtttaatgtggaagatggagagattgttcagcaggttagggtttcaactccgtggctgcagcacctgtctggagcctgtggtgtggtggatgaggctgtcctggtgtgtcctgacccgagctcacgttccctccaaactttggctctggagacggaatgggagttgagacagatcccactgcagtctctcgacttagaatttggaagtggattccaaccccgggtcctgcctacccagcccaacccagtggacgcttcccgggcccagttcttcctgcacttgtccccaagccactatgctctgctgcagtaccattatggaacgctgagtttgcttaaaaacttcccacagactgccctagtgagctttgccaccactggggagaagacggtggctgcagtcatggcctgtcggaatgaagtgcagaaaagtagcagttctgaagatgggtcaatggggagcttttcggagaagtctagttcaaaggactctctggcttgcttcaatcagacctacaccattaacctatacctcgtggagacaggtcggcggctgctggacaccacgataacatttagcctggaacagagcggcactcggcctgagcggctgtatatccaggtgttcttgaagaaggatgactcagtgggctaccgggctttggtgcagacagaggatcatctgctacttttcctgcagcagttggcagggaaggtggtgctgtggagccgtgaggagtccctggcagaagtggtgtgcctagagatggtggacctccccctgactggggcacaggccgagctggaaggagaatttggcaaaaaggcagatggcttgctggggatgttcctgaaacgcctctcgtctcagcttatcctgctgcaagcatggacttcccacctctggaaaatgttttatgatgctcggaagccccggagtcagattaagaatgagatcaacattgacaccctggccagagatgaattcaacctccagaagatgatggtgatggtaacagcctcaggcaagctttttggcattgagagcagctctggcaccatcctgtggaaacagtatctacccaatgtcaagccagactcctcctttaaactgatggtccagagaactactgctcatttcccccatcccccacagtgcaccctgctggtgaaggacaaggagtcgggaatgagttctctgtatgtcttcaatcccatttttgggaagtggagtcaggtagctcccccagtgctgaagcgccccatcttgcagtccttgcttctcccagtcatggatcaagactacgccaaggtgttgctgttgatagatgatgaatacaaggtcacagcttttccagccactcggaatgtcttgcgacagctacatgagcttgccccttccatcttcttctatttggtggatgcagagcagggacggctgtgtggatatcggcttcgaaaggatctcaccactgagctgagttgggagctgaccattcccccagaagtacagcggatcgtcaaggtgaaggggaaacgcagcagtgagcacgttcattcccagggccgtgtgatgggggaccgcagtgtgctctacaagagcctgaaccccaacctgctggccgtggtgacagagagcacagacgcgcaccatgagcgcacctttattggcatcttcctcattgatggcgtcactgggcgtatcattcactcctctgtgcagaagaaagccaaaggccctgtccatatcgtgcattcagagaactgggtggtgtaccagtactggaacaccaaggctcggcgcaacgagtttaccgtactggagctctatgagggcactgagcaatacaacgccaccgccttcagctccctggaccgcccccagctgccccaggtcctccagcagtcctatatcttcccgtcctccatcagtgccatggaggccaccatcaccgaacggggcatcaccagccgacacctgctgattggactaccttctggagcaattctttcccttcctaaggctttgctggatccccgccgccccgagatcccaacagaacaaagcagagaggagaacttaatcccgtattctccagatgtacagatacacgcagagcgattcatcaactataaccagacagtttctcgaatgcgaggtatctacacagctccctcgggtctggagtccacttgtttggttgtggcctatggtttggacatttaccaaactcgagtctacccatccaagcagtttgacgttctgaaggatgactatgactacgtgttaatcagcagcgtcctctttggcctggtttttgccaccatgatcactaagagactggcacaggtgaagctcctgaatcgggcctggcgataaagaacaaagactgtgcctaaaagtggagagccaggggagtgtgggtcagataagcagctacagctgcagtttggtggattggtggagtatgtgtgtgtgtcagtgctcagctaagaactgtagggaagatggatgaccttcacgcagaactccttttgggatatacatgatgcagaaaggatcctacatggagagagacagaactctctcagctgacactctcagagattcctgatgggctttctcttgaagtccaaaggcgtctgcattgtttcctttctttgcccatccatgaatgttctgttttgttttttttaataagaattccggctgatttttgtgaggcctgtttaaattgactttactttgccttttgtgtttctcaattttatctagaaatctttctgactttttccatctcttgcttcaaagtaagaggggaactctccttgccgactccaccttataggtacatttggtgttttgcactgggaagaaataggatccatccttagctgaggcttgaggactgatccagcctctcatggcttccctccaaagtaacttagggttgagggatctatatgtgatgtcaaaacttactttaaacctctagtttcgtgctgtcatttattaggctgggccaccaaatctttgtttcaatttatcagaagccaagtgcatactagcgtcttgtttgttgcccattgcctatacttttcacctgagatgtgtgagttggggccttttaaaaactactgaattgtctgagccttgaagacatttccagggagaagagataatctctcatttcacccacaggctggtctaatcataacctagttaaagatgtccttgtttaagaaccccattatttatttttagtttttaatataaattaacatgtgggtcattatatttctccttaaatgaggaaattttaaattttattgatctaacctttgaagctttaaaaaaggagaaagagggtaggggtgggaaactggcatactgtgtgtatagcactgccgattggctaggccactgtgtctctgctacaaattaaagaaatcctaaaagttttccttggtcatagagttggggaatgacagaatttttctttgttgtgaaatgtatgtacagagtagaccatctctagccctgtggtgaaagaggtacactcgaatgtttgcataaagcaagtgacaaatgacactgtttaagtcctcttttgtgtcttagaagatcattttgaggctattttcacattagaggggataaaagcagtgaagacatggagtaagtgtattttattttagtaaggaaaggtcagtttaatcatatatgggttggttaggttatctaaaaatttgtcatctttctatggtcatatgctgatggtagattatggcagagaaggaagaggaaatgacaaccattttattaattgtcagtttgatattgagtgactgaatgtctaagaatctccagaaaaaaacaggcatctatcatcctgacccaaggcatattttaacataacctgggagaagagagttaagtacaagttaaaaaaaattctgccctagttttgagaaagcctggctggaattctgactgtcttacatacatatgtgcaaggttagcctgcaagattctagtttttatttaccagtgtgccagaatctgaaacaagctactgggagggaaggtatttgtcctttagtaaaattccctgtatttcagctgtaatcaaagttacctcaaagcaggtgctttttttttttttgagaccctggctcaaaaacaaaaacaaaaactagtttgttttagtattcattaattacgtatatgagcactggtagtctagtgtttgttcttgtatacagtgttttcttaaatgagatgatgctatttaattctgttacttgttttttcaactaatggatcttttaaagttttttatttaaattttttgtgggtacatattaggtacatatacttatggggtacatgagatgtttttataaaggctcagctaatgtatcttgaatatcatgtattcataaagatgactgaaatagtttctggaacaaagtctgatagaaaaaatactcaattcctaatttaagtgttagagactttaatgtaagctatctaatctgaactagtttcattatttgtgtgtgggtacatgttatgtgctccgtaaggcatctttcaatttgaaaatttcataattgtaatttcactgcctttataaattgctttttttttggaggcagggtctctgtcacccaggctggagagcagtggcacagtcatagctcactgcagcctcgaacacctgggctgaagtgatcctccctccttagcctcccaaagtgccgggattacaggcatgagctactgcacctggcccataaattgtcatacttttaaagagcctattacacaaagtatcatcagaatcatcccaagactcatttcctgattcctaattatttaaaattttgcttttaggcgaggcatggtggctcaagcctataatcccagcactttgggaggccaaggcaggcagatcatttgaggtcaggagtttaagaccagcctggccaacatggtgaaacctgaaaccccatctctaccaaaaaaataaaaaaatttagccaggtgtggtggtgcatgcctgtaatcccacctcccgagtagctggggctcaggcgtgcgccaccatgcccggctaatttttgtatatttatggaaatgccaagagatagttcaatctgcctctctggcaagccatggacaccaggtctgacaaactctcttactccttaagacaaatgctcacctgatcaatatggggaaataagctgcatggtaccataatttctattctaaaagggaaaagtatctctttggtattgctttggaaaacattctttataactatcttgctatttaaaaattgacaattatccttccataattaaaacaggtagacaac

SEQ ID NO: 350664 - DNA, 6165 bp, Homo sapiens
ggcgcggtgcatgccgggacggcgggggtggtgcatgcgctcgcatcatggcggctgagtgggcttctcgtttctggctttgggctacgctgctgattcctgcggccgcggtctacgaagaccaagtgggcaagtttgattggagacagcaatatgttgggaaggtcaagtttgcctccttggaattttcccctggatccaagaagttggttgtagccacagagaagaatgtgattgcagcattaaattcccgaactggggagatcttgtggcgccatgttgacaagggcacggcagaaggggctgtggatgccatgctgctgcacggacaggatgtgatcactgtgtccaatggaggccgaatcatgcgttcctgggagactaacatcgggggcctgaactgggagataaccctggacagtggcagtttccaggcacttgggctggttggcctgcaggagtctgtaaggtacatcgcagtcctgaagaagactacacttgccctccatcacctctccagtgggcacctcaagtgggtggaacatctcccagaaagtgacagcatccactaccagatggtgtattcttacggctctggggtggtgtgggccctcggagttgttcccttcagccatgtgaacattgtcaagtttaatgtggaagatggagagattgttcagcaggttagggtttcaactccgtggctgcagcacctgtctggagcctgtggtgtggtggatgaggctgtcctggtgtgtcctgacccgagctcacgttccctccaaactttggctctggagacggaatgggagttgagacagatcccactgcagtctctcgacttagaatttggaagtggattccaaccccgggtcctgcctacccagcccaacccagtggacgcttcccgggcccagttcttcctgcacttgtccccaagccactatgctctgctgcagtaccattatggaacgctgagtttgcttaaaaacttcccacagactgccctagtgagctttgccaccactggggagaagacggtggctgcagtcatggcctgtcggaatgaagtgcagaaaagtagcagttctgaagatgggtcaatggggagcttttcggagaagtctagttcaaaggactctctggcttgcttcaatcagacctacaccattaacctatacctcgtggagacaggtcggcggctgctggacaccacgataacatttagcctggaacagagcggcactcggcctgagcggctgtatatccaggtgttcttgaagaaggatgactcagtgggctaccgggctttggtgcagacagaggatcatctgctacttttcctgcagcagttggcagggaaggtggtgctgtggagccgtgaggagtccctggcagaagtggtgtgcctagagatggtggacctccccctgactggggcacaggccgagctggaaggagaatttggcaaaaaggcagatggcttgctggggatgttcctgaaacgcctctcgtctcagcttatcctgctgcaagcatggacttcccacctctggaaaatgttttatgatgctcggaagccccggagtcagattaagaatgagatcaacattgacaccctggccagagatgaattcaacctccagaagatgatggtgatggtaacagcctcaggcaagctttttggcattgagagcagctctggcaccatcctgtggaaacagtatctacccaatgtcaagccagactcctcctttaaactgatggtccagagaactactgctcatttcccccatcccccacagtgcaccctgctggtgaaggacaaggagtcgggaatgagttctctgtatgtcttcaatcccatttttgggaagtggagtcaggtagctcccccagtgctgaagcgccccatcttgcagtccttgcttctcccagtcatggatcaagactacgccaaggtgttgctgttgatagatgatgaatacaaggtcacagcttttccagccactcggaatgtcttgcgacagctacatgagcttgccccttccatcttcttctatttggtggatgcagagcagggacggctgtgtggatatcggcttcgaaaggatctcaccactgagctgagttgggagctgaccattcccccagaagtacagcggatcgtcaaggtgaaggggaaacgcagcagtgagcacgttcattcccagggccgtgtgatgggggaccgcagtgtgctctacaagagcctgaaccccaacctgctggccgtggtgacagagagcacagacgcgcaccatgagcgcacctttattggcatcttcctcattgatggcgtcactgggcgtatcattcactcctctgtgcagaagaaagccaaaggccctgtccatatcgtgcattcagagaactgggtggtgtaccagtactggaacaccaaggctcggcgcaacgagtttaccgtactggagctctatgagggcactgagcaatacaacgccaccgccttcagctccctggaccgcccccagctgccccaggtcctccagcagtcctatatcttcccgtcctccatcagtgccatggaggccaccatcaccgaacggggcatcaccagccgacacctgctgattggactaccttctggagcaattctttcccttcctaaggctttgctggatccccgccgccccgagatcccaacagaacaaagcagagaggagaacttaatcccgtattctccagatgtacagatacacgcagagcgattcatcaactataaccagacagtttctcgaatgcgaggtatctacacagctccctcgggtctggagtccacttgtttggttgtggcctatggtttggacatttaccaaactcgagtctacccatccaagcagtttgacgttctgaaggatgactatgactacgtgttaatcagcagcgtcctctttggcctggtttttgccaccatgatcactaagagactggcacaggtgaagctcctgaatcgggcctggcgataaagaacaaagactgtgcctaaaagtggagagccaggggagtgtgggtcagataagcagctacagctgcagtttggtggattggtggagtatgtgtgtgtgtcagtgctcagctaagaactgtagggaagatggatgaccttcacgcagaactccttttgggatatacatgatgcagaaaggatcctacatggagagagacagaactctctcagctgacactctcagagattcctgatgggctttctcttgaagtccaaaggcgtctgcattgtttcctttctttgcccatccatgaatgttctgttttgttttttttaataagaattccggctgatttttgtgaggcctgtttaaattgactttactttgccttttgtgtttctcaattttatctagaaatctttctgactttttccatctcttgcttcaaagtaagaggggaactctccttgccgactccaccttataggtacatttggtgttttgcactgggaagaaataggatccatccttagctgaggcttgaggactgatccagcctctcatggcttccctccaaagtaacttagggttgagggatctatatgtgatgtcaaaacttactttaaacctctagtttcgtgctgtcatttattaggctgggccaccaaatctttgtttcaatttatcagaagccaagtgcatactagcgtcttgtttgttgcccattgcctatacttttcacctgagatgtgtgagttggggccttttaaaaactactgaattgtctgagccttgaagacatttccagggagaagagataatctctcatttcacccacaggctggtctaatcataacctagttaaagatgtccttgtttaagaaccccattatttatttttagtttttaatataaattaacatgtgggtcattatatttctccttaaatgaggaaattttaaattttattgatctaacctttgaagctttaaaaaaggagaaagagggtaggggtgggaaactggcatactgtgtgtatagcactgccgattggctaggccactgtgtctctgctacaaattaaagaaatcctaaaagttttccttggtcatagagttggggaatgacagaatttttctttgttgtgaaatgtatgtacagagtagaccatctctagccctgtggtgaaagaggtacactcgaatgtttgcataaagcaagtgacaaatgacactgtttaagtcctcttttgtgtcttagaagatcattttgaggctattttcacattagaggggataaaagcagtgaagacatggagtaagtgtattttattttagtaaggaaaggtcagtttaatcatatatgggttggttaggttatctaaaaatttgtcatctttctatggtcatatgctgatggtagattatggcagagaaggaagaggaaatgacaaccattttattaattgtcagtttgatattgagtgactgaatgtctaagaatctccagaaaaaaacaggcatctatcatcctgacccaaggcatattttaacataacctgggagaagagagttaagtacaagttaaaaaaaattctgccctagttttgagaaagcctggctggaattctgactgtcttacatacatatgtgcaaggttagcctgcaagattctagtttttatttaccagtgtgccagaatctgaaacaagctactgggagggaaggtatttgtcctttagtaaaattccctgtatttcagctgtaatcaaagttacctcaaagcaggtgctttttttttttttgagaccctggctcaaaaacaaaaacaaaaactagtttgttttagtattcattaattacgtatatgagcactggtagtctagtgtttgttcttgtatacagtgttttcttaaatgagatgatgctatttaattctgttacttgttttttcaactaatggatcttttaaagttttttatttaaattttttgtgggtacatattaggtacatatacttatggggtacatgagatgtttttataaaggctcagctaatgtatcttgaatatcatgtattcataaagatgactgaaatagtttctggaacaaagtctgatagaaaaaatactcaattcctaatttaagtgttagagactttaatgtaagctatctaatctgaactagtttcattatttgtgtgtgggtacatgttatgtgctccgtaaggcatctttcaatttgaaaatttcataattgtaatttcactgcctttataaattgctttttttttggaggcagggtctctgtcacccaggctggagagcagtggcacagtcatagctcactgcagcctcgaacacctgggctgaagtgatcctccctccttagcctcccaaagtgccgggattacaggcatgagctactgcacctggcccataaattgtcatacttttaaagagcctattacacaaagtatcatcagaatcatcccaagactcatttcctgattcctaattatttaaaattttgcttttaggcgaggcatggtggctcaagcctataatcccagcactttgggaggccaaggcaggcagatcatttgaggtcaggagtttaagaccagcctggccaacatggtgaaacctgaaaccccatctctaccaaaaaaataaaaaaatttagccaggtgtggtggtgcatgcctgtaatcccagctacttgggaggctgaggcaggagaatcgaacccaggaggcaaaggctgcagtgagccgagatcgtgcctctgcactccagtctgggcaacacagtgagaccctgtctcaaaaataaataaaatgaaaaaattgcttttaaatcatgaaaccattctgttttctttacttggaatgttttcttccctgcttaaaatctggcttgtctcaaatctgaactcctccataaagtcttccctattggtttcagctactcaggaccttcaaccatcctggctgcttaccacgtaacttcctgagtgatataccacacccctttattatttcagatattgtgtctcttagggactgttttctgaattacctattgtcccagacatgaagttgctccttgacaaatagttccccaaatggctgtaccttcttctccagaaccctt

SEQ ID NO: 350665 - DNA, 4242 bp, Homo sapiens
ggcgcggtgcatgccgggacggcgggggtggtgcatgcgctcgcatcatggcggctgagtgggcttctcgtttctggctttgggctacgctgctgattcctgcggccgcggtctacgaagaccaagtgggcaagtttgattggagacagcaatatgttgggaaggtcaagtttgcctccttggaattttcccctggatccaagaagttggttgtagccacagagaagaatgtgattgcagcattaaattcccgaactggggagatcttgtggcgccatgttgacaagggcacggcagaaggggctgtggatgccatgctgctgcacggacaggatgtgatcactgtgtccaatggaggccgaatcatgcgttcctgggagactaacatcgggggcctgaactgggagataaccctggacagtggcagtttccaggcacttgggctggttggcctgcaggagtctgtaaggtacatcgcagtcctgaagaagactacacttgccctccatcacctctccagtgggcacctcaagtgggtggaacatctcccagaaagtgacagcatccactaccagatggtgtattcttacggctctggggtggtgtgggccctcggagttgttcccttcagccatgtgaacattgtcaagtttaatgtggaagatggagagattgttcagcaggttagggtttcaactccgtggctgcagcacctgtctggagcctgtggtgtggtggatgaggctgtcctggtgtgtcctgacccgagctcacgttccctccaaactttggctctggagacggaatgggagttgagacagatcccactgcagtctctcgacttagaatttggaagtggattccaaccccgggtcctgcctacccagcccaacccagtggacgcttcccgggcccagttcttcctgcacttgtccccaagccactatgctctgctgcagtaccattatggaacgctgagtttgcttaaaaacttcccacagactgccctagtgagctttgccaccactggggagaagacggtggctgcagtcatggcctgtcggaatgaagtgcagaaaagtagcagttctgaagatgggtcaatggggagcttttcggagaagtctagttcaaaggactctctggcttgcttcaatcagacctacaccattaacctatacctcgtggagacaggtcggcggctgctggacaccacgataacatttagcctggaacagagcggcactcggcctgagcggctgtatatccaggtgttcttgaagaaggatgactcagtgggctaccgggctttggtgcagacagaggatcatctgctacttttcctgcagcagttggcagggaaggtggtgctgtggagccgtgaggagtccctggcagaagtggtgtgcctagagatggtggacctccccctgactggggcacaggccgagctggaaggagaatttggcaaaaaggcagatggcttgctggggatgttcctgaaacgcctctcgtctcagcttatcctgctgcaagcatggacttcccacctctggaaaatgttttatgatgctcggaagccccggagtcagattaagaatgagatcaacattgacaccctggccagagatgaattcaacctccagaagatgatggtgatggtaacagcctcaggcaagctttttggcattgagagcagctctggcaccatcctgtggaaacagtatctacccaatgtcaagccagactcctcctttaaactgatggtccagagaactactgctcatttcccccatcccccacagtgcaccctgctggtgaaggacaaggagtcgggaatgagttctctgtatgtcttcaatcccatttttgggaagtggagtcaggtagctcccccagtgctgaagcgccccatcttgcagtccttgcttctcccagtcatggatcaagactacgccaaggtgttgctgttgatagatgatgaatacaaggtcacagcttttccagccactcggaatgtcttgcgacagctacatgagcttgccccttccatcttcttctatttggtggatgcagagcagggacggctgtgtggatatcggcttcgaaaggatctcaccactgagctgagttgggagctgaccattcccccagaagtacagcggatcgtcaaggtgaaggggaaacgcagcagtgagcacgttcattcccagggccgtgtgatgggggaccgcagtgtgctctacaagagcctgaaccccaacctgctggccgtggtgacagagagcacagacgcgcaccatgagcgcacctttattggcatcttcctcattgatggcgtcactgggcgtatcattcactcctctgtgcagaagaaagccaaaggccctgtccatatcgtgcattcagagaactgggtggtgtaccagtactggaacaccaaggctcggcgcaacgagtttaccgtactggagctctatgagggcactgagcaatacaacgccaccgccttcagctccctggaccgcccccagctgccccaggtcctccagcagtcctatatcttcccgtcctccatcagtgccatggaggccaccatcaccgaacggggcatcaccagccgacacctgctgattggactaccttctggagcaattctttcccttcctaaggctttgctggatccccgccgccccgagatcccaacagaacaaagcagagaggagaacttaatcccgtattctccagatgtacagatacacgcagagcgattcatcaactataaccagacagtttctcgaatgcgaggtatctacacagctccctcgggtctggagtccacttgtttggttgtggcctatggtttggacatttaccaaactcgagtctacccatccaagcagtttgacgttctgaaggatgactatgactacgtgttaatcagcagcgtcctctttggcctggtttttgccaccatgatcactaagagactggcacaggtgaagctcctgaatcgggcctggcgataaagaacaaagactgtgcctaaaagtggagagccaggggagtgtgggtcagataagcagctacagctgcagtttggtggattggtggagtatgtgtgtgtgtcagtgctcagctaagaactgtagggaagatggatgaccttcacgcagaactccttttgggatatacatgatgcagaaaggatcctacatggagagagacagaactctctcagctgacactctcagagattcctgatgggctttctcttgaagtccaaaggcgtctgcattgtttcctttctttgcccatccatgaatgttctgttttgttttttttaataagaattccggctgatttttgtgaggcctgtttaaattgactttactttgccttttgtgtttctcaattttatctagaaatctttctgactttttccatctcttgcttcaaagtaagaggggaactctccttgccgactccaccttataggtacatttggtgttttgcactgggaagaaataggatccatccttagctgaggcttgaggactgatccagcctctcatggcttccctccaaagtaacttagggttgagggatctatatgtgatgtcaaaacttactttaaacctctagtttcgtgctgtcatttattaggctgggccaccaaatctttgtttcaatttatcagaagccaagtgcatactagcgtcttgtttgttgcccattgcctatacttttcacctgagatgtgtgagttggggccttttaaaaactactgaattgtctgagccttgaagacatttccagggagaagagataatctctcatttcacccacaggctggtctaatcataacctagttaaagatgtccttgtttaagaaccccattatttatttttagtttttaatataaattaacatgtgggtcattatatttctccttaaatgaggaaattttaaattttattgatctaacctttgaagctttaaaaaaggagaaagagggtaggggtgggaaactggcatactgtgtgtatagcactgccgattggctaggccactgtgtctctgctacaaattaaagaaatcctaaaagttttccttggtcatagagttggggaatgacagaatttttctttgttgtgaaatgtatgtacagagtagaccatctctagccctgtggtgaaagaggtacactcgaatgtttgcataaagcaagtgacaaatga

SEQ ID NO: 350666 - DNA, 5740 bp, Homo sapiens
tgccaggtatttaaaattatcggatatatttttccagtgaccagaaagaaaatcctgatattttttccaactttgaaggctctcaggaggttggagggtggggtttcaggggacaggaagaactcctatacaaccaaccatgaagaacctttgagcttaggacccccagtgggatgctggcagcaatattgctgttgggctgagagggaaatgtaaaaatctttcacgagcttcctgttaacgatgacttttctgtaggttagggtttcaactccgtggctgcagcacctgtctggagcctgtggtgtggtggatgaggctgtcctggtgtgtcctgacccgagctcacgttccctccaaactttggctctggagacggaatgggagttgagacagatcccactgcagtctctcgacttagaatttggaagtggattccaaccccgggtcctgcctacccagcccaacccagtggacgcttcccgggcccagttcttcctgcacttgtccccaagccactatgctctgctgcagtaccattatggaacgctgagtttgcttaaaaacttcccacagactgccctagtgagctttgccaccactggggagaagacggtggctgcagtcatggcctgtcggaatgaagtgcagaaaagtagcagttctgaagatgggtcaatggggagcttttcggagaagtctagttcaaaggactctctggcttgcttcaatcagacctacaccattaacctatacctcgtggagacaggtcggcggctgctggacaccacgataacatttagcctggaacagagcggcactcggcctgagcggctgtatatccaggtgttcttgaagaaggatgactcagtgggctaccgggctttggtgcagacagaggatcatctgctacttttcctgcagcagttggcagggaaggtggtgctgtggagccgtgaggagtccctggcagaagtggtgtgcctagagatggtggacctccccctgactggggcacaggccgagctggaaggagaatttggcaaaaaggcagatggcttgctggggatgttcctgaaacgcctctcgtctcagcttatcctgctgcaagcatggacttcccacctctggaaaatgttttatgatgctcggaagccccggagtcagattaagaatgagatcaacattgacaccctggccagagatgaattcaacctccagaagatgatggtgatggtaacagcctcaggcaagctttttggcattgagagcagctctggcaccatcctgtggaaacagtatctacccaatgtcaagccagactcctcctttaaactgatggtccagagaactactgctcatttcccccatcccccacagtgcaccctgctggtgaaggacaaggagtcgggaatgagttctctgtatgtcttcaatcccatttttgggaagtggagtcaggtagctcccccagtgctgaagcgccccatcttgcagtccttgcttctcccagtcatggatcaagactacgccaaggtgttgctgttgatagatgatgaatacaaggtcacagcttttccagccactcggaatgtcttgcgacagctacatgagcttgccccttccatcttcttctatttggtggatgcagagcagggacggctgtgtggatatcggcttcgaaaggatctcaccactgagctgagttgggagctgaccattcccccagaagtacagcggatcgtcaaggtgaaggggaaacgcagcagtgagcacgttcattcccagggccgtgtgatgggggaccgcagtgtgctctacaagagcctgaaccccaacctgctggccgtggtgacagagagcacagacgcgcaccatgagcgcacctttattggcatcttcctcattgatggcgtcactgggcgtatcattcactcctctgtgcagaagaaagccaaaggccctgtccatatcgtgcattcagagaactgggtggtgtaccagtactggaacaccaaggctcggcgcaacgagtttaccgtactggagctctatgagggcactgagcaatacaacgccaccgccttcagctccctggaccgcccccagctgccccaggtcctccagcagtcctatatcttcccgtcctccatcagtgccatggaggccaccatcaccgaacggggcatcaccagccgacacctgctgattggactaccttctggagcaattctttcccttcctaaggctttgctggatccccgccgccccgagatcccaacagaacaaagcagagaggagaacttaatcccgtattctccagatgtacagatacacgcagagcgattcatcaactataaccagacagtttctcgaatgcgaggtatctacacagctccctcgggtctggagtccacttgtttggttgtggcctatggtttggacatttaccaaactcgagtctacccatccaagcagtttgacgttctgaaggatgactatgactacgtgttaatcagcagcgtcctctttggcctggtttttgccaccatgatcactaagagactggcacaggtgaagctcctgaatcgggcctggcgataaagaacaaagactgtgcctaaaagtggagagccaggggagtgtgggtcagataagcagctacagctgcagtttggtggattggtggagtatgtgtgtgtgtcagtgctcagctaagaactgtagggaagatggatgaccttcacgcagaactccttttgggatatacatgatgcagaaaggatcctacatggagagagacagaactctctcagctgacactctcagagattcctgatgggctttctcttgaagtccaaaggcgtctgcattgtttcctttctttgcccatccatgaatgttctgttttgttttttttaataagaattccggctgatttttgtgaggcctgtttaaattgactttactttgccttttgtgtttctcaattttatctagaaatctttctgactttttccatctcttgcttcaaagtaagaggggaactctccttgccgactccaccttataggtacatttggtgttttgcactgggaagaaataggatccatccttagctgaggcttgaggactgatccagcctctcatggcttccctccaaagtaacttagggttgagggatctatatgtgatgtcaaaacttactttaaacctctagtttcgtgctgtcatttattaggctgggccaccaaatctttgtttcaatttatcagaagccaagtgcatactagcgtcttgtttgttgcccattgcctatacttttcacctgagatgtgtgagttggggccttttaaaaactactgaattgtctgagccttgaagacatttccagggagaagagataatctctcatttcacccacaggctggtctaatcataacctagttaaagatgtccttgtttaagaaccccattatttatttttagtttttaatataaattaacatgtgggtcattatatttctccttaaatgaggaaattttaaattttattgatctaacctttgaagctttaaaaaaggagaaagagggtaggggtgggaaactggcatactgtgtgtatagcactgccgattggctaggccactgtgtctctgctacaaattaaagaaatcctaaaagttttccttggtcatagagttggggaatgacagaatttttctttgttgtgaaatgtatgtacagagtagaccatctctagccctgtggtgaaagaggtacactcgaatgtttgcataaagcaagtgacaaatgacactgtttaagtcctcttttgtgtcttagaagatcattttgaggctattttcacattagaggggataaaagcagtgaagacatggagtaagtgtattttattttagtaaggaaaggtcagtttaatcatatatgggttggttaggttatctaaaaatttgtcatctttctatggtcatatgctgatggtagattatggcagagaaggaagaggaaatgacaaccattttattaattgtcagtttgatattgagtgactgaatgtctaagaatctccagaaaaaaacaggcatctatcatcctgacccaaggcatattttaacataacctgggagaagagagttaagtacaagttaaaaaaaattctgccctagttttgagaaagcctggctggaattctgactgtcttacatacatatgtgcaaggttagcctgcaagattctagtttttatttaccagtgtgccagaatctgaaacaagctactgggagggaaggtatttgtcctttagtaaaattccctgtatttcagctgtaatcaaagttacctcaaagcaggtgctttttttttttttgagaccctggctcaaaaacaaaaacaaaaactagtttgttttagtattcattaattacgtatatgagcactggtagtctagtgtttgttcttgtatacagtgttttcttaaatgagatgatgctatttaattctgttacttgttttttcaactaatggatcttttaaagttttttatttaaattttttgtgggtacatattaggtacatatacttatggggtacatgagatgtttttataaaggctcagctaatgtatcttgaatatcatgtattcataaagatgactgaaatagtttctggaacaaagtctgatagaaaaaatactcaattcctaatttaagtgttagagactttaatgtaagctatctaatctgaactagtttcattatttgtgtgtgggtacatgttatgtgctccgtaaggcatctttcaatttgaaaatttcataattgtaatttcactgcctttataaattgctttttttttggaggcagggtctctgtcacccaggctggagagcagtggcacagtcatagctcactgcagcctcgaacacctgggctgaagtgatcctccctccttagcctcccaaagtgccgggattacaggcatgagctactgcacctggcccataaattgtcatacttttaaagagcctattacacaaagtatcatcagaatcatcccaagactcatttcctgattcctaattatttaaaattttgcttttaggcgaggcatggtggctcaagcctataatcccagcactttgggaggccaaggcaggcagatcatttgaggtcaggagtttaagaccagcctggccaacatggtgaaacctgaaaccccatctctaccaaaaaaataaaaaaatttagccaggtgtggtggtgcatgcctgtaatcccagctacttgggaggctgaggcaggagaatcgaacccaggaggcaaaggctgcagtgagccgagatcgtgcctctgcactccagtctgggcaacacagtgagaccctgtctcaaaaataaataaaatgaaaaaattgcttttaaatcatgaaaccattctgttttctttacttggaatgttttcttccctgcttaaaatctggcttgtctcaaatctgaactcctccataaagtcttccctattggtttcagctactcaggaccttcaaccatcctggctgcttaccacgtaacttcctgagtgatataccacacccctttattatttcagatattgtgtctcttagggactgttttctgaattacctattgtcccagacatgaagttgctccttgacaaatagttccccaaatggctgtaccttcttctccagaaccctt

SEQ ID NO: 350667 - DNA, 6127 bp, Homo sapiens
ggcgcggtgcatgccgggacggcgggggtggtgcatgcgctcgcatcatggcggctgagtgggcttctcgtttctggctttgggctacgctgctgattcctgcggccgcggtctacgaagaccaagtgggcaagtttgattggagacagcaatatgttgggaaggtcaagtttgcctccttggaattttcccctggatccaagaagttggttgtagccacagagaagaatgtgattgcagcattaaattcccgaactggggagatcttgtggcgccatgttgacaagggcacggcagaaggggctgtggatgccatgctgctgcacggacaggatgtgatcactgtgtccaatggaggccgaatcatgcgttcctgggagactaacatcgggggcctgaactgggagataaccctggacagtggcagtttccaggcacttgggctggttggcctgcaggagtctgtaaggtacatcgcagtcctgaagaagactacacttgccctccatcacctctccagtgggcacctcaagtgggtggaacatctcccagaaagtgacagcatccactaccagatggtgtattcttacggctctggggtggtgtgggccctcggagttgttcccttcagccatgtgaacattgtcaagtttaatgtggaagatggagagattgttcagcaggttagggtttcaactccgtggctgcagcacctgtctggagcctgtggtgtggtggatgaggctgtcctggtgtgtcctgacccgagctcacgttccctccaaactttggctctggagacggaatgggagttgagacagatcccactgcagtctctcgacttagaatttggaagtggattccaaccccgggtcctgcctacccagcccaacccagtggacgcttcccgggcccagttcttcctgcacttgtccccaagccactatgctctgctgcagtaccattatggaacgctgagtttgcttaaaaacttcccacagactgccctagtgagctttgccaccactggggagaagacggtggctgcagtcatggcctgtcggaatgaagtgcagaaaagtagcagttctgaagatgggtcaatggggagcttttcggagaagtctagttcaaaggactctctggcttgcttcaatcagacctacaccattaacctatacctcgtggagacaggtcggcggctgctggacaccacgataacatttagcctggaacagagcggcactcggcctgagcggctgtatatccaggtgttcttgaagaaggatgactcagtgggctaccgggctttggtgcagacagaggatcatctgctacttttcctgcagcagttggcagggaaggtggtgctgtggagccgtgaggagtccctggcagaagtggtgtgcctagagatggtggacctccccctgactggggcacaggccgagctggaaggagaatttggcaaaaaggcagatggcttgctggggatgttcctgaaacgcctctcgtctcagcttatcctgctgcaagcatggacttcccacctctggaaaatgttttatgatgctcggaagccccggagtcagattaagaatgagatcaacattgacaccctggccagagatgaattcaacctccagaagatgatggtgatggtaacagcctcaggcaagctttttggcattgagagcagctctggcaccatcctgtggaaacagtatctacccaatgtcaagccagactcctcctttaaactgatggtccagagaactactgctcatttcccccatcccccacagtgcaccctgctggtgaaggacaaggagtcgggaatgagttctctgtatgtcttcaatcccatttttgggaagtggagtcaggtagctcccccagtgctgaagcgccccatcttgcagtccttgcttctcccagtcatggatcaagactacgccaaggtgttgctgttgatagatgatgaatacaaggtcacagcttttccagccactcggaatgtcttgcgacagctacatgagcttgccccttccatcttcttctatttggtggatgcagagcagggacggctgtgtggatatcggcttcgaaaggatctcaccactgagctgagttgggagctgaccattcccccagaagtacagcggatcgtcaaggtgaaggggaaacgcagcagtgagcacgttcattcccagggccgtgtgatgggggaccgcagtgtgctctacaagagcctgaaccccaacctgctggccgtggtgacagagagcacagacgcgcaccatgagcgcacctttattggcatcttcctcattgatggcgtcactgggcgtatcattcactcctctgtgcagaagaaagccaaaggccctgtccatatcgtgcattcagagaactgggtggtgtaccagtactggaacaccaaggctcggcgcaacgagtttaccgtactggagctctatgagggcactgagcaatacaacgccaccgccttcagctccctggaccgcccccagctgccccaggtcctccagcagtcctatatcttcccgtcctccatcagtgccatggaggccaccatcaccgaacggggcatcaccagccgacacctgctgagctttgctggatccccgccgccccgagatcccaacagaacaaagcagagaggagaacttaatcccgtattctccagatgtacagatacacgcagagcgattcatcaactataaccagacagtttctcgaatgcgaggtatctacacagctccctcgggtctggagtccacttgtttggttgtggcctatggtttggacatttaccaaactcgagtctacccatccaagcagtttgacgttctgaaggatgactatgactacgtgttaatcagcagcgtcctctttggcctggtttttgccaccatgatcactaagagactggcacaggtgaagctcctgaatcgggcctggcgataaagaacaaagactgtgcctaaaagtggagagccaggggagtgtgggtcagataagcagctacagctgcagtttggtggattggtggagtatgtgtgtgtgtcagtgctcagctaagaactgtagggaagatggatgaccttcacgcagaactccttttgggatatacatgatgcagaaaggatcctacatggagagagacagaactctctcagctgacactctcagagattcctgatgggctttctcttgaagtccaaaggcgtctgcattgtttcctttctttgcccatccatgaatgttctgttttgttttttttaataagaattccggctgatttttgtgaggcctgtttaaattgactttactttgccttttgtgtttctcaattttatctagaaatctttctgactttttccatctcttgcttcaaagtaagaggggaactctccttgccgactccaccttataggtacatttggtgttttgcactgggaagaaataggatccatccttagctgaggcttgaggactgatccagcctctcatggcttccctccaaagtaacttagggttgagggatctatatgtgatgtcaaaacttactttaaacctctagtttcgtgctgtcatttattaggctgggccaccaaatctttgtttcaatttatcagaagccaagtgcatactagcgtcttgtttgttgcccattgcctatacttttcacctgagatgtgtgagttggggccttttaaaaactactgaattgtctgagccttgaagacatttccagggagaagagataatctctcatttcacccacaggctggtctaatcataacctagttaaagatgtccttgtttaagaaccccattatttatttttagtttttaatataaattaacatgtgggtcattatatttctccttaaatgaggaaattttaaattttattgatctaacctttgaagctttaaaaaaggagaaagagggtaggggtgggaaactggcatactgtgtgtatagcactgccgattggctaggccactgtgtctctgctacaaattaaagaaatcctaaaagttttccttggtcatagagttggggaatgacagaatttttctttgttgtgaaatgtatgtacagagtagaccatctctagccctgtggtgaaagaggtacactcgaatgtttgcataaagcaagtgacaaatgacactgtttaagtcctcttttgtgtcttagaagatcattttgaggctattttcacattagaggggataaaagcagtgaagacatggagtaagtgtattttattttagtaaggaaaggtcagtttaatcatatatgggttggttaggttatctaaaaatttgtcatctttctatggtcatatgctgatggtagattatggcagagaaggaagaggaaatgacaaccattttattaattgtcagtttgatattgagtgactgaatgtctaagaatctccagaaaaaaacaggcatctatcatcctgacccaaggcatattttaacataacctgggagaagagagttaagtacaagttaaaaaaaattctgccctagttttgagaaagcctggctggaattctgactgtcttacatacatatgtgcaaggttagcctgcaagattctagtttttatttaccagtgtgccagaatctgaaacaagctactgggagggaaggtatttgtcctttagtaaaattccctgtatttcagctgtaatcaaagttacctcaaagcaggtgctttttttttttttgagaccctggctcaaaaacaaaaacaaaaactagtttgttttagtattcattaattacgtatatgagcactggtagtctagtgtttgttcttgtatacagtgttttcttaaatgagatgatgctatttaattctgttacttgttttttcaactaatggatcttttaaagttttttatttaaattttttgtgggtacatattaggtacatatacttatggggtacatgagatgtttttataaaggctcagctaatgtatcttgaatatcatgtattcataaagatgactgaaatagtttctggaacaaagtctgatagaaaaaatactcaattcctaatttaagtgttagagactttaatgtaagctatctaatctgaactagtttcattatttgtgtgtgggtacatgttatgtgctccgtaaggcatctttcaatttgaaaatttcataattgtaatttcactgcctttataaattgctttttttttggaggcagggtctctgtcacccaggctggagagcagtggcacagtcatagctcactgcagcctcgaacacctgggctgaagtgatcctccctccttagcctcccaaagtgccgggattacaggcatgagctactgcacctggcccataaattgtcatacttttaaagagcctattacacaaagtatcatcagaatcatcccaagactcatttcctgattcctaattatttaaaattttgcttttaggcgaggcatggtggctcaagcctataatcccagcactttgggaggccaaggcaggcagatcatttgaggtcaggagtttaagaccagcctggccaacatggtgaaacctgaaaccccatctctaccaaaaaaataaaaaaatttagccaggtgtggtggtgcatgcctgtaatcccagctacttgggaggctgaggcaggagaatcgaacccaggaggcaaaggctgcagtgagccgagatcgtgcctctgcactccagtctgggcaacacagtgagaccctgtctcaaaaataaataaaatgaaaaaattgcttttaaatcatgaaaccattctgttttctttacttggaatgttttcttccctgcttaaaatctggcttgtctcaaatctgaactcctccataaagtcttccctattggtttcagctactcaggaccttcaaccatcctggctgcttaccacgtaacttcctgagtgatataccacacccctttattatttcagatattgtgtctcttagggactgttttctgaattacctattgtcccagacatgaagttgctccttgacaaatagttccccaaatggctgtaccttcttctccagaaccctt

SEQ ID NO: 350668 - DNA, 6136 bp, Homo sapiens
ggcgcggtgcatgccgggacggcgggggtggtgcatgcgctcgcatcatggcggctgagtgggcttctcgtttctggctttgggctacgctgctgattcctgcggccgcggtctacgaagaccaagtgggcaagtttgattggagacagcaatatgttgggaaggtcaagtttgcctccttggaattttcccctggatccaagaagttggttgtagccacagagaagaatgtgattgcagcattaaattcccgaactggggagatcttgtggcgccatgttgacaagggcacggcagaaggggctgtggatgccatgctgctgcacggacaggatgtgatcactgtgtccaatggaggccgaatcatgcgttcctgggagactaacatcgggggcctgaactgggagataaccctggacagtggcagtttccaggcacttgggctggttggcctgcaggagtctgtaaggtacatcgcagtcctgaagaagactacacttgccctccatcacctctccagtgggcacctcaagtgggtggaacatctcccagaaagtgacagcatccactaccagatggtgtattcttacggctctggggtggtgtgggccctcggagttgttcccttcagccatgtgaacattgtcaagtttaatgtggaagatggagagattgttcagcaggttagggtttcaactccgtggctgcagcacctgtctggagcctgtggtgtggtggatgaggctgtcctggtgtgtcctgacccgagctcacgttccctccaaactttggctctggagacggaatgggagttgagacagatcccactgcagtctctcgacttagaatttggaagtggattccaaccccgggtcctgcctacccagcccaacccagtggacgcttcccgggcccagttcttcctgcacttgtccccaagccactatgctctgctgcagtaccattatggaacgctgagtttgcttaaaaacttcccacagactgccctagtgagctttgccaccactggggagaagacggtggctgcagtcatggcctgtcggaatgaagtgcagaaaagtagcagttctgaagatgggtcaatggggagcttttcggagaagtctagttcaaaggactctctggcttgcttcaatcagacctacaccattaacctatacctcgtggagacaggtcggcggctgctggacaccacgataacatttagcctggaacagagcggcactcggcctgagcggctgtatatccaggtgttcttgaagaaggatgactcagtgggctaccgggctttggtgcagacagaggatcatctgctacttttcctgcagcagttggcagggaaggtggtgctgtggagccgtgaggagtccctggcagaagtggtgtgcctagagatggtggacctccccctgactggggcacaggccgagctggaaggagaatttggcaaaaaggcagatggcttgctggggatgttcctgaaacgcctctcgtctcagcttatcctgctgcaagcatggacttcccacctctggaaaatgttttatgatgctcggaagccccggagtcagattaagaatgagatcaacattgacaccctggccagagatgaattcaacctccagaagatgatggtgatggtaacagcctcaggcaagctttttggcattgagagcagctctggcaccatcctgtggaaacagtatctacccaatgtcaagccagactcctcctttaaactgatggtccagagaactactgctcatttcccccatcccccacagtgcaccctgctggtgaaggacaaggagtcgggaatgagttctctgtatgtcttcaatcccatttttgggaagtggagtcaggtagctcccccagtgctgaagcgccccatcttgcagtccttgcttctcccagtcatggatcaagactacgccaaggtgttgctgttgatagatgatgaatacaaggtcacagcttttccagccactcggaatgtcttgcgacagctacatgagcttgccccttccatcttcttctatttggtggatgcagagcagggacggctgtgtggatatcggcttcgaaaggatctcaccactgagctgagttgggagctgaccattcccccagaagtacagcggatcgtcaaggtgaaggggaaacgcagcagtgagcacgttcattcccagggccgtgtgatgggggaccgcagtgtgctctacaagagcctgaaccccaacctgctggccgtggtgacagagagcacagacgcgcaccatgagcgcacctttattggcatcttcctcattgatggcgtcactgggcgtatcattcactcctctgtgcagaagaaagccaaaggccctgtccatatcgtgcattcagagaactgggtggtgtaccagtactggaacaccaaggctcggcgcaacgagtttaccgtactggagctctatgagggcactgagcaatacaacgccaccgccttcagctccctggaccgcccccagctgccccaggtcctccagcagtcctatatcttcccgtcctccatcagtgccatggaggccaccatcaccgaacggggcatcaccagccgacacctgctgattggactaccttctggagcaattctttcccttcctaaggctttgctggatccccgccgccccgagatcccaacagaacaaagcagatgtacagatacacgcagagcgattcatcaactataaccagacagtttctcgaatgcgaggtatctacacagctccctcgggtctggagtccacttgtttggttgtggcctatggtttggacatttaccaaactcgagtctacccatccaagcagtttgacgttctgaaggatgactatgactacgtgttaatcagcagcgtcctctttggcctggtttttgccaccatgatcactaagagactggcacaggtgaagctcctgaatcgggcctggcgataaagaacaaagactgtgcctaaaagtggagagccaggggagtgtgggtcagataagcagctacagctgcagtttggtggattggtggagtatgtgtgtgtgtcagtgctcagctaagaactgtagggaagatggatgaccttcacgcagaactccttttgggatatacatgatgcagaaaggatcctacatggagagagacagaactctctcagctgacactctcagagattcctgatgggctttctcttgaagtccaaaggcgtctgcattgtttcctttctttgcccatccatgaatgttctgttttgttttttttaataagaattccggctgatttttgtgaggcctgtttaaattgactttactttgccttttgtgtttctcaattttatctagaaatctttctgactttttccatctcttgcttcaaagtaagaggggaactctccttgccgactccaccttataggtacatttggtgttttgcactgggaagaaataggatccatccttagctgaggcttgaggactgatccagcctctcatggcttccctccaaagtaacttagggttgagggatctatatgtgatgtcaaaacttactttaaacctctagtttcgtgctgtcatttattaggctgggccaccaaatctttgtttcaatttatcagaagccaagtgcatactagcgtcttgtttgttgcccattgcctatacttttcacctgagatgtgtgagttggggccttttaaaaactactgaattgtctgagccttgaagacatttccagggagaagagataatctctcatttcacccacaggctggtctaatcataacctagttaaagatgtccttgtttaagaaccccattatttatttttagtttttaatataaattaacatgtgggtcattatatttctccttaaatgaggaaattttaaattttattgatctaacctttgaagctttaaaaaaggagaaagagggtaggggtgggaaactggcatactgtgtgtatagcactgccgattggctaggccactgtgtctctgctacaaattaaagaaatcctaaaagttttccttggtcatagagttggggaatgacagaatttttctttgttgtgaaatgtatgtacagagtagaccatctctagccctgtggtgaaagaggtacactcgaatgtttgcataaagcaagtgacaaatgacactgtttaagtcctcttttgtgtcttagaagatcattttgaggctattttcacattagaggggataaaagcagtgaagacatggagtaagtgtattttattttagtaaggaaaggtcagtttaatcatatatgggttggttaggttatctaaaaatttgtcatctttctatggtcatatgctgatggtagattatggcagagaaggaagaggaaatgacaaccattttattaattgtcagtttgatattgagtgactgaatgtctaagaatctccagaaaaaaacaggcatctatcatcctgacccaaggcatattttaacataacctgggagaagagagttaagtacaagttaaaaaaaattctgccctagttttgagaaagcctggctggaattctgactgtcttacatacatatgtgcaaggttagcctgcaagattctagtttttatttaccagtgtgccagaatctgaaacaagctactgggagggaaggtatttgtcctttagtaaaattccctgtatttcagctgtaatcaaagttacctcaaagcaggtgctttttttttttttgagaccctggctcaaaaacaaaaacaaaaactagtttgttttagtattcattaattacgtatatgagcactggtagtctagtgtttgttcttgtatacagtgttttcttaaatgagatgatgctatttaattctgttacttgttttttcaactaatggatcttttaaagttttttatttaaattttttgtgggtacatattaggtacatatacttatggggtacatgagatgtttttataaaggctcagctaatgtatcttgaatatcatgtattcataaagatgactgaaatagtttctggaacaaagtctgatagaaaaaatactcaattcctaatttaagtgttagagactttaatgtaagctatctaatctgaactagtttcattatttgtgtgtgggtacatgttatgtgctccgtaaggcatctttcaatttgaaaatttcataattgtaatttcactgcctttataaattgctttttttttggaggcagggtctctgtcacccaggctggagagcagtggcacagtcatagctcactgcagcctcgaacacctgggctgaagtgatcctccctccttagcctcccaaagtgccgggattacaggcatgagctactgcacctggcccataaattgtcatacttttaaagagcctattacacaaagtatcatcagaatcatcccaagactcatttcctgattcctaattatttaaaattttgcttttaggcgaggcatggtggctcaagcctataatcccagcactttgggaggccaaggcaggcagatcatttgaggtcaggagtttaagaccagcctggccaacatggtgaaacctgaaaccccatctctaccaaaaaaataaaaaaatttagccaggtgtggtggtgcatgcctgtaatcccagctacttgggaggctgaggcaggagaatcgaacccaggaggcaaaggctgcagtgagccgagatcgtgcctctgcactccagtctgggcaacacagtgagaccctgtctcaaaaataaataaaatgaaaaaattgcttttaaatcatgaaaccattctgttttctttacttggaatgttttcttccctgcttaaaatctggcttgtctcaaatctgaactcctccataaagtcttccctattggtttcagctactcaggaccttcaaccatcctggctgcttaccacgtaacttcctgagtgatataccacacccctttattatttcagatattgtgtctcttagggactgttttctgaattacctattgtcccagacatgaagttgctccttgacaaatagttccccaaatggctgtaccttcttctccagaaccctt

SEQ ID NO: 350669 - DNA, 4095 bp, Homo sapiens
tttgccctcacttggtgaccttcctctctggggatgttttagatctcaccactgagctgagttgggagctgaccattcccccagaagtacagcggatcgtcaaggtgaaggggaaacgcagcagtgagcacgttcattcccagggccgtgtgatgggggaccgcagtgtgctctacaagagcctgaaccccaacctgctggccgtggtgacagagagcacagacgcgcaccatgagcgcacctttattggcatcttcctcattgatggcgtcactgggcgtatcattcactcctctgtgcagaagaaagccaaaggccctgtccatatcgtgcattcagagaactgggtggtgtaccagtactggaacaccaaggctcggcgcaacgagtttaccgtactggagctctatgagggcactgagcaatacaacgccaccgccttcagctccctggaccgcccccagctgccccaggtcctccagcagtcctatatcttcccgtcctccatcagtgccatggaggccaccatcaccgaacggggcatcaccagccgacacctgctgattggactaccttctggagcaattctttcccttcctaaggctttgctggatccccgccgccccgagatcccaacagaacaaagcagagaggagaacttaatcccgtattctccagatgtacagatacacgcagagcgattcatcaactataaccagacagtttctcgaatgcgaggtatctacacagctccctcgggtctggagtccacttgtttggttgtggcctatggtttggacatttaccaaactcgagtctacccatccaagcagtttgacgttctgaaggatgactatgactacgtgttaatcagcagcgtcctctttggcctggtttttgccaccatgatcactaagagactggcacaggtgaagctcctgaatcgggcctggcgataaagaacaaagactgtgcctaaaagtggagagccaggggagtgtgggtcagataagcagctacagctgcagtttggtggattggtggagtatgtgtgtgtgtcagtgctcagctaagaactgtagggaagatggatgaccttcacgcagaactccttttgggatatacatgatgcagaaaggatcctacatggagagagacagaactctctcagctgacactctcagagattcctgatgggctttctcttgaagtccaaaggcgtctgcattgtttcctttctttgcccatccatgaatgttctgttttgttttttttaataagaattccggctgatttttgtgaggcctgtttaaattgactttactttgccttttgtgtttctcaattttatctagaaatctttctgactttttccatctcttgcttcaaagtaagaggggaactctccttgccgactccaccttataggtacatttggtgttttgcactgggaagaaataggatccatccttagctgaggcttgaggactgatccagcctctcatggcttccctccaaagtaacttagggttgagggatctatatgtgatgtcaaaacttactttaaacctctagtttcgtgctgtcatttattaggctgggccaccaaatctttgtttcaatttatcagaagccaagtgcatactagcgtcttgtttgttgcccattgcctatacttttcacctgagatgtgtgagttggggccttttaaaaactactgaattgtctgagccttgaagacatttccagggagaagagataatctctcatttcacccacaggctggtctaatcataacctagttaaagatgtccttgtttaagaaccccattatttatttttagtttttaatataaattaacatgtgggtcattatatttctccttaaatgaggaaattttaaattttattgatctaacctttgaagctttaaaaaaggagaaagagggtaggggtgggaaactggcatactgtgtgtatagcactgccgattggctaggccactgtgtctctgctacaaattaaagaaatcctaaaagttttccttggtcatagagttggggaatgacagaatttttctttgttgtgaaatgtatgtacagagtagaccatctctagccctgtggtgaaagaggtacactcgaatgtttgcataaagcaagtgacaaatgacactgtttaagtcctcttttgtgtcttagaagatcattttgaggctattttcacattagaggggataaaagcagtgaagacatggagtaagtgtattttattttagtaaggaaaggtcagtttaatcatatatgggttggttaggttatctaaaaatttgtcatctttctatggtcatatgctgatggtagattatggcagagaaggaagaggaaatgacaaccattttattaattgtcagtttgatattgagtgactgaatgtctaagaatctccagaaaaaaacaggcatctatcatcctgacccaaggcatattttaacataacctgggagaagagagttaagtacaagttaaaaaaaattctgccctagttttgagaaagcctggctggaattctgactgtcttacatacatatgtgcaaggttagcctgcaagattctagtttttatttaccagtgtgccagaatctgaaacaagctactgggagggaaggtatttgtcctttagtaaaattccctgtatttcagctgtaatcaaagttacctcaaagcaggtgctttttttttttttgagaccctggctcaaaaacaaaaacaaaaactagtttgttttagtattcattaattacgtatatgagcactggtagtctagtgtttgttcttgtatacagtgttttcttaaatgagatgatgctatttaattctgttacttgttttttcaactaatggatcttttaaagttttttatttaaattttttgtgggtacatattaggtacatatacttatggggtacatgagatgtttttataaaggctcagctaatgtatcttgaatatcatgtattcataaagatgactgaaatagtttctggaacaaagtctgatagaaaaaatactcaattcctaatttaagtgttagagactttaatgtaagctatctaatctgaactagtttcattatttgtgtgtgggtacatgttatgtgctccgtaaggcatctttcaatttgaaaatttcataattgtaatttcactgcctttataaattgctttttttttggaggcagggtctctgtcacccaggctggagagcagtggcacagtcatagctcactgcagcctcgaacacctgggctgaagtgatcctccctccttagcctcccaaagtgccgggattacaggcatgagctactgcacctggcccataaattgtcatacttttaaagagcctattacacaaagtatcatcagaatcatcccaagactcatttcctgattcctaattatttaaaattttgcttttaggcgaggcatggtggctcaagcctataatcccagcactttgggaggccaaggcaggcagatcatttgaggtcaggagtttaagaccagcctggccaacatggtgaaacctgaaaccccatctctaccaaaaaaataaaaaaatttagccaggtgtggtggtgcatgcctgtaatcccagctacttgggaggctgaggcaggagaatcgaacccaggaggcaaaggctgcagtgagccgagatcgtgcctctgcactccagtctgggcaacacagtgagaccctgtctcaaaaataaataaaatgaaaaaattgcttttaaatcatgaaaccattctgttttctttacttggaatgttttcttccctgcttaaaatctggcttgtctcaaatctgaactcctccataaagtcttccctattggtttcagctactcaggaccttcaaccatcctggctgcttaccacgtaacttcctgagtgatataccacacccctttattatttcagatattgtgtctcttagggactgttttctgaattacctattgtcccagacatgaagttgctccttgacaaatagttccccaaatggctgtaccttcttctccagaaccctt

SEQ ID NO: 350670 - DNA, 3365 bp, Homo sapiens
ggcgcggtgcatgccgggacggcgggggtggtgcatgcgctcgcatcatggcggctgagtgggcttctcgtttctggctttgggctacgctgctgattcctgcggccgcggtctacgaagaccaagtgggcaagtttgattggagacagcaatatgttgggaaggtcaagtttgcctccttggaattttcccctggatccaagaagttggttgtagccacagagaagaatgtgattgcagcattaaattcccgaactggggagatcttgtggcgccatgttgacaagggcacggcagaaggggctgtggatgccatgctgctgcacggacaggatgtgatcactgtgtccaatggaggccgaatcatgcgttcctgggagactaacatcgggggcctgaactgggagataaccctggacagtggcagtttccaggcacttgggctggttggcctgcaggagtctgtaaggtacatcgcagtcctgaagaagactacacttgccctccatcacctctccagtgggcacctcaagtgggtggaacatctcccagaaagtgacagcatccactaccagatggtgtattcttacggctctggggtggtgtgggccctcggagttgttcccttcagccatgtgaacattgtcaagtttaatgtggaagatggagagattgttcagcaggttagggtttcaactccgtggctgcagcacctgtctggagcctgtggtgtggtggatgaggctgtcctggtgtgtcctgacccgagctcacgttccctccaaactttggctctggagacggaatgggagttgagacagatcccactgcagtctctcgacttagaatttggaagtggattccaaccccgggtcctgcctacccagcccaacccagtggacgcttcccgggcccagttcttcctgcacttgtccccaagccactatgctctgctgcagtaccattatggaacgctgagtttgcttaaaaacttcccacagactgccctagtgagctttgccaccactggggagaagacggtggctgcagtcatggcctgtcggaatgaagtgcagaaaagtagcagttctgaagatgggtcaatggggagcttttcggagaagtctagttcaaaggactctctggcttgcttcaatcagacctacaccattaacctatacctcgtggagacaggtcggcggctgctggacaccacgataacatttagcctggaacagagcggcactcggcctgagcggctgtatatccaggtgttcttgaagaaggatgactcagtgggctaccgggctttggtgcagacagaggatcatctgctacttttcctgcagcagttggcagggaaggtggtgctgtggagccgtgaggagtccctggcagaagtggtgtgcctagagatggtggacctccccctgactggggcacaggccgagctggaaggagaatttggcaaaaaggcagatggcttgctggggatgttcctgaaacgcctctcgtctcagcttatcctgctgcaagcatggacttcccacctctggaaaatgttttatgatgctcggaagccccggagtcagattaagaatgagatcaacattgacaccctggccagagatgaattcaacctccagaagatgatggtgatggtaacagcctcaggcaagctttttggcattgagagcagctctggcaccatcctgtggaaacagtatctacccaatgtcaagccagactcctcctttaaactgatggtccagagaactactgctcatttcccccatcccccacagtgcaccctgctggtgaaggacaaggagtcgggaatgagttctctgtatgtcttcaatcccatttttgggaagtggagtcaggtagctcccccagtgctgaagcgccccatcttgcagtccttgcttctcccagtcatggatcaagactacgccaaggtgttgctgttgatagatgatgaatacaaggtcacagcttttccagccactcggaatgtcttgcgacagctacatgagcttgccccttccatcttcttctatttggtggatgcagagcagggacggctgtgtggatatcggcttcgaaaggatctcaccactgagctgagttgggagctgaccattcccccagaagtacagcggatcgtcaaggtgaaggggaaacgcagcagtgagcacgttcattcccagggccgtgtgatgggggaccgcagtgtgctctacaagagcctgaaccccaacctgctggccgtggtgacagagagcacagacgcgcaccatgagcgcacctttattggcatcttcctcattgatggcgtcactgggcgtatcattcactcctctgtgcagaagaaagccaaaggccctgtccatatcgtgcattcagagaactgggtggtgtaccagtactggaacaccaaggctcggcgcaacgagtttaccgtactggagctctatgagggcactgagcaatacaacgccaccgccttcagctccctggaccgcccccagctgccccaggtcctccagcagtcctatatcttcccgtcctccatcagtgccatggaggccaccatcaccgaacggggcatcaccagccgacacctgctgattggactaccttctggagcaattctttcccttcctaaggctttgctggatccccgccgccccgagatcccaacagaacaaagcagatgtacagatacacgcagagcgattcatcaactataaccagacagtttctcgaatgcgaggtatctacacagctccctcgggtctggagtccacttgtttggttgtggcctatggtttggacatttaccaaactcgagtctacccatccaagcagtttgacgttctgaaggatgactatgactacgtgttaatcagcagcgtcctctttggcctggtttttgccaccatgatcactaagagactggcacaggtgaagctcctgaatcgggcctggcgataaagaacaaagactgtgcctaaaagtggagagccaggggagtgtgggtcagataagcagctacagctgcagtttggtggattggtggagtatgtgtgtgtgtcagtgctcagctaagaactgtagggaagatggatgaccttcacgcagaactccttttgggatatacatgatgcagaaaggatcctacatggagagagacagaactctctcagctgacactctcagagattcctgatgggctttctcttgaagtccaaaggcgtctgcattgtttcctttctttgcccatccatgaatgttctgttttgttatgtctttaatcacaagacttcccgtcgatttcagcactcccgcccctcgcccct

SEQ ID NO: 350671 - DNA, 594 bp, Homo sapiens
cggccgcggtctacgaagaccaagtgggcaagtttgattggtgcgtacgtgtggaacatattcgagagataagtggctgtttccccagtacctgtctcctacctgctaaaggttgtcacttaacaggattggccgcataatttgcaggacccagtacaaaatgaaaacgtggggccccttgttaaaaaattattaaggatttaaagtcgttggaagcagagccttaaaccaagtgttaggggtcattctaagctgatccttgcgtgtaagccggccctgccatccaggaatgcttggggtgccggtcagagatcactgatcccgtcctccctcgtcaggttcgatttttttgactgtgaggtttctggtctaccaggtgtcagaggtcgccaagctgtcagtgaactttaattcctactcgaattggtgtcttgtaggcaagtgaacaggagctttcgtcttaaaagtcctaaactgagtccttttcccctctcatcaacctagtctggccctgggctcacagcaggattgcccaaaacactaagcagctagaatatgccattcactcattcattcattcacccacccacgtct

SEQ ID NO: 350672 - DNA, 396 bp, Homo sapiens
tcttagtcttctgggttgccaccttttgttcatagtaatgtctaactttcatgtctctcagtgtggcgccatgttgacaagggcacggcagaaggggctgtggatgccatgctgctgcacggacagggtaagcagagtcctcccgtgtctccattgtgcggccagctccctgtcccattccttggctccttgatctgtacagggtctggtagggaaaggagactggggactcctgacagtgaaggacaggtacctgtttaacatgtatttgcatccagaaatcagaggtgaggccactgctcacagtgggaccctaggaagcgacagagcaagtgggaaatgacttcaccacgatcttttcttttccagatgtgatcactgtgtccaatggaggcc

SEQ ID NO: 350673 - DNA, 367 bp, Homo sapiens
ggagagcaggaattagcttagtggttcagtgtgttggctttaaaatggtcggctttcctcttgtggtgtgaagtgccagtcatctgtatgttctttcttttcagatttagaacaaagtaggaatctagatctcagtcttactctccagagagcttcctttcttgtagtccttcctaacattcagctgctaaatttttaactacctaatgcaagcagacctcctaggagatttgaggctagatatgtagcctggaaacctcccaggactcaggaagggcagccaagagatccctttacagcagtgctcagactgcctgtcccggctggtgttttgcagaagaggagaacttaatcccgtattctccag

SEQ ID NO: 350674 - DNA, 412 bp, Homo sapiens
tgaccattctgctccaaagtggggagcactttcaactctaaggccaagggccttccctggagaggtgaccctctgtaaggcagctggctagtactggtcccatttaggagctgatgccttgcttttcccccagactgccctagtgagctttgccaccactggggagaagacggtggctgcagtcatggcctgtcggaatgaagtggtgagtattgagaacaacagtcagcacttgggattttccttcctggtctccactaggaaccctgaaaatcagaagtctgggcacattgacctggtcagtttgaacccagcgggcaggaggctgttgagaagtgaggtcttgcctcaactatagagctttctgcacaccccatttctccccaggaacgagaccctaatgtgatgacct

SEQ ID NO: 350675 - DNA, 333 bp, Homo sapiens
aggaggctgaggtaggaggatcacttgagcctgggaggtcgaggctgcagtgagccatgaacatgctactgcattccagcctgggcaacagagtgagaccctggctcaaaaacaaaaacaaaaactagtttgttttagtattcattaattacgtatatgagcactggtagtctagtgtttgttcttgtatacagtgttttcttaaatgagatgatgctatttaattctgttacttgttttttcaactaatggatcttttaaagttttttatttaaattttttgtgggtacatattaggtacatatacttatggggtacatgagatgtttttat

SEQ ID NO: 350676 - DNA, 495 bp, Homo sapiens
cctggctcatttttctagttctgatctctattccttcctgcacaaaggcctcaaataatgaactgtaggatgtgtctaactccagctgtttcagttctaagtgtaccctcctgattacaggcttttttgcccctgccctaggatctcaccactgagctgagttgggagctgaccattcccccagaagtacagcggatcgtcaaggtgaaggggaaacgcagcagtgagcacgttcattcccagggccgtgtgatgggggaccgcagtgtgctctacaaggtacatacagccagctgtctggtctacagcaagggctttcgaatcaggaaaacaagggcttcaagtctggctgtaggacttggtacatatatgaccttgagtaagtcatttaatccctttgagccttaatttttgtttgtgaaatggggataatataccctcctcctgggcttgttgtgatgatcacatgggatgttcatgtctagcccagtgcct

SEQ ID NO: 350677 - DNA, 922 bp, Homo sapiens
acattttgacttttttctttgtgacgttagcctaggggactattcacctacagccaagaacttattttccacaaagagggcaaagactagagaacccccacagttgttgagctggagtcccagctcttcaggtctatccctaggatttgcagtcttttcttgttggtggagcctgacagtttgctcattttaggagtcgggaatgagttctctgtatgtcttcaatcccatttttgggaagtggagtcaggtagctcccccagtgctgaagcgccccatcttgcagtccttgcttctcccagtcatggatcaagactacgccaaggtgttgctgttgatagatgatgaatacaaggtactgtcttcagaggggatggagaacatgctagcggagtccggtttggggccaggtggtcaaacacagcggcccggagatggagtgctctctgcacccagcacgtgtttgggctctaaggccatcccgaagagaaatgatggctgtgtctgcatttgtgaaaactcaggttcttaacagaactgaatgtaaaccctaaactgagttcaaatcaactgatttgcagttttattcttaaggctctctttgatggggaaatttcctaactctttccttgggctctctgggtttttcaaggtcacagcttttccagccactcggaatgtcttgcgacagctacatgagcttgccccttccatcttcttctatttggtggatgcaggtgtttcctggccatttggctaagaagtgaattatgctactcattctactgtaaacttagattagcataatcctgatgtctgatacaaagtcaatcatttgttcatatttgttgggcagctactacatggcagatacggttctaggtgctgtggatggagtggtgcacagtagaacaaatctctg

SEQ ID NO: 350678 - DNA, 5893 bp, Homo sapiens
ggcgcggtgcatgccgggacggcgggggtggtgcatgcgctcgcatcatggcggctgagtgggcttctcgtttctggctttgggctacgctgctgattcctgcggccgcggtctacgaagaccaagtgggcaagtttgattggagacagcaatatgttgggaaggtcaagtttgcctccttggaattttcccctggatccaagaagttggttgtagccacagagaagaatgtgattgcagcattaaattcccgaactggggagatcttgtggcgccatgttgacaagggcacggcagaaggggctgtggatgccatgctgctgcacggacaggatgtgatcactgtgtccaatggaggccgaatcatgcgttcctgggagactaacatcgggggcctgaactgggagataaccctggacagtggcagtttccaggcacttgggctggttggcctgcaggagtctgtaaggtacatcgcagtcctgaagaagactacacttgccctccatcacctctccagtgggcacctcaagtgggtggaacatctcccagaaagtgacagcatccactaccagatggtgtattcttacggctctggggtggtgtgggccctcggagttgttcccttcagccatgtgaacattgtcaagtttaatgtggaagatggagagattgttcagcaggttagggtttcaactccgtggctgcagcacctgtctggagcctgtggtgtggtggatgaggctgtcctggtgtgtcctgacccgagctcacgttccctccaaactttggctctggagacggaatgggagttgagacagatcccactgcagtctctcgacttagaatttggaagtggattccaaccccgggtcctgcctacccagcccaacccagtggacgcttcccgggcccagttcttcctgcacttgtccccaagccactatgctctgctgcagtaccattatggaacgctgagtttgcttaaaaacttcccacagactgccctagtgagctttgccaccactggggagaagacggtggctgcagtcatggcctgtcggaatgaagtgcagaaaagtagcagttctgaagatgggtcaatggggagcttttcggagaagtctagttcaaaggactctctggcttgcttcaatcagacctacaccattaacctatacctcgtggagacaggtcggcggctgctggacaccacgataacatttagcctggaacagagcggcactcggcctgagcggctgtatatccaggtgttcttgaagaaggatgactcagtgggctaccgggctttggtgcagacagaggatcatctgctacttttcctgcagcagttggcagggaaggtggtgctgtggagccgtgaggagtccctggcagaagtggtgtgcctagagatggtggacctccccctgactggggcacaggccgagctggaaggagaatttggcaaaaaggcagatggcttgctggggatgttcctgaaacgcctctcgtctcagcttatcctgctgcaagcatggacttcccacctctggaaaatgttttatgatgctcggaagccccggagtcagattaagaatgagatcaacattgacaccctggccagagatgaattcaacctccagaagatgatggtgatggtaacagcctcaggcaagctttttggcattgagagcagctctggcaccatcctgtggaaacagtatctacccaatgtcaagccagactcctcctttaaactgatggtccagagaactactgctcatttcccccatcccccacagtgcaccctgctggtgaaggacaaggagtcgggaatgagttctctgtatgtcttcaatcccatttttgggaagtggagtcaggtagctcccccagtgctgaagcgccccatcttgcagtccttgcttctcccagtcatggatcaagactacgccaaggtgttgctgttgatagatgatgaatacaaggtcacagcttttccagccactcggaatgtcttgcgacagctacatgagcttgccccttccatcttcttctatttggtggatgcagagcagggacggctgtgtggatatcggcttcgaaaggatctcaccactgagctgagttgggagctgaccattcccccagaagtacagcggatcgtcaaggtgaaggggaaacgcagcagtgagcacgttcattcccagggccgtgtgatgggggaccgcagtgtgctctacaagagcctgaaccccaacctgctggccgtggtgacagagagcacagacgcgcaccatgagcgcacctttattggcatcttcctcattgatggcgtcactgggcgtatcattcactcctctgtgcagaagaaagccaaaggccctgtccatatcgtgcattcagagaactgggtggtgtaccagtactggaacaccaaggctcggcgcaacgagtttaccgtactggagctctatgagggcactgagcaatacaacgccaccgccttcagctccctggaccgcccccagctgccccaggtcctccagcagtcctatatcttcccgtcctccatcagtgccatggaggccaccatcaccgaacggggcatcaccagccgacacctgctgattggactaccttctggagcaattctttcccttcctaaggctttgctggatccccgccgccccgagatcccaacagaacaaagcagagaggagaacttaatcccgtattctccagatgtacagatacacgcagagcgattcatcaactataaccagacagtttctcgaatgcgaggtatctacacagctccctcgggtctggagtccacttgtttggttgtggcctatggtttggacatttaccaaactcgagtctacccatccaagcagtttgacgttctgaaggatgactatgactacgtgttaatcagcagcgtcctctttggcctggtttttgccaccatgatcactaagagactggcacaggtgaagctcctgaatcgggcctggcgataaagaacaaagactgtgcctaaaagtggagagccaggggagtgtgggtcagataagcagctacagctgcagtttggtggattggtggagtatgtgtgtgtgtcagtgctcagctaagaactgtagggaagatggatgaccttcacgcagaactccttttgggatatacatgatgcagaaaggatcctacatggagagagacagaactctctcagctgacactctcagagattcctgatgggctttctcttgaagtccaaaggcgtctgcattgtttcctttctttgcccatccatgaatgttctgttttgttttttttaataagaattccggctgatttttgtgaggcctgtttaaattgactttactttgccttttgtgtttctcaattttatctagaaatctttctgactttttccatctcttgcttcaaagtaagaggggaactctccttgccgactccaccttataggtacatttggtgttttgcactgggaagaaataggatccatccttagctgaggcttgaggactgatccagcctctcatggcttccctccaaagtaacttagggttgagggatctatatgtgatgtcaaaacttactttaaacctctagtttcgtgctgtcatttattaggctgggccaccaaatctttgtttcaatttatcagaagccaagtgcatactagcgtcttgtttgttgcccattgcctatacttttcacctgagatgtgtgagttggggccttttaaaaactactgaattgtctgagccttgaagacatttccagggagaagagataatctctcatttcacccacaggctggtctaatcataacctagttaaagatgtccttgtttaagaaccccattatttatttttagtttttaatataaattaacatgtgggtcattatatttctccttaaatgaggaaattttaaattttattgatctaacctttgaagctttaaaaaaggagaaagagggtaggggtgggaaactggcatactgtgtgtatagcactgccgattggctaggccactgtgtctctgctacaaattaaagaaatcctaaaagttttccttggtcatagagttggggaatgacagaatttttctttgttgtgaaatgtatgtacagagtagaccatctctagccctgtggtgaaagaggtacactcgaatgtttgcataaagcaagtgacaaatgacactgtttaagtcctcttttgtgtcttagaagatcattttgaggctattttcacattagaggggataaaagcagtgaagacatggagtaagtgtattttattttagtaaggaaaggtcagtttaatcatatatgggttggttaggttatctaaaaatttgtcatctttctatggtcatatgctgatggtagattatggcagagaaggaagaggaaatgacaaccattttattaattgtcagtttgatattgagtgactgaatgtctaagaatctccagaaaaaaacaggcatctatcatctgagaccctggctcaaaaacaaaaacaaaaactagtttgttttagtattcattaattacgtatatgagcactggtagtctagtgtttgttcttgtatacagtgttttcttaaatgagatgatgctatttaattctgttacttgttttttcaactaatggatcttttaaagttttttatttaaattttttgtgggtacatattaggtacatatacttatggggtacatgagatgtttttataaaggctcagctaatgtatcttgaatatcatgtattcataaagatgactgaaatagtttctggaacaaagtctgatagaaaaaatactcaattcctaatttaagtgttagagactttaatgtaagctatctaatctgaactagtttcattatttgtgtgtgggtacatgttatgtgctccgtaaggcatctttcaatttgaaaatttcataattgtaatttcactgcctttataaattgctttttttttggaggcagggtctctgtcacccaggctggagagcagtggcacagtcatagctcactgcagcctcgaacacctgggctgaagtgatcctccctccttagcctcccaaagtgccgggattacaggcatgagctactgcacctggcccataaattgtcatacttttaaagagcctattacacaaagtatcatcagaatcatcccaagactcatttcctgattcctaattatttaaaattttgcttttaggcgaggcatggtggctcaagcctataatcccagcactttgggaggccaaggcaggcagatcatttgaggtcaggagtttaagaccagcctggccaacatggtgaaacctgaaaccccatctctaccaaaaaaataaaaaaatttagccaggtgtggtggtgcatgcctgtaatcccagctacttgggaggctgaggcaggagaatcgaacccaggaggcaaaggctgcagtgagccgagatcgtgcctctgcactccagtctgggcaacacagtgagaccctgtctcaaaaataaataaaatgaaaaaattgcttttaaatcatgaaaccattctgttttctttacttggaatgttttcttccctgcttaaaatctggcttgtctcaaatctgaactcctccataaagtcttccctattggtttcagctactcaggaccttcaaccatcctggctgcttaccacgtaacttcctgagtgatataccacacccctttattatttcagatattgtgtctcttagggactgttttctgaattacctattgtcccagacatgaagttgctccttgacaaatagttccccaaatggctgtaccttcttctccagaaccctt

SEQ ID NO: 350679 - DNA, 6680 bp, Homo sapiens
ggcgcggtgcatgccgggacggcgggggtggtgcatgcgctcgcatcatggcggctgagtgggcttctcgtttctggctttgggctacgctgctgattcctgcggccgcggtctacgaagaccaagtgggcaagtttgattggagacagcaatatgttgggaaggtcaagtttgcctccttggaattttcccctggatccaagaagttggttgtagccacagagaagaatgtgattgcagcattaaattcccgaactggggagatcttgtggcgccatgttgacaagggcacggcagaaggggctgtggatgccatgctgctgcacggacaggatgtgatcactgtgtccaatggaggccgaatcatgcgttcctgggagactaacatcgggggcctgaactgggagataaccctggacagtggcagtttccaggcacttgggctggttggcctgcaggagtctgtaaggtacatcgcagtcctgaagaagactacacttgccctccatcacctctccagtgggcacctcaagtgggtggaacatctcccagaaagtgacagcatccactaccagatggtgtattcttacggctctggggtggtgtgggccctcggagttgttcccttcagccatgtgaacattgtcaagtttaatgtggaagatggagagattgttcagcaggttagggtttcaactccgtggctgcagcacctgtctggagcctgtggtgtggtggatgaggctgtcctggtgtgtcctgacccgagctcacgttccctccaaactttggctctggagacggaatgggagttgagacagatcccactgcagtctctcgacttagaatttggaagtggattccaaccccgggtcctgcctacccagcccaacccagtggacgcttcccgggcccagttcttcctgcacttgtccccaagccactatgctctgctgcagtaccattatggaacgctgagtttgcttaaaaacttcccacaggtaactgcaggcaacatggtttgctaggattcaggagatctctccaagacatggatgctagaaggcagtgcttttgaatctggaaacgtttgctcttaggcccaagattgatgacaccttcccgtaagtggtttgagagggggtaggtagccttatcatagaaatggtgtatttcctcctgagtattacaaaggatctttagagcaaaactagtgccttccttagtccaaaggaaatatggggacataaatgagagcttccccatagatagtaagaacaagcagcatgggatttaagattgacctgtgcctgcgttggaggtagggagagttctgttttcagctgtagatgcaactgaggcctccctctgctcttaaatgcctgaccattctgctccaaagtggggagcactttcaactctaaggccaagggccttccctggagaggtgaccctctgtaaggcagctggctagtactggtcccatttaggagctgatgccttgcttttcccccagactgccctagtgagctttgccaccactggggagaagacggtggctgcagtcatggcctgtcggaatgaagtgcagaaaagtagcagttctgaagatgggtcaatggggagcttttcggagaagtctagttcaaaggactctctggcttgcttcaatcagacctacaccattaacctatacctcgtggagacaggtcggcggctgctggacaccacgataacatttagcctggaacagagcggcactcggcctgagcggctgtatatccaggtgttcttgaagaaggatgactcagtgggctaccgggctttggtgcagacagaggatcatctgctacttttcctgcagcagttggcagggaaggtggtgctgtggagccgtgaggagtccctggcagaagtggtgtgcctagagatggtggacctccccctgactggggcacaggccgagctggaaggagaatttggcaaaaaggcagatggcttgctggggatgttcctgaaacgcctctcgtctcagcttatcctgctgcaagcatggacttcccacctctggaaaatgttttatgatgctcggaagccccggagtcagattaagaatgagatcaacattgacaccctggccagagatgaattcaacctccagaagatgatggtgatggtaacagcctcaggcaagctttttggcattgagagcagctctggcaccatcctgtggaaacagtatctacccaatgtcaagccagactcctcctttaaactgatggtccagagaactactgctcatttcccccatcccccacagtgcaccctgctggtgaaggacaaggagtcgggaatgagttctctgtatgtcttcaatcccatttttgggaagtggagtcaggtagctcccccagtgctgaagcgccccatcttgcagtccttgcttctcccagtcatggatcaagactacgccaaggtgttgctgttgatagatgatgaatacaaggtcacagcttttccagccactcggaatgtcttgcgacagctacatgagcttgccccttccatcttcttctatttggtggatgcagagcagggacggctgtgtggatatcggcttcgaaaggatctcaccactgagctgagttgggagctgaccattcccccagaagtacagcggatcgtcaaggtgaaggggaaacgcagcagtgagcacgttcattcccagggccgtgtgatgggggaccgcagtgtgctctacaagagcctgaaccccaacctgctggccgtggtgacagagagcacagacgcgcaccatgagcgcacctttattggcatcttcctcattgatggcgtcactgggcgtatcattcactcctctgtgcagaagaaagccaaaggccctgtccatatcgtgcattcagagaactgggtggtgtaccagtactggaacaccaaggctcggcgcaacgagtttaccgtactggagctctatgagggcactgagcaatacaacgccaccgccttcagctccctggaccgcccccagctgccccaggtcctccagcagtcctatatcttcccgtcctccatcagtgccatggaggccaccatcaccgaacggggcatcaccagccgacacctgctgattggactaccttctggagcaattctttcccttcctaaggctttgctggatccccgccgccccgagatcccaacagaacaaagcagagaggagaacttaatcccgtattctccagatgtacagatacacgcagagcgattcatcaactataaccagacagtttctcgaatgcgaggtatctacacagctccctcgggtctggagtccacttgtttggttgtggcctatggtttggacatttaccaaactcgagtctacccatccaagcagtttgacgttctgaaggatgactatgactacgtgttaatcagcagcgtcctctttggcctggtttttgccaccatgatcactaagagactggcacaggtgaagctcctgaatcgggcctggcgataaagaacaaagactgtgcctaaaagtggagagccaggggagtgtgggtcagataagcagctacagctgcagtttggtggattggtggagtatgtgtgtgtgtcagtgctcagctaagaactgtagggaagatggatgaccttcacgcagaactccttttgggatatacatgatgcagaaaggatcctacatggagagagacagaactctctcagctgacactctcagagattcctgatgggctttctcttgaagtccaaaggcgtctgcattgtttcctttctttgcccatccatgaatgttctgttttgttttttttaataagaattccggctgatttttgtgaggcctgtttaaattgactttactttgccttttgtgtttctcaattttatctagaaatctttctgactttttccatctcttgcttcaaagtaagaggggaactctccttgccgactccaccttataggtacatttggtgttttgcactgggaagaaataggatccatccttagctgaggcttgaggactgatccagcctctcatggcttccctccaaagtaacttagggttgagggatctatatgtgatgtcaaaacttactttaaacctctagtttcgtgctgtcatttattaggctgggccaccaaatctttgtttcaatttatcagaagccaagtgcatactagcgtcttgtttgttgcccattgcctatacttttcacctgagatgtgtgagttggggccttttaaaaactactgaattgtctgagccttgaagacatttccagggagaagagataatctctcatttcacccacaggctggtctaatcataacctagttaaagatgtccttgtttaagaaccccattatttatttttagtttttaatataaattaacatgtgggtcattatatttctccttaaatgaggaaattttaaattttattgatctaacctttgaagctttaaaaaaggagaaagagggtaggggtgggaaactggcatactgtgtgtatagcactgccgattggctaggccactgtgtctctgctacaaattaaagaaatcctaaaagttttccttggtcatagagttggggaatgacagaatttttctttgttgtgaaatgtatgtacagagtagaccatctctagccctgtggtgaaagaggtacactcgaatgtttgcataaagcaagtgacaaatgacactgtttaagtcctcttttgtgtcttagaagatcattttgaggctattttcacattagaggggataaaagcagtgaagacatggagtaagtgtattttattttagtaaggaaaggtcagtttaatcatatatgggttggttaggttatctaaaaatttgtcatctttctatggtcatatgctgatggtagattatggcagagaaggaagaggaaatgacaaccattttattaattgtcagtttgatattgagtgactgaatgtctaagaatctccagaaaaaaacaggcatctatcatcctgacccaaggcatattttaacataacctgggagaagagagttaagtacaagttaaaaaaaattctgccctagttttgagaaagcctggctggaattctgactgtcttacatacatatgtgcaaggttagcctgcaagattctagtttttatttaccagtgtgccagaatctgaaacaagctactgggagggaaggtatttgtcctttagtaaaattccctgtatttcagctgtaatcaaagttacctcaaagcaggtgctttttttttttttgagaccctggctcaaaaacaaaaacaaaaactagtttgttttagtattcattaattacgtatatgagcactggtagtctagtgtttgttcttgtatacagtgttttcttaaatgagatgatgctatttaattctgttacttgttttttcaactaatggatcttttaaagttttttatttaaattttttgtgggtacatattaggtacatatacttatggggtacatgagatgtttttataaaggctcagctaatgtatcttgaatatcatgtattcataaagatgactgaaatagtttctggaacaaagtctgatagaaaaaatactcaattcctaatttaagtgttagagactttaatgtaagctatctaatctgaactagtttcattatttgtgtgtgggtacatgttatgtgctccgtaaggcatctttcaatttgaaaatttcataattgtaatttcactgcctttataaattgctttttttttggaggcagggtctctgtcacccaggctggagagcagtggcacagtcatagctcactgcagcctcgaacacctgggctgaagtgatcctccctccttagcctcccaaagtgccgggattacaggcatgagctactgcacctggcccataaattgtcatacttttaaagagcctattacacaaagtatcatcagaatcatcccaagactcatttcctgattcctaattatttaaaattttgcttttaggcgaggcatggtggctcaagcctataatcccagcactttgggaggccaaggcaggcagatcatttgaggtcaggagtttaagaccagcctggccaacatggtgaaacctgaaaccccatctctaccaaaaaaataaaaaaatttagccaggtgtggtggtgcatgcctgtaatcccagctacttgggaggctgaggcaggagaatcgaacccaggaggcaaaggctgcagtgagccgagatcgtgcctctgcactccagtctgggcaacacagtgagaccctgtctcaaaaataaataaaatgaaaaaattgcttttaaatcatgaaaccattctgttttctttacttggaatgttttcttccctgcttaaaatctggcttgtctcaaatctgaactcctccataaagtcttccctattggtttcagctactcaggaccttcaaccatcctggctgcttaccacgtaacttcctgagtgatataccacacccctttattatttcagatattgtgtctcttagggactgttttctgaattacctattgtcccagacatgaagttgctccttgacaaatagttccccaaatggctgtaccttcttctccagaaccctt

SEQ ID NO: 350680 - DNA, 6255 bp, Homo sapiens
tgccaggtatttaaaattatcggatatatttttccagtgaccagaaagaaaatcctgatattttttccaactttgaaggctctcaggaggttggagggtggggtttcaggggacaggaagaactcctatacaaccaaccatgaagaacctttgagcttaggacccccagtgggatgctggcagcaatattgctgttgggctgagagggaaatgtaaaaatctttcacgagcttcctgttaacgatgacttttctgtaggttagggtttcaactccgtggctgcagcacctgtctggagcctgtggtgtggtggatgaggctgtcctggtgtgtcctgacccgagctcacgttccctccaaactttggctctggagacggaatgggagttgagacagatcccactgcagtctctcgacttagaatttggaagtggattccaaccccgggtcctgcctacccagcccaacccagtggacgcttcccgggcccagttcttcctgcacttgtccccaagccactatgctctgctgcagtaccattatggaacgctgagtttgcttaaaaacttcccacaggtaactgcaggcaacatggtttgctaggattcaggagatctctccaagacatggatgctagaaggcagtgcttttgaatctggaaacgtttgctcttaggcccaagattgatgacaccttcccgtaagtggtttgagagggggtaggtagccttatcatagaaatggtgtatttcctcctgagtattacaaaggatctttagagcaaaactagtgccttccttagtccaaaggaaatatggggacataaatgagagcttccccatagatagtaagaacaagcagcatgggatttaagattgacctgtgcctgcgttggaggtagggagagttctgttttcagctgtagatgcaactgaggcctccctctgctcttaaatgcctgaccattctgctccaaagtggggagcactttcaactctaaggccaagggccttccctggagaggtgaccctctgtaaggcagctggctagtactggtcccatttaggagctgatgccttgcttttcccccagactgccctagtgagctttgccaccactggggagaagacggtggctgcagtcatggcctgtcggaatgaagtgcagaaaagtagcagttctgaagatgggtcaatggggagcttttcggagaagtctagttcaaaggactctctggcttgcttcaatcagacctacaccattaacctatacctcgtggagacaggtcggcggctgctggacaccacgataacatttagcctggaacagagcggcactcggcctgagcggctgtatatccaggtgttcttgaagaaggatgactcagtgggctaccgggctttggtgcagacagaggatcatctgctacttttcctgcagcagttggcagggaaggtggtgctgtggagccgtgaggagtccctggcagaagtggtgtgcctagagatggtggacctccccctgactggggcacaggccgagctggaaggagaatttggcaaaaaggcagatggcttgctggggatgttcctgaaacgcctctcgtctcagcttatcctgctgcaagcatggacttcccacctctggaaaatgttttatgatgctcggaagccccggagtcagattaagaatgagatcaacattgacaccctggccagagatgaattcaacctccagaagatgatggtgatggtaacagcctcaggcaagctttttggcattgagagcagctctggcaccatcctgtggaaacagtatctacccaatgtcaagccagactcctcctttaaactgatggtccagagaactactgctcatttcccccatcccccacagtgcaccctgctggtgaaggacaaggagtcgggaatgagttctctgtatgtcttcaatcccatttttgggaagtggagtcaggtagctcccccagtgctgaagcgccccatcttgcagtccttgcttctcccagtcatggatcaagactacgccaaggtgttgctgttgatagatgatgaatacaaggtcacagcttttccagccactcggaatgtcttgcgacagctacatgagcttgccccttccatcttcttctatttggtggatgcagagcagggacggctgtgtggatatcggcttcgaaaggatctcaccactgagctgagttgggagctgaccattcccccagaagtacagcggatcgtcaaggtgaaggggaaacgcagcagtgagcacgttcattcccagggccgtgtgatgggggaccgcagtgtgctctacaagagcctgaaccccaacctgctggccgtggtgacagagagcacagacgcgcaccatgagcgcacctttattggcatcttcctcattgatggcgtcactgggcgtatcattcactcctctgtgcagaagaaagccaaaggccctgtccatatcgtgcattcagagaactgggtggtgtaccagtactggaacaccaaggctcggcgcaacgagtttaccgtactggagctctatgagggcactgagcaatacaacgccaccgccttcagctccctggaccgcccccagctgccccaggtcctccagcagtcctatatcttcccgtcctccatcagtgccatggaggccaccatcaccgaacggggcatcaccagccgacacctgctgattggactaccttctggagcaattctttcccttcctaaggctttgctggatccccgccgccccgagatcccaacagaacaaagcagagaggagaacttaatcccgtattctccagatgtacagatacacgcagagcgattcatcaactataaccagacagtttctcgaatgcgaggtatctacacagctccctcgggtctggagtccacttgtttggttgtggcctatggtttggacatttaccaaactcgagtctacccatccaagcagtttgacgttctgaaggatgactatgactacgtgttaatcagcagcgtcctctttggcctggtttttgccaccatgatcactaagagactggcacaggtgaagctcctgaatcgggcctggcgataaagaacaaagactgtgcctaaaagtggagagccaggggagtgtgggtcagataagcagctacagctgcagtttggtggattggtggagtatgtgtgtgtgtcagtgctcagctaagaactgtagggaagatggatgaccttcacgcagaactccttttgggatatacatgatgcagaaaggatcctacatggagagagacagaactctctcagctgacactctcagagattcctgatgggctttctcttgaagtccaaaggcgtctgcattgtttcctttctttgcccatccatgaatgttctgttttgttttttttaataagaattccggctgatttttgtgaggcctgtttaaattgactttactttgccttttgtgtttctcaattttatctagaaatctttctgactttttccatctcttgcttcaaagtaagaggggaactctccttgccgactccaccttataggtacatttggtgttttgcactgggaagaaataggatccatccttagctgaggcttgaggactgatccagcctctcatggcttccctccaaagtaacttagggttgagggatctatatgtgatgtcaaaacttactttaaacctctagtttcgtgctgtcatttattaggctgggccaccaaatctttgtttcaatttatcagaagccaagtgcatactagcgtcttgtttgttgcccattgcctatacttttcacctgagatgtgtgagttggggccttttaaaaactactgaattgtctgagccttgaagacatttccagggagaagagataatctctcatttcacccacaggctggtctaatcataacctagttaaagatgtccttgtttaagaaccccattatttatttttagtttttaatataaattaacatgtgggtcattatatttctccttaaatgaggaaattttaaattttattgatctaacctttgaagctttaaaaaaggagaaagagggtaggggtgggaaactggcatactgtgtgtatagcactgccgattggctaggccactgtgtctctgctacaaattaaagaaatcctaaaagttttccttggtcatagagttggggaatgacagaatttttctttgttgtgaaatgtatgtacagagtagaccatctctagccctgtggtgaaagaggtacactcgaatgtttgcataaagcaagtgacaaatgacactgtttaagtcctcttttgtgtcttagaagatcattttgaggctattttcacattagaggggataaaagcagtgaagacatggagtaagtgtattttattttagtaaggaaaggtcagtttaatcatatatgggttggttaggttatctaaaaatttgtcatctttctatggtcatatgctgatggtagattatggcagagaaggaagaggaaatgacaaccattttattaattgtcagtttgatattgagtgactgaatgtctaagaatctccagaaaaaaacaggcatctatcatcctgacccaaggcatattttaacataacctgggagaagagagttaagtacaagttaaaaaaaattctgccctagttttgagaaagcctggctggaattctgactgtcttacatacatatgtgcaaggttagcctgcaagattctagtttttatttaccagtgtgccagaatctgaaacaagctactgggagggaaggtatttgtcctttagtaaaattccctgtatttcagctgtaatcaaagttacctcaaagcaggtgctttttttttttttgagaccctggctcaaaaacaaaaacaaaaactagtttgttttagtattcattaattacgtatatgagcactggtagtctagtgtttgttcttgtatacagtgttttcttaaatgagatgatgctatttaattctgttacttgttttttcaactaatggatcttttaaagttttttatttaaattttttgtgggtacatattaggtacatatacttatggggtacatgagatgtttttataaaggctcagctaatgtatcttgaatatcatgtattcataaagatgactgaaatagtttctggaacaaagtctgatagaaaaaatactcaattcctaatttaagtgttagagactttaatgtaagctatctaatctgaactagtttcattatttgtgtgtgggtacatgttatgtgctccgtaaggcatctttcaatttgaaaatttcataattgtaatttcactgcctttataaattgctttttttttggaggcagggtctctgtcacccaggctggagagcagtggcacagtcatagctcactgcagcctcgaacacctgggctgaagtgatcctccctccttagcctcccaaagtgccgggattacaggcatgagctactgcacctggcccataaattgtcatacttttaaagagcctattacacaaagtatcatcagaatcatcccaagactcatttcctgattcctaattatttaaaattttgcttttaggcgaggcatggtggctcaagcctataatcccagcactttgggaggccaaggcaggcagatcatttgaggtcaggagtttaagaccagcctggccaacatggtgaaacctgaaaccccatctctaccaaaaaaataaaaaaatttagccaggtgtggtggtgcatgcctgtaatcccagctacttgggaggctgaggcaggagaatcgaacccaggaggcaaaggctgcagtgagccgagatcgtgcctctgcactccagtctgggcaacacagtgagaccctgtctcaaaaataaataaaatgaaaaaattgcttttaaatcatgaaaccattctgttttctttacttggaatgttttcttccctgcttaaaatctggcttgtctcaaatctgaactcctccataaagtcttccctattggtttcagctactcaggaccttcaaccatcctggctgcttaccacgtaacttcctgagtgatataccacacccctttattatttcagatattgtgtctcttagggactgttttctgaattacctattgtcccagacatgaagttgctccttgacaaatagttccccaaatggctgtaccttcttctccagaaccctt

SEQ ID NO: 350681 - DNA, 4826 bp, Homo sapiens
acattttgacttttttctttgtgacgttagcctaggggactattcacctacagccaagaacttattttccacaaagagggcaaagactagagaacccccacagttgttgagctggagtcccagctcttcaggtctatccctaggatttgcagtcttttcttgttggtggagcctgacagtttgctcattttaggagtcgggaatgagttctctgtatgtcttcaatcccatttttgggaagtggagtcaggtagctcccccagtgctgaagcgccccatcttgcagtccttgcttctcccagtcatggatcaagactacgccaaggtgttgctgttgatagatgatgaatacaaggtactgtcttcagaggggatggagaacatgctagcggagtccggtttggggccaggtggtcaaacacagcggcccggagatggagtgctctctgcacccagcacgtgtttgggctctaaggccatcccgaagagaaatgatggctgtgtctgcatttgtgaaaactcaggttcttaacagaactgaatgtaaaccctaaactgagttcaaatcaactgatttgcagttttattcttaaggctctctttgatggggaaatttcctaactctttccttgggctctctgggtttttcaaggtcacagcttttccagccactcggaatgtcttgcgacagctacatgagcttgccccttccatcttcttctatttggtggatgcagagcagggacggctgtgtggatatcggcttcgaaaggatctcaccactgagctgagttgggagctgaccattcccccagaagtacagcggatcgtcaaggtgaaggggaaacgcagcagtgagcacgttcattcccagggccgtgtgatgggggaccgcagtgtgctctacaagagcctgaaccccaacctgctggccgtggtgacagagagcacagacgcgcaccatgagcgcacctttattggcatcttcctcattgatggcgtcactgggcgtatcattcactcctctgtgcagaagaaagccaaaggccctgtccatatcgtgcattcagagaactgggtggtgtaccagtactggaacaccaaggctcggcgcaacgagtttaccgtactggagctctatgagggcactgagcaatacaacgccaccgccttcagctccctggaccgcccccagctgccccaggtcctccagcagtcctatatcttcccgtcctccatcagtgccatggaggccaccatcaccgaacggggcatcaccagccgacacctgctgattggactaccttctggagcaattctttcccttcctaaggctttgctggatccccgccgccccgagatcccaacagaacaaagcagagaggagaacttaatcccgtattctccagatgtacagatacacgcagagcgattcatcaactataaccagacagtttctcgaatgcgaggtatctacacagctccctcgggtctggagtccacttgtttggttgtggcctatggtttggacatttaccaaactcgagtctacccatccaagcagtttgacgttctgaaggatgactatgactacgtgttaatcagcagcgtcctctttggcctggtttttgccaccatgatcactaagagactggcacaggtgaagctcctgaatcgggcctggcgataaagaacaaagactgtgcctaaaagtggagagccaggggagtgtgggtcagataagcagctacagctgcagtttggtggattggtggagtatgtgtgtgtgtcagtgctcagctaagaactgtagggaagatggatgaccttcacgcagaactccttttgggatatacatgatgcagaaaggatcctacatggagagagacagaactctctcagctgacactctcagagattcctgatgggctttctcttgaagtccaaaggcgtctgcattgtttcctttctttgcccatccatgaatgttctgttttgttttttttaataagaattccggctgatttttgtgaggcctgtttaaattgactttactttgccttttgtgtttctcaattttatctagaaatctttctgactttttccatctcttgcttcaaagtaagaggggaactctccttgccgactccaccttataggtacatttggtgttttgcactgggaagaaataggatccatccttagctgaggcttgaggactgatccagcctctcatggcttccctccaaagtaacttagggttgagggatctatatgtgatgtcaaaacttactttaaacctctagtttcgtgctgtcatttattaggctgggccaccaaatctttgtttcaatttatcagaagccaagtgcatactagcgtcttgtttgttgcccattgcctatacttttcacctgagatgtgtgagttggggccttttaaaaactactgaattgtctgagccttgaagacatttccagggagaagagataatctctcatttcacccacaggctggtctaatcataacctagttaaagatgtccttgtttaagaaccccattatttatttttagtttttaatataaattaacatgtgggtcattatatttctccttaaatgaggaaattttaaattttattgatctaacctttgaagctttaaaaaaggagaaagagggtaggggtgggaaactggcatactgtgtgtatagcactgccgattggctaggccactgtgtctctgctacaaattaaagaaatcctaaaagttttccttggtcatagagttggggaatgacagaatttttctttgttgtgaaatgtatgtacagagtagaccatctctagccctgtggtgaaagaggtacactcgaatgtttgcataaagcaagtgacaaatgacactgtttaagtcctcttttgtgtcttagaagatcattttgaggctattttcacattagaggggataaaagcagtgaagacatggagtaagtgtattttattttagtaaggaaaggtcagtttaatcatatatgggttggttaggttatctaaaaatttgtcatctttctatggtcatatgctgatggtagattatggcagagaaggaagaggaaatgacaaccattttattaattgtcagtttgatattgagtgactgaatgtctaagaatctccagaaaaaaacaggcatctatcatcctgacccaaggcatattttaacataacctgggagaagagagttaagtacaagttaaaaaaaattctgccctagttttgagaaagcctggctggaattctgactgtcttacatacatatgtgcaaggttagcctgcaagattctagtttttatttaccagtgtgccagaatctgaaacaagctactgggagggaaggtatttgtcctttagtaaaattccctgtatttcagctgtaatcaaagttacctcaaagcaggtgctttttttttttttgagaccctggctcaaaaacaaaaacaaaaactagtttgttttagtattcattaattacgtatatgagcactggtagtctagtgtttgttcttgtatacagtgttttcttaaatgagatgatgctatttaattctgttacttgttttttcaactaatggatcttttaaagttttttatttaaattttttgtgggtacatattaggtacatatacttatggggtacatgagatgtttttataaaggctcagctaatgtatcttgaatatcatgtattcataaagatgactgaaatagtttctggaacaaagtctgatagaaaaaatactcaattcctaatttaagtgttagagactttaatgtaagctatctaatctgaactagtttcattatttgtgtgtgggtacatgttatgtgctccgtaaggcatctttcaatttgaaaatttcataattgtaatttcactgcctttataaattgctttttttttggaggcagggtctctgtcacccaggctggagagcagtggcacagtcatagctcactgcagcctcgaacacctgggctgaagtgatcctccctccttagcctcccaaagtgccgggattacaggcatgagctactgcacctggcccataaattgtcatacttttaaagagcctattacacaaagtatcatcagaatcatcccaagactcatttcctgattcctaattatttaaaattttgcttttaggcgaggcatggtggctcaagcctataatcccagcactttgggaggccaaggcaggcagatcatttgaggtcaggagtttaagaccagcctggccaacatggtgaaacctgaaaccccatctctaccaaaaaaataaaaaaatttagccaggtgtggtggtgcatgcctgtaatcccagctacttgggaggctgaggcaggagaatcgaacccaggaggcaaaggctgcagtgagccgagatcgtgcctctgcactccagtctgggcaacacagtgagaccctgtctcaaaaataaataaaatgaaaaaattgcttttaaatcatgaaaccattctgttttctttacttggaatgttttcttccctgcttaaaatctggcttgtctcaaatctgaactcctccataaagtcttccctattggtttcagctactcaggaccttcaaccatcctggctgcttaccacgtaacttcctgagtgatataccacacccctttattatttcagatattgtgtctcttagggactgttttctgaattacctattgtcccagacatgaagttgctccttgacaaatagttccccaaatggctgtaccttcttctccagaaccctt

SEQ ID NO: 350682 - DNA, 3456 bp, Homo sapiens
aacgcctgcaagggaccgggtccgaaatttcccgggtgggccaactactactataaaattcggggcccgggtggaccaaacaagtttctcgaatgcgaggtatctacacagctccctcgggtctggagtccacttgtttggttgtggcctatggtttggacatttaccaaactcgagtctacccatccaagcagtttgacgttctgaaggatgactatgactacgtgttaatcagcagcgtcctctttggcctggtttttgccaccatgatcactaagagactggcacaggtgaagctcctgaatcgggcctggcgataaagaacaaagactgtgcctaaaagtggagagccaggggagtgtgggtcagataagcagctacagctgcagtttggtggattggtggagtatgtgtgtgtgtcagtgctcagctaagaactgtagggaagatggatgaccttcacgcagaactccttttgggatatacatgatgcagaaaggatcctacatggagagagacagaactctctcagctgacactctcagagattcctgatgggctttctcttgaagtccaaaggcgtctgcattgtttcctttctttgcccatccatgaatgttctgttttgttttttttaataagaattccggctgatttttgtgaggcctgtttaaattgactttactttgccttttgtgtttctcaattttatctagaaatctttctgactttttccatctcttgcttcaaagtaagaggggaactctccttgccgactccaccttataggtacatttggtgttttgcactgggaagaaataggatccatccttagctgaggcttgaggactgatccagcctctcatggcttccctccaaagtaacttagggttgagggatctatatgtgatgtcaaaacttactttaaacctctagtttcgtgctgtcatttattaggctgggccaccaaatctttgtttcaatttatcagaagccaagtgcatactagcgtcttgtttgttgcccattgcctatacttttcacctgagatgtgtgagttggggccttttaaaaactactgaattgtctgagccttgaagacatttccagggagaagagataatctctcatttcacccacaggctggtctaatcataacctagttaaagatgtccttgtttaagaaccccattatttatttttagtttttaatataaattaacatgtgggtcattatatttctccttaaatgaggaaattttaaattttattgatctaacctttgaagctttaaaaaaggagaaagagggtaggggtgggaaactggcatactgtgtgtatagcactgccgattggctaggccactgtgtctctgctacaaattaaagaaatcctaaaagttttccttggtcatagagttggggaatgacagaatttttctttgttgtgaaatgtatgtacagagtagaccatctctagccctgtggtgaaagaggtacactcgaatgtttgcataaagcaagtgacaaatgacactgtttaagtcctcttttgtgtcttagaagatcattttgaggctattttcacattagaggggataaaagcagtgaagacatggagtaagtgtattttattttagtaaggaaaggtcagtttaatcatatatgggttggttaggttatctaaaaatttgtcatctttctatggtcatatgctgatggtagattatggcagagaaggaagaggaaatgacaaccattttattaattgtcagtttgatattgagtgactgaatgtctaagaatctccagaaaaaaacaggcatctatcatcctgacccaaggcatattttaacataacctgggagaagagagttaagtacaagttaaaaaaaattctgccctagttttgagaaagcctggctggaattctgactgtcttacatacatatgtgcaaggttagcctgcaagattctagtttttatttaccagtgtgccagaatctgaaacaagctactgggagggaaggtatttgtcctttagtaaaattccctgtatttcagctgtaatcaaagttacctcaaagcaggtgctttttttttttttgagaccctggctcaaaaacaaaaacaaaaactagtttgttttagtattcattaattacgtatatgagcactggtagtctagtgtttgttcttgtatacagtgttttcttaaatgagatgatgctatttaattctgttacttgttttttcaactaatggatcttttaaagttttttatttaaattttttgtgggtacatattaggtacatatacttatggggtacatgagatgtttttataaaggctcagctaatgtatcttgaatatcatgtattcataaagatgactgaaatagtttctggaacaaagtctgatagaaaaaatactcaattcctaatttaagtgttagagactttaatgtaagctatctaatctgaactagtttcattatttgtgtgtgggtacatgttatgtgctccgtaaggcatctttcaatttgaaaatttcataattgtaatttcactgcctttataaattgctttttttttggaggcagggtctctgtcacccaggctggagagcagtggcacagtcatagctcactgcagcctcgaacacctgggctgaagtgatcctccctccttagcctcccaaagtgccgggattacaggcatgagctactgcacctggcccataaattgtcatacttttaaagagcctattacacaaagtatcatcagaatcatcccaagactcatttcctgattcctaattatttaaaattttgcttttaggcgaggcatggtggctcaagcctataatcccagcactttgggaggccaaggcaggcagatcatttgaggtcaggagtttaagaccagcctggccaacatggtgaaacctgaaaccccatctctaccaaaaaaataaaaaaatttagccaggtgtggtggtgcatgcctgtaatcccagctacttgggaggctgaggcaggagaatcgaacccaggaggcaaaggctgcagtgagccgagatcgtgcctctgcactccagtctgggcaacacagtgagaccctgtctcaaaaataaataaaatgaaaaaattgcttttaaatcatgaaaccattctgttttctttacttggaatgttttcttccctgcttaaaatctggcttgtctcaaatctgaactcctccataaagtcttccctattggtttcagctactcaggaccttcaaccatcctggctgcttaccacgtaacttcctgagtgatataccacacccctttattatttcagatattgtgtctcttagggactgttttctgaattacctattgtcccagacatgaagttgctccttgacaaatagttccccaaatggctgtaccttcttctccagaaccctt

SEQ ID NO: 350683 - DNA, 1224 bp, Homo sapiens
  misc_feature (1001)..(1001): n is a, c, g, or t
ggcgcggtgcatgccgggacggcgggggtggtgcatgcgctcgcatcatggcggctgagtgggcttctcgtttctggctttgggctacgctgctgattcctgcggccgcggtctacgaagaccaagtgggcaagtttgattggagacagcaatatgttgggaaggtcaagtttgcctccttggaattttcccctggatccaagaagttggttgtagccacagagaagaatgtgattgcagcattaaattcccgaactggggagatcttgtggcgccatgttgacaagggcacggcagaaggggctgtggatgccatgctgctgcacggacaggatgtgatcactgtgtccaatggaggccgaatcatgcgttcctgggagactaacatcgggggcctgaactgggagataaccctggacagtggcagtttccaggcacttgggctggttggcctgcaggagtctgtaaggtacatcgcagtcctgaagaagactacacttgccctccatcacctctccagtgggcacctcaagtgggtggaacatctcccagaaagtgacagcatccactaccagatggtgtattcttacggctctggggtggtgtgggccctcggagttgttcccttcagccatgtgaacattgtcaagtttaatgtggaagatggagagattgttcagcaggttagggtttcaactccgtggctgcagcacctgtctggagcctgtggtgtggtggatgaggctgtcctggtgtgtcctgacccgagctcacgttccctccaaactttggctctggagacggaatgggagttgagacagatcccactgcagtcgtctcggagcttaggaatttggaaggtggattccagatggcccgggatcctggccgtagcgccagcgccagagccgcagatggcacggcgttgccgcgggcgccagttgtcattctcctggcatctgggtccccccaaaggtccagctactggctcatggcttggncagttagcccagttgagtgcgaacaagcgcgcgtgccacgattctgtcgcgcgtcgtgacaacacgacaggctaatcacgcccccagccaaggaccttgtggccacacgtaaggggtaggaagcccctatgttgcgccccaaacgccaaacgtggtggggggccaacgcgacaacaggcaaccggggcctcggggaccttggcccagagggtgcccaatttgg

SEQ ID NO: 350684 - DNA, 498 bp, Homo sapiens
tttcgcatatgtggccgtgtgtgctccctgagacagccccaggaggtgtgggcgtgatccgagtttgtggctcaggatctgcacaggcccgagagaccctccttgaggacgcagtggccagtgggggccaccatgtcagggttgaaagtggggctgtctcagatcctcccactgtggcgtttccttcagaaccgagttggggcaggaggggacggagggagagaggcaggaggctgaagcgccgaacccaacgcaaatactaagcatttgatggggttgtctgtgttctaagttggaaaatacaaacttttccatgtgtaccttagataacctcactggcgtttgtcattctgcttttggaatgcttaggcgtgaaagcagcacagcgtcacggtggtgatgcttgcgtagcagtgtgagagtgcaaacctgaaaatgggaaaaaatggggcattttatgttacgtacattttaccacagtgaacataaacagttttg

SEQ ID NO: 350685 - DNA, 4768 bp, Homo sapiens
cgcggccgcgggggctgccagggtatttcgggaagggggcgtgaggaggcggcggcggcagcggcgggtagggcaggcagcagagggaaggagaaagaaaggaaggaagagggcggggagtcctcagaggaggaggcgggaccggccgggcacctcacctctcggcggcggcggcggcggcggcggcggcgggcggccggggaggcggcgccgccccctgcccgcaggtcttctcagcgcagtcggccgcggacccgctggtcccgggcagcggccaaggctactggggcgggagcagtgggccggtcggcggcggcagcggcagcggcggaggaggaggaggctggagtgggcgcggaggcgaccgccatggcgttcctcaaactccgtgaccagccatcactggtgcaagctatatttaacggagatcctgatgaagttcgagcactaatatttaagaaagaagatgttaactttcaggacaatgaaaagcgaaccccattgcacgccgcagcttaccttggagatgcagaaatcattgaacttcttattttatctggagctagagttaatgccaaagacagcaaatggttgacacctttacacagagcagttgcatcttgtagtgaggaagcagttcaggtacttttgaagcattctgcagatgttaatgctcgagacaaaaattggcaaacccctttacatatagctgctgctaataaagctgtaaagtgtgctgaagctttggtacctcttctgagtaatgtaaacgtatctgatcgagcagggaggactgcattacatcatgcagctttcagtggacatggtgagatggtcaaactactcttgtctagaggtgccaatattaatgcttttgacaagaaagataggcgtgctatccattgggcagcatatatgggtcacattgaagtagtgaaattgcttgtgtcgcatggagctgaagtgacatgcaaggataaaaagtcttatacacctcttcatgcagcagcctctagtggaatgatcagcgtagtcaagtaccttctagatcttggagttgatatgaatgaaccaaatgcctatggaaatacacctcttcatgtagcctgctataatggacaagatgttgtagtgaatgaacttatagactgtggtgctattgtgaatcaaaagaatgaaaaaggatttactcctttgcactttgctgctgcatcaacacatggagcattgtgtttagagcttctagttggcaatggggccgatgtcaatatgaagagtaaagatgggaaaaccccactacacatgactgctctccacggtagattctcccgatcacaaaccattatccagagtggagctgtaatcgactgtgaggataagaatggaaatacccctttgcacatagcagcacggtatggccatgagctgctgatcaacactcttattacaagtggtgctgacactgcaaagcgtggcatacatggaatgttccccctccatttggcagccttaagcggcttttcagattgctgcagaaaacttctttcttcaggatttgatatagataccccagatgattttggcaggacttgtctacatgcagctgcagctggagggaatttggagtgcctaaaccttctgctgaatactggtgcagactttaataaaaaggacaaatttgggagatctccactgcactacgctgctgccaactgcaattaccagtgcctgtttgctcttgtgggatcaggagcaagtgtgaatgaccttgatgaaagaggctgcacacccctgcactatgcagctacatcagacacagatggcaagtgcctggaatacttattaagaaacgatgcaaatccagggatccgtgataagcaaggatacaacgcagttcattattcagctgcttatggtcaccgtctatgtcttcagctgattgcaagtgaaactcctctagatgttttaatggaaacctcaggaacagacatgctgagtgattcagataatagagcaacaataagccctttacacttggctgcctatcatggtcaccatcaagcactggaagtgttggtacagtctttgttagatcttgatgtcagaaatagtagtggaagaacacccctagatcttgcagcttttaagggccatgttgaatgtgtggatgtactcattaatcagggagcctcaatcttagtaaaagattacattttgaagaggacacctattcatgcagcagcaacaaatggtcattcagaatgcttacggctattaataggaaatgcagaaccacagaatgcagtggatattcaagatggaaatggacagacgcctctgatgctatctgttctcaacgggcacacagactgtgtttactcattgctgaacaaaggagcaaatgtagatgccaaagataagtggggaaggacagcgttgcatagaggggcagttacaggccatgaagaatgtgtagatgcattacttcaacatggtgctaagtgcttacttcgggatagcaggggccggacgcctatacacctgtctgctgcctgtggacacattggtgttcttggagcccttttgcagtcagcagcatctatggatgcaaatccagccacagcagacaatcatggatatacggcacttcactgggcttgctacaatggtcacgagacatgtgtagaactgcttttagaacaggaagttttccagaaaacggaaggaaatgcttttagtccattgcattgtgccgtgataaatgacaacgaaggtgctgctgagatgttaattgatacattaggtgccagcattgtgaacgccacagattcaaaaggaagaactcctctccatgcagccgccttcacagaccatgtagagtgtttacagctgctgctcagccataatgctcaagtcaattctgtggactctacagggaaaacacctcttatgatggctgcagaaaatggacaaacaaatacagttgagatgctggttagcagtgctagtgcagaactgactttacaagataacagtaaaaatactgccctccatttggcttgtagcaagggtcatgaaactagtgccttgttaatactggaaaagataacagatagaaacctcatcaatgcaaccaacgcagccttgcaaacacctctgcatgttgctgcccgaaatgggctaacaatggtggttcaggaacttttgggaaaaggagcaagtgtgcttgcagtagatgaaaatggctataccccagctttggcctgtgctcccaataaggatgtggctgattgcctggctctcattttggccaccatgatgcctgtctcatcaagtagtcctttatcatccttaacattcaatgccattaaccgttataccaacacctcaaaaacagtcagctttgaagctttgcccatcatgaggaatgaacctagctcctattgcagtttcaataacattggaggggaacaggagtacttatacactgacgtggatgagctcaacgactccgattctgagacctactgagaggctgaggaggagggagttctcacagtaaagcttcaaactgtgctttttcaggaaaaaggcactttgatattcacgtagaaattcaacctaagaggaaagatcccacagtgagccaatgttaagagatctgatggtattcggaggaagagtcttaaaggatctcttctgaattccctgagggaattttctagaatctcagaattgaaagagacctgaggttcatccagtctctaacctcttaacaaatgcaggagtcccttctacaagggtgatctttccaccttgaacacttccaagtgactctacctcaccaagcagtccattcagttgttgagcagctctaactgttagaaaggtcttccttagatggagttgaagcctccctcccggtaacttctgtctttgggcctgggtctgtcctccaagagaaccctgagaatgttggaaggatgaatctcgcacattctgccatgtcttctcttttacaggctgtttgacttctctgctgaagtgatttccagaaggactcatttgacacactattagatttaccacatctaatgaaatccaaggtgtagctataaagtgacaagctgtttttaatttatcacatacaccagaacttctatcctgcatcacttatatgtaaatgatgctgttaccaaaaacattaaggtagttcttgcgaatgccaccccactaagaaaactatttcattacttttgtaatccatctgtgagagtctgccccccagcttaaccacttcctttggtctgcacccaatgaagggaaaccccaaagtactgtctcaaatggtatttgaactacgccagtattgttggaataagtacattaattacttgaatgaatgaacacagcaccgtagaaatttcctttatggttacaccttgtatgtctaaagcattcaggccctgttctgtagtgtttcttatcctcacacagagtagaaaagcctgtttgctttatttaacttatacataaaagatgacatctgaaatatctgatgtgtattataataccagcttctgctctagaactactttgggtgaaatggtggtaatagcaaatgacctcctttaacaagacactcatctcaaacaatgccatttagttcaggagatctctaagtgtagctgtaaattttggggttaatttggcttatattggaccttttaaaagaaataaagttttttaatgcaataaaaaaaaaaaa

SEQ ID NO: 350686 - DNA, 1990 bp, Homo sapiens
tatagaattttttagtttgatttggattagtcacagaactggcatgaaccttctaattgtgaaggctgtccaaatgcactatttttttctcctgctagaggaagttacatcccgagaagtagctcagatctctggtaagtgtaacatgtgagcattactaggcatttcatcctgtgggtctgcagtctttgctcttcagactgttgctccgttggaatgcttctgtgggactgatactgaggttctatagatattttttaaggacctactcatttggggatgtcagtggtgttttgcaagatcatctgaggaacaggaaagcatttgaaatctgaaaaggataactgtggcggttttcacagtggaaggaaactatattggcaaagaggcagatgactgaataaagtagttggctcaaagaagatgcacagtctgctatttttttctctgaatgaagactgtttaatggaagctgtattcatgtggagatcaaaggaaacactggaatgatacactactatgtttttcccccccctttttttttttaaagaaaacaaaaagcctgaagcagtaatttgagctcaaatgccttctaattccttcacagcctgcttgttctactaggattctccactaacaccatttctgcctggtgcctgtgcccttttgctggagcagccacagacaactgcctgatggagaaagaatgaacgctctgccttgcttatgctatcgatgggaataaagctaactgtgtttcttctattatatgggaaacctggattaatcaagctgtattctagtaccaagagtcgtattgtctcttgtggtctgactcatcacatgtaaacgtactgcagctttgctattaatgcagagtggttttttttccctttcccaaacactgaaagaattgttaacctctgagcttcattttcaggatttgtgctgagctctagatcttttttctgtgaatagtatctgcattaaaccagtgatgaagaaatgaagacaaattagaagtggaaacagaatagtgagattttattttttattttcaattataagcaaaacagctactggtaactatatgaccttgcaggcaagagtgggtatcgctgtgatcatctctgtcacagcagttgtttctcatttcattctatattgtgtggtgttgtgtcaccaaaaacaatgattgttttgtgcaagtaaatttcagagatagagcaataagactattttggtagaggaaaaatatttttaaatgagcttggactcagttttagttattgacatgttggtgtgaaatttcttcttaagtattgcagtaatccaacagaaataatagaatttcgttatatttaggaagttacaaattatgtagtcataattttaaacttgtttttccagtagtacttattaactttaaaaaaaaaaaaaacccagctgtgctgttcagagaatgtttgtaagtgttgtacagaagaggaggaaaaactacttgtgctcttccaactgtgacttttatcacatagcttggaatttagtgttttaaaagatcgaatgagtcgagtgtgtattgttgttttggaggaggtagaagatgaatctcctgcattcatttctaaattgccacaggaaaataaatccctacattctccaccttctggaaatgtatggtaagaccatcactggtgcaagctatatttaacggagatcctgatgaagttcgagcactaatatttaagaaagaagatgttaactttcagcagtacttctggaatagaaattctaaacattagcctgccgaacaactggattgcatttgatgattacaattgtccagtcacagatggcatcacctctactttttattattaatattagttttaattgccaaatcataattgtatatatttgtagagtacaatgtaatattttggtatatgtatacaatgtgggatgattaaatcaagctaatatatccatc

SEQ ID NO: 350687 - DNA, 689 bp, Homo sapiens
agcggacgtatctctcctgctccagtgttccttccactaacccatgactgtgtcttcacaacgttagacctctcttcagctgcattgctggctgcctagagccctagactaatgtaagagctagagttaatgccaaagacagcaaatggttgacacctttacacagagcagttgcatcttgtagtgagtctaaaaattacaaggcagatgactaaacagaaacacaaccaagaaccctcagagtccgcttcactcccctgctacctccactggagcaggtgctagtatccacagctgaaggacctgaagacagatcacatcacaggactctttacagacattccccagtaccatcccggagcctagtagctccactgggttactagactcagaagagcaaaaacaatcactacagtttggctctcaggaatacccattcctaggggaagtgggagaacaccacatcaagggaacacccagtgggacaaaataatttaaacagtagtccttgaatcccagatcttccctctgacatagcctacccaaatgagaaagaaccagaaaaacaattctggtaatatgacaaaacaaggttatttaacacccccaaaatataccagctcaccagcaatggatgcaaaccaagatgaagtctatgaattgccaggaaaagaagtcagaagattgat

SEQ ID NO: 350688 - DNA, 312 bp, Homo sapiens
  misc_feature (49)..(49): n is a, c, g, or t
gcctgcacaggtgtgaactgttaagaaggttcccccaccttttcagagnagcaaaaaaaaaaaaaaaaaacctataagcaagttgtttcctaaagcctcctcagaatctcttttgcaaatgtgatcttccttttaaacaatgacaacatgaatcgtgtgttatttcctcagtgtgccaatatgtaagtatataactttctaaattctagataagatgaatttcaatgttttattcttcatagaatgtaaatcatcatttttgtcacatttatcttcatataaaaacatgctttcatgcttctttaaacctac

SEQ ID NO: 350689 - DNA, 3211 bp, Homo sapiens
tgccattgtgaggagggatcaactgggaaaggggcatgaagggacgttatgtgatgatgagtaaagatgggaaaaccccactacacatgactgctctccacggtagattctcccgatcacaaaccattatccagagtggagctgtaatcgactgtgaggataagaatggaaatacccctttgcacatagcagcacggtatggccatgagctgctgatcaacactcttattacaagtggtgctgacactgcaaagcgtggcatacatggaatgttccccctccatttggcagccttaagcggcttttcagattgctgcagaaaacttctttcttcaggatttgatatagataccccagatgattttggcaggacttgtctacatgcagctgcagctggagggaatttggagtgcctaaaccttctgctgaatactggtgcagactttaataaaaaggacaaatttgggagatctccactgcactacgctgctgccaactgcaattaccagtgcctgtttgctcttgtgggatcaggagcaagtgtgaatgaccttgatgaaagaggctgcacacccctgcactatgcagctacatcagacacagatggcaagtgcctggaatacttattaagaaacgatgcaaatccagggatccgtgataagcaaggatacaacgcagttcattattcagctgcttatggtcaccgtctatgtcttcagctgattgcaagtgaaactcctctagatgttttaatggaaacctcaggaacagacatgctgagtgattcagataatagagcaacaataagccctttacacttggctgcctatcatggtcaccatcaagcactggaagtgttggtacagtctttgttagatcttgatgtcagaaatagtagtggaagaacacccctagatcttgcagcttttaagggccatgttgaatgtgtggatgtactcattaatcagggagcctcaatcttagtaaaagattacattttgaagaggacacctattcatgcagcagcaacaaatggtcattcagaatgcttacggctattaataggaaatgcagaaccacagaatgcagtggatattcaagatggaaatggacagacgcctctgatgctatctgttctcaacgggcacacagactgtgtttactcattgctgaacaaaggagcaaatgtagatgccaaagataagtggggaaggacagcgttgcatagaggggcagttacaggccatgaagaatgtgtagatgcattacttcaacatggtgctaagtgcttacttcgggatagcaggggccggacgcctatacacctgtctgctgcctgtggacacattggtgttcttggagcccttttgcagtcagcagcatctatggatgcaaatccagccacagcagacaatcatggatatacggcacttcactgggcttgctacaatggtcacgagacatgtgtagaactgcttttagaacaggaagttttccagaaaacggaaggaaatgcttttagtccattgcattgtgccgtgataaatgacaacgaaggtgctgctgagatgttaattgatacattaggtgccagcattgtgaacgccacagattcaaaaggaagaactcctctccatgcagccgccttcacagaccatgtagagtgtttacagctgctgctcagccataatgctcaagtcaattctgtggactctacagggaaaacacctcttatgatggctgcagaaaatggacaaacaaatacagttgagatgctggttagcagtgctagtgcagaactgactttacaagataacagtaaaaatactgccctccatttggcttgtagcaagggtcatgaaactagtgccttgttaatactggaaaagataacagatagaaacctcatcaatgcaaccaacgcagccttgcaaacacctctgcatgttgctgcccgaaatgggctaacaatggtggttcaggaacttttgggaaaaggagcaagtgtgcttgcagtagatgaaaatggaaaaaggcactttgatattcacgtagaaattcaacctaagaggaaagatcccacagtgagccaatgttaagagatctgatggtattcggaggaagagtcttaaaggatctcttctgaattccctgagggaattttctagaatctcagaattgaaagagacctgaggttcatccagtctctaacctcttaacaaatgcaggagtcccttctacaagggtgatctttccaccttgaacacttccaagtgactctacctcaccaagcagtccattcagttgttgagcagctctaactgttagaaaggtcttccttagatggagttgaagcctccctcccggtaacttctgtctttgggcctgggtctgtcctccaagagaaccctgagaatgttggaaggatgaatctcgcacattctgccatgtcttctcttttacaggctgtttgacttctctgctgaagtgatttccagaaggactcatttgacacactattagatttaccacatctaatgaaatccaaggtgtagctataaagtgacaagctgtttttaatttatcacatacaccagaacttctatcctgcatcacttatatgtaaatgatgctgttaccaaaaacattaaggtagttcttgcgaatgccaccccactaagaaaactatttcattacttttgtaatccatctgtgagagtctgccccccagcttaaccacttcctttggtctgcacccaatgaagggaaaccccaaagtactgtctcaaatggtatttgaactacgccagtattgttggaataagtacattaattacttgaatgaatgaacacagcaccgtagaaatttcctttatggttacaccttgtatgtctaaagcattcaggccctgttctgtagtgtttcttatcctcacacagagtagaaaagcctgtttgctttatttaacttatacataaaagatgacatctgaaatatctgatgtgtattataataccagcttctgctctagaactactttgggtgaaatggtggtaatagcaaatgacctcctttaacaagacactcatctcaaacaatgccatttagttcaggagatctctaagtgtagctgtaaattttggggttaatttggcttatattggaccttttaaaagaaataaagttttttaatgcaataaaaaaaaaaaa

SEQ ID NO: 350690 - DNA, 2508 bp, Homo sapiens
  misc_feature (34)..(34): n is a, c, g, or t
caatattaaaagagcttttttatttgttaatgtnacataagaaatttaagcaagtacattatcttaaaaaacacaacgaatgcattttaatagagaaacaataagccctttacacttggctgcctatcatggtcaccatcaagcactggaagtgttggtacagtctttgttagatcttgatgtcagaaatagtagtggaagaacacccctagatcttgcagcttttaagggccatgttgaatgtgtggatgtactcattaatcagggagcctcaatcttagtaaaagattacattttgaagaggacacctattcatgcagcagcaacaaatggtcattcagaatgcttacggctattaataggaaatgcagaaccacagaatgcagtggatattcaagatggaaatggacagacgcctctgatgctatctgttctcaacgggcacacagactgtgtttactcattgctgaacaaaggagcaaatgtagatgccaaagataagtggggaaggacagcgttgcatagaggggcagttacaggccatgaagaatgtgtagatgcattacttcaacatggtgctaagtgcttacttcgggatagcaggggccggacgcctatacacctgtctgctgcctgtggacacattggtgttcttggagcccttttgcagtcagcagcatctatggatgcaaatccagccacagcagacaatcatggatatacggcacttcactgggcttgctacaatggtcacgagacatgtgtagaactgcttttagaacaggaagttttccagaaaacggaaggaaatgcttttagtccattgcattgtgccgtgataaatgacaacgaaggtgctgctgagatgttaattgatacattaggtgccagcattgtgaacgccacagattcaaaaggaagaactcctctccatgcagccgccttcacagaccatgtagagtgtttacagctgctgctcagccataatgctcaagtcaattctgtggactctacagggaaaacacctcttatgatggctgcagaaaatggacaaacaaatacagttgagatgctggttagcagtgctagtgcagaactgactttacaagataacagtaaaaatactgccctccatttggcttgtagcaagggtcatgaaactagtgccttgttaatactggaaaagataacagatagaaacctcatcaatgcaaccaacgcagccttgcaaacacctctgcatgttgctgcccgaaatgggctaacaatggtggttcaggaacttttgggaaaaggagcaagtgtgcttgcagtagatgaaaatggaaaaaggcactttgatattcacgtagaaattcaacctaagaggaaagatcccacagtgagccaatgttaagagatctgatggtattcggaggaagagtcttaaaggatctcttctgaattccctgagggaattttctagaatctcagaattgaaagagacctgaggttcatccagtctctaacctcttaacaaatgcaggagtcccttctacaagggtgatctttccaccttgaacacttccaagtgactctacctcaccaagcagtccattcagttgttgagcagctctaactgttagaaaggtcttccttagatggagttgaagcctccctcccggtaacttctgtctttgggcctgggtctgtcctccaagagaaccctgagaatgttggaaggatgaatctcgcacattctgccatgtcttctcttttacaggctgtttgacttctctgctgaagtgatttccagaaggactcatttgacacactattagatttaccacatctaatgaaatccaaggtgtagctataaagtgacaagctgtttttaatttatcacatacaccagaacttctatcctgcatcacttatatgtaaatgatgctgttaccaaaaacattaaggtagttcttgcgaatgccaccccactaagaaaactatttcattacttttgtaatccatctgtgagagtctgccccccagcttaaccacttcctttggtctgcacccaatgaagggaaaccccaaagtactgtctcaaatggtatttgaactacgccagtattgttggaataagtacattaattacttgaatgaatgaacacagcaccgtagaaatttcctttatggttacaccttgtatgtctaaagcattcaggccctgttctgtagtgtttcttatcctcacacagagtagaaaagcctgtttgctttatttaacttatacataaaagatgacatctgaaatatctgatgtgtattataataccagcttctgctctagaactactttgggtgaaatggtggtaatagcaaatgacctcctttaacaagacactcatctcaaacaatgccatttagttcaggagatctctaagtgtagctgtaaattttggggttaatttggcttatattggaccttttaaaagaaataaagttttttaatgcaataaaaaaaaaaaa

SEQ ID NO: 350691 - DNA, 2211 bp, Homo sapiens
ttcgcctgctgaggagaatgttttcatgttacttatactaacattagttcttctataggttgatagattggtccaattgggtgtgaggagttcagttatatgtttgggatttttgacgcctctgatgctatctgttctcaacgggcacacagactgtgtttactcattgctgaacaaaggagcaaatgtagatgccaaagataagtggggaaggacagcgttgcatagaggggcagttacaggccatgaagaatgtgtagatgcattacttcaacatggtgctaagtgcttacttcgggatagcaggggccggacgcctatacacctgtctgctgcctgtggacacattggtgttcttggagcccttttgcagtcagcagcatctatggatgcaaatccagccacagcagacaatcatggatatacggcacttcactgggcttgctacaatggtcacgagacatgtgtagaactgcttttagaacaggaagttttccagaaaacggaaggaaatgcttttagtccattgcattgtgccgtgataaatgacaacgaaggtgctgctgagatgttaattgatacattaggtgccagcattgtgaacgccacagattcaaaaggaagaactcctctccatgcagccgccttcacagaccatgtagagtgtttacagctgctgctcagccataatgctcaagtcaattctgtggactctacagggaaaacacctcttatgatggctgcagaaaatggacaaacaaatacagttgagatgctggttagcagtgctagtgcagaactgactttacaagataacagtaaaaatactgccctccatttggcttgtagcaagggtcatgaaactagtgccttgttaatactggaaaagataacagatagaaacctcatcaatgcaaccaacgcagccttgcaaacacctctgcatgttgctgcccgaaatgggctaacaatggtggttcaggaacttttgggaaaaggagcaagtgtgcttgcagtagatgaaaatggaaaaaggcactttgatattcacgtagaaattcaacctaagaggaaagatcccacagtgagccaatgttaagagatctgatggtattcggaggaagagtcttaaaggatctcttctgaattccctgagggaattttctagaatctcagaattgaaagagacctgaggttcatccagtctctaacctcttaacaaatgcaggagtcccttctacaagggtgatctttccaccttgaacacttccaagtgactctacctcaccaagcagtccattcagttgttgagcagctctaactgttagaaaggtcttccttagatggagttgaagcctccctcccggtaacttctgtctttgggcctgggtctgtcctccaagagaaccctgagaatgttggaaggatgaatctcgcacattctgccatgtcttctcttttacaggctgtttgacttctctgctgaagtgatttccagaaggactcatttgacacactattagatttaccacatctaatgaaatccaaggtgtagctataaagtgacaagctgtttttaatttatcacatacaccagaacttctatcctgcatcacttatatgtaaatgatgctgttaccaaaaacattaaggtagttcttgcgaatgccaccccactaagaaaactatttcattacttttgtaatccatctgtgagagtctgccccccagcttaaccacttcctttggtctgcacccaatgaagggaaaccccaaagtactgtctcaaatggtatttgaactacgccagtattgttggaataagtacattaattacttgaatgaatgaacacagcaccgtagaaatttcctttatggttacaccttgtatgtctaaagcattcaggccctgttctgtagtgtttcttatcctcacacagagtagaaaagcctgtttgctttatttaacttatacataaaagatgacatctgaaatatctgatgtgtattataataccagcttctgctctagaactactttgggtgaaatggtggtaatagcaaatgacctcctttaacaagacactcatctcaaacaatgccatttagttcaggagatctctaagtgtagctgtaaattttggggttaatttggcttatattggaccttttaaaagaaataaagttttttaatgcaataaaaaaaaaaaa

SEQ ID NO: 350692 - DNA, 2881 bp, Homo sapiens
  misc_feature (2780)..(2780): n is a, c, g, or t
  misc_feature (2834)..(2834): n is a, c, g, or t
  misc_feature (2847)..(2847): n is a, c, g, or t
tatagaattttttagtttgatttggattagtcacagaactggcatgaaccttctaattgtgaaggctgtccaaatgcactatttttttctcctgctagaggaagttacatcccgagaagtagctcagatctctggtaagtgtaacatgtgagcattactaggcatttcatcctgtgggtctgcagtctttgctcttcagactgttgctccgttggaatgcttctgtgggactgatactgaggttctatagatattttttaaggacctactcatttggggatgtcagtggtgttttgcaagatcatctgaggaacaggaaagcatttgaaatctgaaaaggataactgtggcggttttcacagtggaaggaaactatattggcaaagaggcagatgactgaataaagtagttggctcaaagaagatgcacagtctgctatttttttctctgaatgaagactgtttaatggaagctgtattcatgtggagatcaaaggaaacactggaatgatacactactatgtttttcccccccctttttttttttaaagaaaacaaaaagcctgaagcagtaatttgagctcaaatgccttctaattccttcacagcctgcttgttctactaggattctccactaacaccatttctgcctggtgcctgtgcccttttgctggagcagccacagacaactgcctgatggagaaagaatgaacgctctgccttgcttatgctatcgatgggaataaagctaactgtgtttcttctattatatgggaaacctggattaatcaagctgtattctagtaccaagagtcgtattgtctcttgtggtctgactcatcacatgtaaacgtactgcagctttgctattaatgcagagtggtttttttttttgttttttttttttgcccctttcccaaacactgaaagaattgttaacctctgagcttcattttcaggatttgtgctgagctctagatcttttttctgtgaatagtatctgcattaaaccagtgatgaagaaatgaagacaaattagaagtggaaacagaatagtgagattttattttttattttcaattataagcaaaacagctactggtaactatatgaccttgcaggcaagagtgggtatcgctgtgatcatctctgtcacagcagttgtttctcatttcattctatattgtgtggtgttgtgtcaccaaaaacaatgattgttttgtgcaagtaaatttcagagatagagcaataagactattttggtagaggaaaaatatttttaaatgagcttggactcagttttagttattgacatgttggtgtgaaatttcttcttaagtattgcagtaatccaacagaaataatagaatttcgttatatttaggaagttacaaattatgtagtcataattttaaacttgtttttccagtagtacttattaactttaaaaaaaaaaaaaacccagctgtgctgttcagagaatgtttgtaagtgttgtacagaagaggaggaaaaactacttgtgctcttccaactgtgacttttatcacatagcttggaatttagtgttttaaaagatcgaatgagtcgagtgtgtattgttgttttggaggaggtagaagatgaatctcctgcattcatttctaaattgccacaggaaaataaatccctacattctccaccttctggaaatgtatggtaagaccatcactggtgcaagctatatttaacggagatcctgatgaagttcgagcactaatatttaagaaagaagatgttaactttcaggacaatgaaaagcgaaccccattgcacgccgcagcttaccttggagatgcagaaatcattgaacttcttattttatctggagctagagttaatgccaaagacagcaaatggttgacacctttacacagagcagttgcatcttgtagtgaggaagcagttcaggtacttttgaagcattctgcagatgttaatgctcgagacaaaaattggcaaacccctttacatatagctgctgctaataaagctgtaaagtgtgctgaagctttggtacctcttctgagtaatgtaaacgtatctgatcgagcagggaggactgcattacatcatgcagctttcagtggacatggtgagatggtcaaactactcttgtctagaggtgccaatattaatgcttttgacaagaaagataggcgtgctatccattgggcagcatatatgggtcacattgaagtagtgaaattgcttgtgtcgcatggagctgaagtgacatgcaaggataaaaagtcttatacacctcttcatgcagcagcctctagtggaatgatcagcgtagtcaagtaccttctagatcttggagttgatatgaatgaaccaaatgcctatggaaatacacctcttcatgtagcctgctataatggacaagatgttgtagtgaatgaacttatagactgtggtgctattgtgaatcaaaagaatgaaaaaggatttactcctttgcactttgctgctgcatcaacacatggagcattgtgtttagagcttctagttggcaatggggccgatgtcaatatgaagagtaaagatgggaaaaccccactacacatgactgctctccacggtagattctcccgatcacaaaccattatccagagtggagctgtaatcgactgtgaggataagaatggaaatacccctttgcacatagcagcacggtatggccatgagctgctgatcaacactcttattacaagtggtgctgacactgcaaaagcnttgggcaatacatgggaaatgttcccccctccaattttgggaaaccctttaagncgggtttttcaanaattgccggcaaaaaaaactttctttccttcaag

SEQ ID NO: 350693 - DNA, 2008 bp, Homo sapiens
tatagaattttttagtttgatttggattagtcacagaactggcatgaaccttctaattgtgaaggctgtccaaatgcactatttttttctcctgctagaggaagttacatcccgagaagtagctcagatctctggtaagtgtaacatgtgagcattactaggcatttcatcctgtgggtctgcagtctttgctcttcagactgttgctccgttggaatgcttctgtgggactgatactgaggttctatagatattttttaaggacctactcatttggggatgtcagtggtgttttgcaagatcatctgaggaacaggaaagcatttgaaatctgaaaaggataactgtggcggttttcacagtggaaggaaactatattggcaaagaggcagatgactgaataaagtagttggctcaaagaagatgcacagtctgctatttttttctctgaatgaagactgtttaatggaagctgtattcatgtggagatcaaaggaaacactggaatgatacactactatgtttttcccccccctttttttttttaaagaaaacaaaaagcctgaagcagtaatttgagctcaaatgccttctaattccttcacagcctgcttgttctactaggattctccactaacaccatttctgcctggtgcctgtgcccttttgctggagcagccacagacaactgcctgatggagaaagaatgaacgctctgccttgcttatgctatcgatgggaataaagctaactgtgtttcttctattatatgggaaacctggattaatcaagctgtattctagtaccaagagtcgtattgtctcttgtggtctgactcatcacatgtaaacgtactgcagctttgctattaatgcagagtggtttttttttttgttttttttttttgcccctttcccaaacactgaaagaattgttaacctctgagcttcattttcaggatttgtgctgagctctagatcttttttctgtgaatagtatctgcattaaaccagtgatgaagaaatgaagacaaattagaagtggaaacagaatagtgagattttattttttattttcaattataagcaaaacagctactggtaactatatgaccttgcaggcaagagtgggtatcgctgtgatcatctctgtcacagcagttgtttctcatttcattctatattgtgtggtgttgtgtcaccaaaaacaatgattgttttgtgcaagtaaatttcagagatagagcaataagactattttggtagaggaaaaatatttttaaatgagcttggactcagttttagttattgacatgttggtgtgaaatttcttcttaagtattgcagtaatccaacagaaataatagaatttcgttatatttaggaagttacaaattatgtagtcataattttaaacttgtttttccagtagtacttattaactttaaaaaaaaaaaaaacccagctgtgctgttcagagaatgtttgtaagtgttgtacagaagaggaggaaaaactacttgtgctcttccaactgtgacttttatcacatagcttggaatttagtgttttaaaagatcgaatgagtcgagtgtgtattgttgttttggaggaggtagaagatgaatctcctgcattcatttctaaattgccacaggaaaataaatccctacattctccaccttctggaaatgtatggtaagaccatcactggtgcaagctatatttaacggagatcctgatgaagttcgagcactaatatttaagaaagaagatgttaactttcagcagtacttctggaatagaaattctaaacattagcctgccgaacaactggattgcatttgatgattacaattgtccagtcacagatggcatcacctctactttttattattaatattagttttaattgccaaatcataattgtatatatttgtagagtacaatgtaatattttggtatatgtatacaatgtgggatgattaaatcaagctaatatatccatc

SEQ ID NO: 350694 - DNA, 1993 bp, Homo sapiens
tatagaattttttagtttgatttggattagtcacagaactggcatgaaccttctaattgtgaaggctgtccaaatgcactatttttttctcctgctagaggaagttacatcccgagaagtagctcagatctctggtaagtgtaacatgtgagcattactaggcatttcatcctgtgggtctgcagtctttgctcttcagactgttgctccgttggaatgcttctgtgggactgatactgaggttctatagatattttttaaggacctactcatttggggatgtcagtggtgttttgcaagatcatctgaggaacaggaaagcatttgaaatctgaaaaggataactgtggcggttttcacagtggaaggaaactatattggcaaagaggcagatgactgaataaagtagttggctcaaagaagatgcacagtctgctatttttttctctgaatgaagactgtttaatggaagctgtattcatgtggagatcaaaggaaacactggaatgatacactactatgtttttcccccccctttttttttttaaagaaaacaaaaagcctgaagcagtaatttgagctcaaatgccttctaattccttcacagcctgcttgttctactaggattctccactaacaccatttctgcctggtgcctgtgcccttttgctggagcagccacagacaactgcctgatggagaaagaatgaacgctctgccttgcttatgctatcgatgggaataaagctaactgtgtttcttctattatatgggaaacctggattaatcaagctgtattctagtaccaagagtcgtattgtctcttgtggtctgactcatcacatgtaaacgtactgcagctttgctattaatgcagagtggtttttttttttgttttttttttttgcccctttcccaaacactgaaagaattgttaacctctgagcttcattttcaggatttgtgctgagctctagatcttttttctgtgaatagtatctgcattaaaccagtgatgaagaaatgaagacaaattagaagtggaaacagaatagtgagattttattttttattttcaattataagcaaaacagctactggtaactatatgaccttgcaggcaagagtgggtatcgctgtgatcatctctgtcacagcagttgtttctcatttcattctatattgtgtggtgttgtgtcaccaaaaacaatgattgttttgtgcaagtaaatttcagagatagagcaataagactattttggtagaggaaaaatatttttaaatgagcttggactcagttttagttattgacatgttggtgtgaaatttcttcttaagtattgcagtaatccaacagaaataatagaatttcgttatatttaggaagttacaaattatgtagtcataattttaaacttgtttttccagtagtacttattaactttaaaaaaaaaaaaaacccagctgtgctgttcagagaatgtttgtaagtgttgtacagaagaggaggaaaaactacttgtgctcttccaactgtgacttttatcacatagcttggaatttagtgttttaaaagatcgaatgagtcgagtgtgtattgttgttttggaggaggtagaagatgaatctcctgcattcatttctaaattgccacaggaaaataaatccctacattctccaccttctggaaatgtatggtaagaccatcactggtgcaagctatatttaacggagatcctgatgaagttcgagcactaatatttaagaaagaagatgttaactttcagcagtacttctggaatagaaattctaaacattagcctgccgaacaactggattgcatttgatgattacaattgtccagtcacagatggcatcacctctactttttattattaatattagttttaattgccaaaccaatcgtctataaagagcagaacagccaattcgggacaggctaccggtggctcttaacagctatttccccaaa

SEQ ID NO: 350695 - DNA, 2635 bp, Homo sapiens
tatagaattttttagtttgatttggattagtcacagaactggcatgaaccttctaattgtgaaggctgtccaaatgcactatttttttctcctgctagaggaagttacatcccgagaagtagctcagatctctggtaagtgtaacatgtgagcattactaggcatttcatcctgtgggtctgcagtctttgctcttcagactgttgctccgttggaatgcttctgtgggactgatactgaggttctatagatattttttaaggacctactcatttggggatgtcagtggtgttttgcaagatcatctgaggaacaggaaagcatttgaaatctgaaaaggataactgtggcggttttcacagtggaaggaaactatattggcaaagaggcagatgactgaataaagtagttggctcaaagaagatgcacagtctgctatttttttctctgaatgaagactgtttaatggaagctgtattcatgtggagatcaaaggaaacactggaatgatacactactatgtttttcccccccctttttttttttaaagaaaacaaaaagcctgaagcagtaatttgagctcaaatgccttctaattccttcacagcctgcttgttctactaggattctccactaacaccatttctgcctggtgcctgtgcccttttgctggagcagccacagacaactgcctgatggagaaagaatgaacgctctgccttgcttatgctatcgatgggaataaagctaactgtgtttcttctattatatgggaaacctggattaatcaagctgtattctagtaccaagagtcgtattgtctcttgtggtctgactcatcacatgtaaacgtactgcagctttgctattaatgcagagtggtttttttttttgttttttttttttgcccctttcccaaacactgaaagaattgttaacctctgagcttcattttcaggatttgtgctgagctctagatcttttttctgtgaatagtatctgcattaaaccagtgatgaagaaatgaagacaaattagaagtggaaacagaatagtgagattttattttttattttcaattataagcaaaacagctactggtaactatatgaccttgcaggcaagagtgggtatcgctgtgatcatctctgtcacagcagttgtttctcatttcattctatattgtgtggtgttgtgtcaccaaaaacaatgattgttttgtgcaagtaaatttcagagatagagcaataagactattttggtagaggaaaaatatttttaaatgagcttggactcagttttagttattgacatgttggtgtgaaatttcttcttaagtattgcagtaatccaacagaaataatagaatttcgttatatttaggaagttacaaattatgtagtcataattttaaacttgtttttccagtagtacttattaactttaaaaaaaaaaaaaacccagctgtgctgttcagagaatgtttgtaagtgttgtacagaagaggaggaaaaactacttgtgctcttccaactgtgacttttatcacatagcttggaatttagtgttttaaaagatcgaatgagtcgagtgtgtattgttgttttggaggaggtagaagatgaatctcctgcattcatttctaaattgccacaggaaaataaatccctacattctccaccttctggaaatgtatggtaagaccatcactggtgcaagctatatttaacggagatcctgatgaagttcgagcactaatatttaagaaagaagatgttaactttcaggacaatgaaaagcgaaccccattgcacgccgcagcttaccttggagatgcagaaatcattgaacttcttattttatctggagctagagttaatgccaaagacagcaaatggttgacacctttacacagagcagttgcatcttgtagtgaggaagcagttcaggtacttttgaagcattctgcagatgttaatgctcgagacaaaaattggcaaacccctttacatatagctgctgctaataaagctgtaaagtgtgctgaagctttggtacctcttctgagtaatgtaaacgtatctgatcgagcagggaggactgcattacatcatgcagctttcagtggacatggtgagatggtcaaactactcttgtctagaggtgccaatattaatgcttttgacaagaaagataggcgtgctatccattgggcagcatatatgggtcacattgaagtagtgaaattgcttgtgtcgcatggagctgaagtgacatgcaaggataaaaagtcttatacacctcttcatgcagcagcctctagtggaatgatcagcgtagtcaagtaccttctagatcttggagttgatatgaatgaaccaaatgcctatggaaatacacctcttcatgtagcctgctataatggacaagatgttgtagtgaatgaacttatagactgtggtgctattgtgaatcaaaagaatgaaaaaggatttactcctttgcactttgctgctgcatcaacacatggagcattgtgtttagagcttctagttggcaatggggccgatgtcaatatgaaggtaaggaacaaaatcagaatctataagtatttcatatgtcactgttaaaacaa

SEQ ID NO: 350696 - DNA, 989 bp, Homo sapiens
  misc_feature (900)..(900): n is a, c, g, or t
  misc_feature (904)..(904): n is a, c, g, or t
tatagaattttttagtttgatttggattagtcacagaactggcatgaaccttctaattgtgaaggctgtccaaatgcactatttttttctcctgctagaggaagttacatcccgagaagtagctcagatctctggtaagtgtaacatgtgagcattactaggcatttcatcctgtgggtctgcagtctttgctcttcagactgttgctccgttggaatgcttctgtgggactgatactgaggttctatagatattttttaaggacctactcatttggggatgtcagtggtgttttgcaagatcatctgaggaacaggaaagcatttgaaatctgaaaaggataactgtggcggttttcacagtggaaggaaactatattggcaaagaggcagatgactgaataaagtagttggctcaaagaagatgcacagtctgctatttttttctctgaatgaagactgtttaatggaagctgtattcatgtggagatcaaaggaaacactggaatgatacactactatgtttttcccccccctttttttttttaaagaaaacaaaaagcctgaagcagtaatttgagctcaaatgccttctaattccttcacagcctgcttgttctactaggattctccactaacaccatttctgcctggtgcctgtgcccttttgctggagcagccacagacaactgcctgatggagaaagaatgaacgctctgccttgcttatgctatcgatgggaataaagctaactgtgtttcttctattatatgggaaacctggattaatcaagctgtattctagtaccaagagtcgtattgtctcttgtggtctgactcatcacatgtaaacgtactgcagctttgctattaatgcagagtggttttttttggaaaggatntggnccctttccaaaaacttgaaaaaatggtaaccctttgagtatacatttcaacagatttggcgcgaagccaaaatttttcgggaatg

SEQ ID NO: 350697 - DNA, 482 bp, Homo sapiens
tatagaattttttagtttgatttggattagtcacagaactggcatgaaccttctaattgtgaaggctgtccaaatgcactatttttttctcctgctagaggaagttacatcccgagaagtagctcagatctctggtaaatccctacattctccaccttctggaaatgtatggtaagaccatcactggtgcaagctatatttaacggagatcctgatgaagttcgagcactaatatttaagaaagaagatgttaactttcagcagtacttctggaatagaaattctaaacattagcctgccgaacaactggattgcatttgatgattacaattgtccagtcacagatggcatcacctctactttttattattaatattagttttaattgccaaatcataattgtatatatttgtagagtacaatgtaatattttggtatatgtatacaatgtgggatgattaaatcaagctaatatatccatc

SEQ ID NO: 350698 - DNA, 350 bp, Homo sapiens
atttctgagcagaatatgaaggttatttgaaagtcactcaaaggactgggactgggattgctgctactgcctggaggcgatgaaataactgcattttcatcttatttcatatacttaaaggttctctgccaccttgctttcttcttctagctttatgtccagtcctccgcaagacttagtatatggtagtctaagtctcactgtaaataaagtatttgtaactgggaggagtaagagtcaactatgcttttgtttactagttatgtctctggcttttatctttcttgtattaacttggacccaaaagatctccactgcactacgctgctgccaactgcaattaccagtgc

SEQ ID NO: 350699 - DNA, 715 bp, Homo sapiens
tatctcccccatatatttagggaattccaaaaggcacatttatttcacaacccctcctaacaagggagactccacttctgcagaggacgtttttatttctgctgtggtctgattctggaatagaataccaccattcacccaaatttaccaaaccagaaggaaagtcaaggaaaagatattcatgtgtgtaacagatactttaggttaaagatgctcttatttagacttaccttataaattacattaaactttgcttcccttcaaggggaaataaaattcaacgagcgtagatataaaacaagaaaagggaggttgacaatttaatatagcacttagagccctgctacaaaaataactattttcctacgttatggatattcacaccaaaattttagacctatgtatatagatttgacgtctgttgtgatataaaattgtttattcaaaacacctaattttttggagccaaaggaagcacgggtttagggtaaaagttagcaaagctctatataagttgagacttaatatagatgaatacttcccaagctaaatatttttgttttgacttttatttcagattgcaagtgaaactcctctagatgttgtaagtattagtcaattccctcccaccaattagtattggtcagttccctcctaccagttatgtttatctgtttgctctcattagagctgaaagtgtttttacatattaggc

SEQ ID NO: 350700 - DNA, 457 bp, Homo sapiens
aagcctcctcagaatctcttttgcaaatgtgatcttccttttaaacaatgacaacatgaatcgtgtgttatttcctcagtgtgccaatatgtaagtatataactttctaaattctagataagatgaatttcaatgttttattcttcatagaatgtaaatcatcatttttgtcacatttatcttcatataaaaacatgctttcatgcttctttaaacctaccaatttcattataaaatcactgtcaattaagttttctaactgtattttctctcaataggaatttggagtgcctaaaccttctgctgaatactggtgcagactttaataaaaaggacaaatttgggaggtagggtatgatacagtttctttatggagcctatttttacttaataacttgattgaccttctaactggcttctgaaaattaactgaacaatttagcatcttgtacactga

SEQ ID NO: 350701 - DNA, 459 bp, Homo sapiens
tctttgggagtctctccatgtactactttctcctctgttgctctgtcctgagaattccagcccctttgttcgctgcagactgtctcctaaactcacagggaattaaaaacaacaacaacaaaactttgtatacagcattaagaattttattgattgaagcagctgacattccactgaatgttttcagacttagacattacatattttgtgaaatggtaattttcttttatattccagcagtacttctggaatagaaattctaaacattagcctgccgaacaactggattgcatttgatgattacaattgtccagtcacagatggcatcacctctactttttattattaatattagttttaattgccaaatcataattgtatatatttgtagagtacaatgtaatattttggtatatgtatacaatgtgggatgattaaatcaagctaatatatccatca

SEQ ID NO: 350702 - DNA, 273 bp, Homo sapiens
gtcagtctaaatatgtatgttttaaatttacatttttatttatttctaggcctatcatggtcaccatcaagcactggaagtgttggtacagtctttgttagatcttgatgtcagaaatagtagtggaagaacacccctagatcttgcagcttttaagggccatgttgaatgtgtggatgtactcattaatcagggagcctcaatcttagtaaaagattacattttgaagaggacacctattcatgcagcaggtatgccagatattatgcttga

SEQ ID NO: 350703 - DNA, 5734 bp, Homo sapiens
tatagaattttttagtttgatttggattagtcacagaactggcatgaaccttctaattgtgaaggctgtccaaatgcactatttttttctcctgctagaggaagttacatcccgagaagtagctcagatctctggtaagtgtaacatgtgagcattactaggcatttcatcctgtgggtctgcagtctttgctcttcagactgttgctccgttggaatgcttctgtgggactgatactgaggttctatagatattttttaaggacctactcatttggggatgtcagtggtgttttgcaagatcatctgaggaacaggaaagcatttgaaatctgaaaaggataactgtggcggttttcacagtggaaggaaactatattggcaaagaggcagatgactgaataaagtagttggctcaaagaagatgcacagtctgctatttttttctctgaatgaagactgtttaatggaagctgtattcatgtggagatcaaaggaaacactggaatgatacactactatgtttttcccccccctttttttttttaaagaaaacaaaaagcctgaagcagtaatttgagctcaaatgccttctaattccttcacagcctgcttgttctactaggattctccactaacaccatttctgcctggtgcctgtgcccttttgctggagcagccacagacaactgcctgatggagaaagaatgaacgctctgccttgcttatgctatcgatgggaataaagctaactgtgtttcttctattatatgggaaacctggattaatcaagctgtattctagtaccaagagtcgtattgtctcttgtggtctgactcatcacatgtaaacgtactgcagctttgctattaatgcagagtggtttttttttttgttttttttttttgcccctttcccaaacactgaaagaattgttaacctctgagcttcattttcaggatttgtgctgagctctagatcttttttctgtgaatagtatctgcattaaaccagtgatgaagaaatgaagacaaattagaagtggaaacagaatagtgagattttattttttattttcaattataagcaaaacagctactggtaactatatgaccttgcaggcaagagtgggtatcgctgtgatcatctctgtcacagcagttgtttctcatttcattctatattgtgtggtgttgtgtcaccaaaaacaatgattgttttgtgcaagtaaatttcagagatagagcaataagactattttggtagaggaaaaatatttttaaatgagcttggactcagttttagttattgacatgttggtgtgaaatttcttcttaagtattgcagtaatccaacagaaataatagaatttcgttatatttaggaagttacaaattatgtagtcataattttaaacttgtttttccagtagtacttattaactttaaaaaaaaaaaaaacccagctgtgctgttcagagaatgtttgtaagtgttgtacagaagaggaggaaaaactacttgtgctcttccaactgtgacttttatcacatagcttggaatttagtgttttaaaagatcgaatgagtcgagtgtgtattgttgttttggaggaggtagaagatgaatctcctgcattcatttctaaattgccacaggaaaataaatccctacattctccaccttctggaaatgtatggtaagaccatcactggtgcaagctatatttaacggagatcctgatgaagttcgagcactaatatttaagaaagaagatgttaactttcaggacaatgaaaagcgaaccccattgcacgccgcagcttaccttggagatgcagaaatcattgaacttcttattttatctggagctagagttaatgccaaagacagcaaatggttgacacctttacacagagcagttgcatcttgtagtgaggaagcagttcaggtacttttgaagcattctgcagatgttaatgctcgagacaaaaattggcaaacccctttacatatagctgctgctaataaagctgtaaagtgtgctgaagctttggtacctcttctgagtaatgtaaacgtatctgatcgagcagggaggactgcattacatcatgcagctttcagtggacatggtgagatggtcaaactactcttgtctagaggtgccaatattaatgcttttgacaagaaagataggcgtgctatccattgggcagcatatatgggtcacattgaagtagtgaaattgcttgtgtcgcatggagctgaagtgacatgcaaggataaaaagtcttatacacctcttcatgcagcagcctctagtggaatgatcagcgtagtcaagtaccttctagatcttggagttgatatgaatgaaccaaatgcctatggaaatacacctcttcatgtagcctgctataatggacaagatgttgtagtgaatgaacttatagactgtggtgctattgtgaatcaaaagaatgaaaaaggatttactcctttgcactttgctgctgcatcaacacatggagcattgtgtttagagcttctagttggcaatggggccgatgtcaatatgaagagtaaagatgggaaaaccccactacacatgactgctctccacggtagattctcccgatcacaaaccattatccagagtggagctgtaatcgactgtgaggataagaatggaaatacccctttgcacatagcagcacggtatggccatgagctgctgatcaacactcttattacaagtggtgctgacactgcaaagcgtggcatacatggaatgttccccctccatttggcagccttaagcggcttttcagattgctgcagaaaacttctttcttcaggatttgatatagataccccagatgattttggcaggacttgtctacatgcagctgcagctggagggaatttggagtgcctaaaccttctgctgaatactggtgcagactttaataaaaaggacaaatttgggagatctccactgcactacgctgctgccaactgcaattaccagtgcctgtttgctcttgtgggatcaggagcaagtgtgaatgaccttgatgaaagaggctgcacacccctgcactatgcagctacatcagacacagatggcaagtgcctggaatacttattaagaaacgatgcaaatccagggatccgtgataagcaaggatacaacgcagttcattattcagctgcttatggtcaccgtctatgtcttcagctgattgcaagtgaaactcctctagatgttttaatggaaacctcaggaacagacatgctgagtgattcagataatagagcaacaataagccctttacacttggctgcctatcatggtcaccatcaagcactggaagtgttggtacagtctttgttagatcttgatgtcagaaatagtagtggaagaacacccctagatcttgcagcttttaagggccatgttgaatgtgtggatgtactcattaatcagggagcctcaatcttagtaaaagattacattttgaagaggacacctattcatgcagcagcaacaaatggtcattcagaatgcttacggctattaataggaaatgcagaaccacagaatgcagtggatattcaagatggaaatggacagacgcctctgatgctatctgttctcaacgggcacacagactgtgtttactcattgctgaacaaaggagcaaatgtagatgccaaagataagtggggaaggacagcgttgcatagaggggcagttacaggccatgaagaatgtgtagatgcattacttcaacatggtgctaagtgcttacttcgggatagcaggggccggacgcctatacacctgtctgctgcctgtggacacattggtgttcttggagcccttttgcagtcagcagcatctatggatgcaaatccagccacagcagacaatcatggatatacggcacttcactgggcttgctacaatggtcacgagacatgtgtagaactgcttttagaacaggaagttttccagaaaacggaaggaaatgcttttagtccattgcattgtgccgtgataaatgacaacgaaggtgctgctgagatgttaattgatacattaggtgccagcattgtgaacgccacagattcaaaaggaagaactcctctccatgcagccgccttcacagaccatgtagagtgtttacagctgctgctcagccataatgctcaagtcaattctgtggactctacagggaaaacacctcttatgatggctgcagaaaatggacaaacaaatacagttgagatgctggttagcagtgctagtgcagaactgactttacaagataacagtaaaaatactgccctccatttggcttgtagcaagggtcatgaaactagtgccttgttaatactggaaaagataacagatagaaacctcatcaatgcaaccaacgcagccttgcaaacacctctgcatgttgctgcccgaaatgggctaacaatggtggttcaggaacttttgggaaaaggagcaagtgtgcttgcagtagatgaaaatggaaaaaggcactttgatattcacgtagaaattcaacctaagaggaaagatcccacagtgagccaatgttaagagatctgatggtattcggaggaagagtcttaaaggatctcttctgaattccctgagggaattttctagaatctcagaattgaaagagacctgaggttcatccagtctctaacctcttaacaaatgcaggagtcccttctacaagggtgatctttccaccttgaacacttccaagtgactctacctcaccaagcagtccattcagttgttgagcagctctaactgttagaaaggtcttccttagatggagttgaagcctccctcccggtaacttctgtctttgggcctgggtctgtcctccaagagaaccctgagaatgttggaaggatgaatctcgcacattctgccatgtcttctcttttacaggctgtttgacttctctgctgaagtgatttccagaaggactcatttgacacactattagatttaccacatctaatgaaatccaaggtgtagctataaagtgacaagctgtttttaatttatcacatacaccagaacttctatcctgcatcacttatatgtaaatgatgctgttaccaaaaacattaaggtagttcttgcgaatgccaccccactaagaaaactatttcattacttttgtaatccatctgtgagagtctgccccccagcttaaccacttcctttggtctgcacccaatgaagggaaaccccaaagtactgtctcaaatggtatttgaactacgccagtattgttggaataagtacattaattacttgaatgaatgaacacagcaccgtagaaatttcctttatggttacaccttgtatgtctaaagcattcaggccctgttctgtagtgtttcttatcctcacacagagtagaaaagcctgtttgctttatttaacttatacataaaagatgacatctgaaatatctgatgtgtattataataccagcttctgctctagaactactttgggtgaaatggtggtaatagcaaatgacctcctttaacaagacactcatctcaaacaatgccatttagttcaggagatctctaagtgtagctgtaaattttggggttaatttggcttatattggaccttttaaaagaaataaagttttttaatgcaataaaaaaaaaaaa

SEQ ID NO: 350704 - DNA, 484 bp, Homo sapiens
gctgaggcaggcagatcacagagtcaagagatcaagaccatcctggcttacgtggtaaaaccccatctctactagaaatacaaaacttagctgggggtggtggtgcgcgcctgtagtcccagctactcaggaggctgaggcaggagaatcacttgaacctgggacgtagaggttgcagagagccaagatagcaccactgcactccagcctagtgacagagggagactccatcttagaaaaaaaataataaaagtaatcccatctttaagaaggactgaagaataacaaaagtggtaaataatatagatacatttaaactgacatttactatgtatataaaataacaacagtaacaatttccttgagggctaaaaagtagaactaaagtaagtttcaaggatgacaactagaaatagggtatgcagggtatgcaaagtaccaaaccattgggggaagagaatacctaagaaaaacaatccaaaag

SEQ ID NO: 350705 - DNA, 393 bp, Homo sapiens
ccatgttggccaggctggtctcaatctcctggtctcaagtgatctgcccacttcagcctcccaaaattctgggactgcaggtatgagccaccatgcccagcctaaagaggtatttaaaaagtcatttttgataagaaaatgtggaacattattttggtcttttaggtgtcttgaacatagtctacctaatcatctagacaggaagataattaacctctattttaacaaacatttttcttcttgaaatgaaatattcttttagataccaaaatgaattaaaattgagtgattactattaaagctgcaaaattatttgggagactgagatagaaggatcacttgagctcaggagttcgagaccagcctgggcaaccgtgaaactttgtctctact

SEQ ID NO: 350706 - DNA, 188 bp, Homo sapiens
tcttcttccctccccaccattccccgcaggggaaagacccccgcaaggagaatgacaggcccacctggggcctaaactccatagctcaaacaaggctgggcactcatttatcagcactagaaacttcgcacatcttttccagtctaagaactacacaatttacaggtggttggtatgtgaatctctct

SEQ ID NO: 350707 - DNA, 3621 bp, Homo sapiens
gccaggggaggcgggcgcaggaggcgcgtgctcagtgtgctgggtaccaggcgactccgggacagggggtctcggccgtcggcgtcatggtttcgcgcgtgcagctcccgcctgagatccagctggctcagcgcctggcggggaatgagcaggtgacccgggaccgggcggtgaggaagctccggaaatacatcgtcgccaggactcagcgggccgcaggtggttttacgcacgacgagctgctgaaggtgtggaaaggactgttttattgcatgtggatgcaggacaagccactcctccaggaagaattaggaaggactatttcccagctcgttcatgcttttcagaccacggaggcgcagcacctgttccttcaggccttctggcagaccatgaatcgcgagtggacgggcattgacaggctgcgcctggataaattctacatgctcatgcggatggtcctgaacgagtccttgaaggttctgaagatgcaaggctgggaagaaagacagatcgaggagctgctagagctgctgatgactgagatcctgcaccccagcagccaggcccccaacggtgtgaagagccacttcatcgagatcttcctggaggagctgaccaaagtgggcgccgaggagcttacggcagaccagaacctgaagttcatcgaccccttctgcagaattgctgcccggaccaaggattccttggttttgaacaacatcactcgaggcatctttgagacgattgtggagcaggccccgcttgccattgaagacctcctgaatgaactggacacacaggatgaggaggtggcgtcggacagtgatgagtcctctgagggtggtgagcgtggagacgcgctgtcccagaagaggtctgagaagccgcccgcaggctccatctgcagggctgaacctgaggctggtgaggagcaggcaggtgacgacagggacagtggcggccccgttctccagtttgactacgaggcagttgctaacagactgtttgaaatggccagccgccagagcaccccttctcagaacagaaagcgtctctacaaagtgatccggaagctgcaggacctggcaggaggcattttccctgaagatgagatcccagagaaggcctgcaggcgcctgcttgaagggaggcggcagaagaagacgaagaagcagaagcgtctgctcaggttgcagcaggagagagggaaaggtgagaaggagcccccgagcccgggcatggagaggaagaggagcaggaggaggggtgtaggggccgaccccgaggcgcgggcagaggctggtgagcagccaggcacagctgagcgggccctgctccgagatcagcccaggggccgtggccagagaggggctcgccagagaaggaggacacctcggcccctgaccagtgcccgagcaaaggcggccaatgtccaggagccggagaagaagaagaaacgcagggagtgatgtggccgggccaaggacaggcagggagggaggccaggcctcgcttgcaccgcgggacgaggctgaccgggctgttctgtagactcaggaccgtggctccagaactcctgtgccaggcgggagggaagggcggcactggagagatgggcccatcattaggggccagcatcccaggaactggacctttccccagagcctccgcctgtggctgtgatgaccttgggccagaaggtcaaactccgaagactgaaactctgcctgcagcaggactggccgcccctgctgtggggggttcagaaaataaaatgccgcgcagcccttgccagggaagtgtcgcttcgggtgtgtcctacggacgtgtgggaggtggcaggcgccagcctccgagcagtgtggtggtttatattcatgtttgtggaaaaatcttgcaagacatttctcctttcacagaactgcccaggtgttaacagggctgtctggacggggctcttttgcttccccctcaatctggggtctagagttgtgcagggaattcagctccagtaaggcctggattgcccggggtgagcgtgtgtgtggtgggaagacctggcttccgcgagagccttgttcctggaggcaggagcgccccgccatcctgggtacccgcgggtccgcaggctgcgcacctctttccctcagccaggtcaccctcagcgtcctccctgcccctctccccttcacacctgctggagcctgtgagggaggtggcgggtccccactgtggcgacggagagctgacagtagcccagggctttccacctgcatggaacaagggcctgtctgccgccagcgctgtggccacagcctgcataggtgacaaggggccgctgcgttgggttttgcccgcatcttctgttccatgggtgcccagccagccaggccgtgtgggatccagcgagaggccagggcttggagtgggcctgggaccaggaaggacctctaggctgtggctggccttgtgcagaccctggactgcatccggttccccaaagccctgctgcattcgagtgtcccccaaccccgggcaggtggcacctggtgacacctccttcagtcccactcagctgggcggccggggcaggcttagggcacagttaggggccaaggagagggaaggccagggcccctgttctaggggttagggttctttccccaaaggaacttaaaaagacaagcgtggccaggcacagtggctcacacctgtaatcccagcactttgggaggccgaggtggccagatcacctgaggtcaggagtttgagaccagactgaccaacatggagaaaccccatctctactaaaatacaaaattagccaggcgtggtggcacatgcctgtaatcccagctactcgggaggctgaggcaggagaattgcttgaacctgggaggcagaggttgtggtgagctaagatcacgccattgcactccagcctgggcaacgagagggaaactctgtttcaaaaaaaaaaaaaaaaagacaagcgtgtctaacgtaaactgccggtggcgagcgtcaggtctgggcagtgtcccctgggcctggtcagtgttcccctgggcctggcctctttacccccagcagggcctgttgggacgagcccctgcagttggaggcctttggaagggaacggggtgcattataacgctttcttgtttttgaagtttctttggtcaaaagctaaggaaacaaccatgctaacagaagtttctggaaaaaagcaaattagagatgccgaattgcagttgtgaaactggaagccacagtgactttgcatcttctttcacatgtgtgttcacagggaggggtttttcatggctgcgccggcactgtcacgctctggctgtttccaggccctgctgggtgcacgtttccccatattcagaattgttttaaataaccgcattgtgcttatgacatgaatgactgaattcctctcctattggtagcctcttttacttttttatttttttatttttgagactgagttttgagttgagttttttttgagaccgagttgttttatttccgcacatgaatggtagttccagctactcaggaggccaaggtgggagaagcgcctgagcccaggagagaaccatcgagagg

SEQ ID NO: 350708 - DNA, 1674 bp, Homo sapiens
ggaggcagtggagaggaacaccaggcagggcgtctcgtctcagccaagcctttctctctgctagcaatcttgaggacagagggaaggcctgtctgaatgtttacacgtgctgcattttgtagctgacatgcacactcaggccatacgttctggtggtggtgctggtcacataactccctaactgcaagactgccttgcgctggaggagacctaggatcgttgatatcatctgcgtggactttaaggctggcatgtttgcagacagtggcgcctgcccgcacttaggttcccatcagagcgtgtaaccatgggagagtggggggcacggctgtcttggggctcatcgaggctgcctgtcatgtttgctttttctttcctcagacagatcgaggagctgctagagctgctgatgactgagatcctgcaccccagcagccaggcccccaacggtgtgaagagccacttcatcgagatcttcctggaggagctgaccaaagtgggcgccgaggagcttacggcagaccagaacctgaagttcatcgaccccttctgcagaattgctgcccggaccaaggattccttggttttgaacaacatcactcgaggcatctttgagacgattgtggagcaggccccgcttgccattgaagacctcctgaatgaactggacacacaggatgaggaggtggcgtcggacagtgatgagtcctctgagggtggtgagcgtggagacgcgctgtcccagaagaggtctgagaagccgcccgcaggctccatctgcagggctgaacctgaggctggtgaggagcaggcaggtgacgacagggacagtggcggccccgttctccagtttgactacgaggcagttgctaacagactgtttgaaatggccagccgccagagcaccccttctcagaacagaaagcgtctctacaaagtgatccggaagctgcaggacctggcaggaggcattttccctgaagatgagatcccagagaaggcctgcaggcgcctgcttgaagggaggcggcagaagaagacgaagaagcagaagcgtctgctcaggttgcagcaggagagagggaaaggtgagaaggagcccccgagcccgggcatggagaggaagaggagcaggaggaggggtgtaggggccgaccccgaggcgcgggcagaggctggtgagcagccaggcacagctgagcgggccctgctccgagatcagcccaggggccgtggccagagaggggctcgccagagaaggaggacacctcggcccctgaccagtgcccgagcaaaggcggccaatgtccaggagccggagaagaagaagaaacgcagggagtgatgtggccgggccaaggacaggcagggagggaggccaggcctcgcttgcaccgcgggacgaggctgaccgggctgttctgtagactcaggaccgtggctccagaactcctgtgccaggcgggagggaagggcggcactggagagatgggcccatcattaggggccagcatcccaggaactggacctttccccagagcctccgcctgtggctgtgatgaccttgggccagaaggtcaaactccgaagactgaaactctgcctgcagcaggactggccgcccctgctgtggggggttcagaaaataaaatgccgcgcagcccttgccaggga

SEQ ID NO: 350709 - DNA, 1369 bp, Homo sapiens
ctctccacgtcttccttccccttcttccctccacttcttccctccacttctgtccttgatttctggggctgccttccgtgttgggcctctggccacacgagtgtggttggcatgtgatgccctcaccaggggcaaccctgggtccgcggcagaccactcagggcctggagctgcctacctgcagtggagggggttgagcacagtgccgggcagggcagggggcccatggcaagaatggggtgcagaggaggcacatggtggacctcctaccccacgctgggaagccttccctgttactctctccatgctaaactggccccagggcctagggattcaccccttcccttgcccagagctccgtgccattgaagccgtccatctcatttcccatgaggcagtggcctcctctttgtagccggcccttggctgtgtgaaccctgtcggccctggcgttcaggacctggcactgcctggcgtcctgttcttccacctccccttctgccttgagcccagtcctgcctactcctctgtgcctttgctcctgggtctcatgaccctgtcctcacgctggtccttctgaggtcagcccttgctgaggtcctgagccgtgtggatggagcttggcgcccacactggacacgggatgcgtctggctggctgttgtggccgtgttgtcctcccaggtctgtggtgctggcatcctcagcctgagttggagtaagtggaaagagcccgtgttggcattctctggctcatggggtcttgctgttttgtcagggaaaggtgagaaggagcccccgagcccgggcatggagaggaagaggagcaggaggaggggtgtaggggccgaccccgaggcgcgggcagaggctggtgagcagccaggcacagctgagcgggccctgctccgagatcagcccaggggccgtggccagagaggggctcgccagagaaggaggacacctcggcccctgaccagtgcccgagcaaaggcggccaatgtccaggagccggagaagaagaagaaacgcagggagtgatgtggccgggccaaggacaggcagggagggaggccaggcctcgcttgcaccgcgggacgaggctgaccgggctgttctgtagactcaggaccgtggctccagaactcctgtgccaggcgggagggaagggcggcactggagagatgggcccatcattaggggccagcatcccaggaactggacctttccccagagcctccgcctgtggctgtgatgaccttgggccagaaggtcaaactccgaagactgaaactctgcctgcagcaggactggccgcccctgctgtggggggttcagaaaataaaatgccgcgcagcccttgccaggga

SEQ ID NO: 350710 - DNA, 300 bp, Homo sapiens
agaaagagggctggtgctggggagagggctgggctggggaagagggtaaagtgcgtggagacgcgctgtcccagaagaggtctgagaagccgcccgcaggtgggggtcacactgcgcctggcttctcctcggggcctgtcctgggctgagccagtgcgatctcctgctgggttgctcctgccacctcctacctggtccccttgtctctgcccctctccacagtccatcctcagcatagaagccagagtgacttctgtgggcaccaagcacacgtcgtttcccctctcccccagcctctga

SEQ ID NO: 350711 - DNA, 1412 bp, Homo sapiens
gccaggggaggcgggcgcaggaggcgcgtgctcagtgtgctgggtaccaggcgactccgggacagggggtctcggccgtcggcgtcatggtttcgcgcgtgcagctcccgcctgagatccagctggctcagcgcctggcggggaatgagcaggtgacccgggaccgggcggtgaggaagctccggaaatacatcgtcgccaggactcagcgggccgcaggtggttttacgcacgacgagctgctgaaggtgtggaaaggactgttttattgcatgtggatgcaggacaagccactcctccaggaagaattaggaaggactatttcccagctcgttcatgcttttcagaccacggaggcgcagcacctgttccttcaggccttctggcagaccatgaatcgcgagtggacgggcattgacaggctgcgcctggataaattctacatgctcatgcggatggtcctgaacgagtccttgaaggttctgaagatgcaaggctgggaagaaagacagatcgaggagctgctagagctgctgatgactgagatcctgcaccccagcagccaggcccccaacggtgtgaagagccacttcatcgagatcttcctggaggagctgaccaaagtgggcgccgaggagcttacggcagaccagaacctgaagttcatcgaccccttctgcagaattgctgcccggaccaaggattccttggttttgaacaacatcactcgaggcatctttgagacgattgtggagcaggccccgcttgccattgaagacctcctgaatgaactggacacacaggatgaggaggtggcgtcggacagtgatgagtcctctgagggtggtgagcgtggagacgcgctgtcccagaagaggtctgagaagccgcccgcaggctccatctgcagggctgaacctgaggctggtgaggagcaggcaggtgacgacagggacagtggcggccccgttctccagtttgactacgaggcagttgctaacagactgtttgaaatggccagccgccagagcaccccttctcagaacagaaagcgtctctacaaagtgatccggaagctgcaggacctggcaggaggcattttccctgaagatgagatcccagagaaggcctgcaggcgcctgcttgaagggaggcggcagaagaagacgaagaagcagaagcgtctgctcaggttgcagcaggagagagggaaaggtgagaaggagcccccgagcccgggcatggagaggaagaggagcaggaggaggggtgtaggggccgacccctgtggctgtgatgaccttgggccagaaggtcaaactccgaagactgaaactctgcctgcagcaggactggccgcccctgctgtggggggttcagaaaataaaatgccgcgcagcccttgccaggga

SEQ ID NO: 350712 - DNA, 1534 bp, Homo sapiens
gccaggggaggcgggcgcaggaggcgcgtgctcagtgtgctgggtaccaggcgactccgggacagggggtctcggccgtcggcgtcatggtttcgcgcgtgcagctcccgcctgagatccagctggctcagcgcctggcggggaatgagcaggtgacccgggaccgggcggtgaggaagctccggaaatacatcgtcgccaggactcagcgggccgcaggtggttttacgcacgacgagctgctgaaggtgtggaaaggactgttttattgcatgtggatgcaggacaagccactcctccaggaagaattaggaaggactatttcccagctcgttcatgcttttcagaccacggaggcgcagcacctgttccttcaggccttctggcagaccatgaatcgcgagtggacgggcattgacaggctgcgcctggataaattctacatgctcatgcggatggtcctgaacgagtccttgaaggttctgaagatgcaaggctgggaagaaagacagatcgaggagctgctagagctgctgatgactgagatcctgcaccccagcagccaggcccccaacggtgtgaagagccacttcatcgagatcttcctggaggagctgaccaaagtgggcgccgaggagcttacggcagaccagaacctgaagttcatcgaccccttctgcagaattgctgcccggaccaaggattccttggttttgaacaacatcactcgaggcatctttgagacgattgtggagcaggccccgcttgccattgaagacctcctgaatgaactggacacacaggatgaggaggtggcgtcggacagtgatgagtcctctgagggtggtgagcgtggagacgcgctgtcccagaagaggtctgagaagccgcccgcaggctccatctgcagggctgaacctgaggctggtgaggagcaggcaggtgacgacagggacagtggcggccccgttctccagtttgactacgaggcagttgctaacagactgtttgaaatggccagccgccagagcaccccttctcagaacagaaagcgtctctacaaagtgatccggaagctgcaggacctggcaggaggcattttccctgaagatgagatcccagagaaggcctgcaggcgcctgcttgaagggaggcggcagaagaagacgaagaagcagaagcgtctgctcaggttgcagcaggagagaggtaggactagggggtgtgttagtcatggagccggcgtcctcacctgcttgcttctcccctggatgggggtcacctgcagtgtctccccctgaagcatgagtgccgagtcccccatcctgggtgcctgctatccacgcatcccggaaatgccctgtcctcggcatccctcctgtaggcctctccctgcctcccccacccaccttccttgtctgcagctcccccgagctgtgtgcgctgccctccctcccggtctggagacatcctcctggctgggctgcctccttccgtgcctccgtcttagatccaagccccgtccgctcctctc

SEQ ID NO: 350713 - DNA, 1734 bp, Homo sapiens
gccaggggaggcgggcgcaggaggcgcgtgctcagtgtgctgggtaccaggcgactccgggacagggggtctcggccgtcggcgtcatggtttcgcgcgtgcagctcccgcctgagatccagctggctcagcgcctggcggggaatgagcaggtggttttacgcacgacgagctgctgaaggtgtggaaaggactgttttattgcatgtggatgcaggacaagccactcctccaggaagaattaggaaggactatttcccagctcgttcatgcttttcagaccacggaggcgcagcacctgttccttcaggccttctggcagaccatgaatcgcgagtggacgggcattgacaggctgcgcctggataaattctacatgctcatgcggatggtcctgaacgagtccttgaaggttctgaagatgcaaggctgggaagaaagacagatcgaggagctgctagagctgctgatgactgagatcctgcaccccagcagccaggcccccaacggtgtgaagagccacttcatcgagatcttcctggaggagctgaccaaagtgggcgccgaggagcttacggcagaccagaacctgaagttcatcgaccccttctgcagaattgctgcccggaccaaggattccttggttttgaacaacatcactcgaggcatctttgagacgattgtggagcaggccccgcttgccattgaagacctcctgaatgaactggacacacaggatgaggaggtggcgtcggacagtgatgagtcctctgagggtggtgagcgtggagacgcgctgtcccagaagaggtctgagaagccgcccgcaggctccatctgcagggctgaacctgaggctggtgaggagcaggcaggtgacgacagggacagtggcggccccgttctccagtttgactacgaggcagttgctaacagactgtttgaaatggccagccgccagagcaccccttctcagaacagaaagcgtctctacaaagtgatccggaagctgcaggacctggcaggaggcattttccctgaagatgagatcccagagaaggcctgcaggcgcctgcttgaagggaggcggcagaagaagacgaagaagcagaagcgtctgctcaggttgcagcaggagagagggaaaggtgagaaggagcccccgagcccgggcatggagaggaagaggagcaggaggaggggtgtaggggccgaccccgaggcgcgggcagaggctggtgagcagccaggcacagctgagcgggccctgctccgagatcagcccaggggccgtggccagagaggggctcgccagagaaggaggacacctcggcccctgaccagtgcccgagcaaaggcggccaatgtccaggagccggagaagaagaagaaacgcagggagtgatgtggccgggccaaggacaggcagggagggaggccaggcctcgcttgcaccgcgggacgaggctgaccgggctgttctgtagactcaggaccgtggctccagaactcctgtgccaggcgggagggaagggcggcactggagagatgggcccatcattaggggccagcatcccaggaactggacctttccccagagcctccgcctgtggctgtgatgaccttgggccagaaggtcaaactccgaagactgaaactctgcctgcagcaggactggccgcccctgctgtggggggttcagaaaataaaatgccgcgcagcccttgccaggga

SEQ ID NO: 350714 - DNA, 1842 bp, Homo sapiens
gccaggggaggcgggcgcaggaggcgcgtgctcagtgtgctgggtaccaggcgactccgggacagggggtctcggccgtcggcgtcatggtttcgcgcgtgcagctcccgcctgagatccagctggctcagcgcctggcggggaatgagcaggtgacccgggaccgggcggtgaggaagctccggaaatacatcgtcgccaggactcagcgggccgcagattaaccttgtggccactgtccagcttaggaaaccgtcaaggtggttttacgcacgacgagctgctgaaggtgtggaaaggactgttttattgcatgtggatgcaggacaagccactcctccaggaagaattaggaaggactatttcccagctcgttcatgcttttcagaccacggaggcgcagcacctgttccttcaggccttctggcagaccatgaatcgcgagtggacgggcattgacaggctgcgcctggataaattctacatgctcatgcggatggtcctgaacgagtccttgaaggttctgaagatgcaaggctgggaagaaagacagatcgaggagctgctagagctgctgatgactgagatcctgcaccccagcagccaggcccccaacggtgtgaagagccacttcatcgagatcttcctggaggagctgaccaaagtgggcgccgaggagcttacggcagaccagaacctgaagttcatcgaccccttctgcagaattgctgcccggaccaaggattccttggttttgaacaacatcactcgaggcatctttgagacgattgtggagcaggccccgcttgccattgaagacctcctgaatgaactggacacacaggatgaggaggtggcgtcggacagtgatgagtcctctgagggtggtgagcgtggagacgcgctgtcccagaagaggtctgagaagccgcccgcaggctccatctgcagggctgaacctgaggctggtgaggagcaggcaggtgacgacagggacagtggcggccccgttctccagtttgactacgaggcagttgctaacagactgtttgaaatggccagccgccagagcaccccttctcagaacagaaagcgtctctacaaagtgatccggaagctgcaggacctggcaggaggcattttccctgaagatgagatcccagagaaggcctgcaggcgcctgcttgaagggaggcggcagaagaagacgaagaagcagaagcgtctgctcaggttgcagcaggagagagggaaaggtgagaaggagcccccgagcccgggcatggagaggaagaggagcaggaggaggggtgtaggggccgaccccgaggcgcgggcagaggctggtgagcagccaggcacagctgagcgggccctgctccgagatcagcccaggggccgtggccagagaggggctcgccagagaaggaggacacctcggcccctgaccagtgcccgagcaaaggcggccaatgtccaggagccggagaagaagaagaaacgcagggagtgatgtggccgggccaaggacaggcagggagggaggccaggcctcgcttgcaccgcgggacgaggctgaccgggctgttctgtagactcaggaccgtggctccagaactcctgtgccaggcgggagggaagggcggcactggagagatgggcccatcattaggggccagcatcccaggaactggacctttccccagagcctccgcctgtggctgtgatgaccttgggccagaaggtcaaactccgaagactgaaactctgcctgcagcaggactggccgcccctgctgtggggggttcagaaaataaaatgccgcgcagcccttgccaggga

SEQ ID NO: 350715 - DNA, 1671 bp, Homo sapiens
gccaggggaggcgggcgcaggaggcgcgtgctcagtgtgctgggtaccaggcgactccgggacagggggtctcggccgtcggcgtcatggtggttttacgcacgacgagctgctgaaggtgtggaaaggactgttttattgcatgtggatgcaggacaagccactcctccaggaagaattaggaaggactatttcccagctcgttcatgcttttcagaccacggaggcgcagcacctgttccttcaggccttctggcagaccatgaatcgcgagtggacgggcattgacaggctgcgcctggataaattctacatgctcatgcggatggtcctgaacgagtccttgaaggttctgaagatgcaaggctgggaagaaagacagatcgaggagctgctagagctgctgatgactgagatcctgcaccccagcagccaggcccccaacggtgtgaagagccacttcatcgagatcttcctggaggagctgaccaaagtgggcgccgaggagcttacggcagaccagaacctgaagttcatcgaccccttctgcagaattgctgcccggaccaaggattccttggttttgaacaacatcactcgaggcatctttgagacgattgtggagcaggccccgcttgccattgaagacctcctgaatgaactggacacacaggatgaggaggtggcgtcggacagtgatgagtcctctgagggtggtgagcgtggagacgcgctgtcccagaagaggtctgagaagccgcccgcaggctccatctgcagggctgaacctgaggctggtgaggagcaggcaggtgacgacagggacagtggcggccccgttctccagtttgactacgaggcagttgctaacagactgtttgaaatggccagccgccagagcaccccttctcagaacagaaagcgtctctacaaagtgatccggaagctgcaggacctggcaggaggcattttccctgaagatgagatcccagagaaggcctgcaggcgcctgcttgaagggaggcggcagaagaagacgaagaagcagaagcgtctgctcaggttgcagcaggagagagggaaaggtgagaaggagcccccgagcccgggcatggagaggaagaggagcaggaggaggggtgtaggggccgaccccgaggcgcgggcagaggctggtgagcagccaggcacagctgagcgggccctgctccgagatcagcccaggggccgtggccagagaggggctcgccagagaaggaggacacctcggcccctgaccagtgcccgagcaaaggcggccaatgtccaggagccggagaagaagaagaaacgcagggagtgatgtggccgggccaaggacaggcagggagggaggccaggcctcgcttgcaccgcgggacgaggctgaccgggctgttctgtagactcaggaccgtggctccagaactcctgtgccaggcgggagggaagggcggcactggagagatgggcccatcattaggggccagcatcccaggaactggacctttccccagagcctccgcctgtggctgtgatgaccttgggccagaaggtcaaactccgaagactgaaactctgcctgcagcaggactggccgcccctgctgtggggggttcagaaaataaaatgccgcgcagcccttgccaggga

SEQ ID NO: 350716 - DNA, 1348 bp, Homo sapiens
  misc_feature (22)..(22): n is a, c, g, or t
gcacgagggaacgacctcctgnagtggttctgaagatgcaaggctgggaagaaagacagatcgaggagctgctagagctgctgatgactgagatcctgcaccccagcagccaggcccccaacggtgtgaagagccacttcatcgagatcttcctggaggagctgaccaaagtgggcgccgaggagcttacggcagaccagaacctgaagttcatcgaccccttctgcagaattgctgcccggaccaaggattccttggttttgaacaacatcactcgaggcatctttgagacgattgtggagcaggccccgcttgccattgaagacctcctgaatgaactggacacacaggatgaggaggtggcgtcggacagtgatgagtcctctgagggtggtgagcgtggagacgcgctgtcccagaagaggtctgagaagccgcccgcaggctccatctgcagggctgaacctgaggctggtgaggagcaggcaggtgacgacagggacagtggcggccccgttctccagtttgactacgaggcagttgctaacagactgtttgaaatggccagccgccagagcaccccttctcagaacagaaagcgtctctacaaagtgatccggaagctgcaggacctggcaggaggcattttccctgaagatgagatcccagagaaggcctgcaggcgcctgcttgaagggaggcggcagaagaagacgaagaagcagaagcgtctgctcaggttgcagcaggagagagggaaaggtgagaaggagcccccgagcccgggcatggagaggaagaggagcaggaggaggggtgtaggggccgaccccgaggcgcgggcagaggctggtgagcagccaggcacagctgagcgggccctgctccgagatcagcccaggggccgtggccagagaggggctcgccagagaaggaggacacctcggcccctgaccagtgcccgagcaaaggcggccaatgtccaggagccggagaagaagaagaaacgcagggagtgatgtggccgggccaaggacaggcagggagggaggccaggcctcgcttgcaccgcgggacgaggctgaccgggctgttctgtagactcaggaccgtggctccagaactcctgtgccaggcgggagggaagggcggcactggagagatgggcccatcattaggggccagcatcccaggaactggacctttccccagagcctccgcctgtggctgtgatgaccttgggccagaaggtcaaactccgaagactgaaactctgcctgcagcaggactggccgcccctgctgtggggggttcagaaaataaaatgccgcgcagcccttgccaggga

SEQ ID NO: 350717 - DNA, 476 bp, Homo sapiens
gaatgcctgagttcactttcttcttttagtatttgagatatattacaggagagtgcagaagccctcagtataatgctggatgaattatcaccaacagattaaccttgtggccactgtccagcttaggaaaccgtcaaggttcgcaattttgaatttccaaaatggagtatggtgcctgataccttgtagatctcagtcggttttactgtgtgcgtgaagtagcagttacctggagtagccgcatagccacaggcgcggcaggttctgggttagaaggattgtttgaaggggagggccagattctgccccccagttgcctttaccgtaagtgggactttggtctcattcaggcagtcacgtttctgtggcttcctttctggcactcgaaggtgtgggattcatttggtccaaccgttgctgttttgatgcaggtggttttacgcacgacgagctgctgaaggtgtggaaaggactgt

SEQ ID NO: 350718 - DNA, 1801 bp, Homo sapiens
gccaggggaggcgggcgcaggaggcgcgtgctcagtgtgctgggtaccaggcgactccgggacagggggtctcggccgtcggcgtcatggtttcgcgcgtgcagctcccgcctgagatccagctggctcagcgcctggcggggaatgagcaggtgacccgggaccgggcggtgaggaagctccggaaatacatcgtcgccaggactcagcgggccgcaggtggttttacgcacgacgagctgctgaaggtgtggaaaggactgttttattgcatgtggatgcaggacaagccactcctccaggaagaattaggaaggactatttcccagctcgttcatgcttttcagaccacggaggcgcagcacctgttccttcaggccttctggcagaccatgaatcgcgagtggacgggcattgacaggctgcgcctggataaattctacatgctcatgcggatggtcctgaacgagtccttgaaggttctgaagatgcaaggctgggaagaaagacagatcgaggagctgctagagctgctgatgactgagatcctgcaccccagcagccaggcccccaacggtgtgaagagccacttcatcgagatcttcctggaggagctgaccaaagtgggcgccgaggagcttacggcagaccagaacctgaagttcatcgaccccttctgcagaattgctgcccggaccaaggattccttggttttgaacaacatcactcgaggcatctttgagacgattgtggagcaggccccgcttgccattgaagacctcctgaatgaactggacacacaggatgaggaggtggcgtcggacagtgatgagtcctctgagggtggtgagcgtggagacgcgctgtcccagaagaggtctgagaagccgcccgcaggctccatctgcagggctgaacctgaggctggtgaggagcaggcaggtgacgacagggacagtggcggccccgttctccagtttgactacgaggcagttgctaacagactgtttgaaatggccagccgccagagcaccccttctcagaacagaaagcgtctctacaaagtgatccggaagctgcaggacctggcaggaggcattttccctgaagatgagatcccagagaaggcctgcaggcgcctgcttgaagggaggcggcagaagaagacgaagaagcagaagcgtctgctcaggttgcagcaggagagagggaaaggtgagaaggagcccccgagcccgggcatggagaggaagaggagcaggaggaggggtgtaggggccgaccccgaggcgcgggcagaggctggtgagcagccaggcacagctgagcgggccctgctccgagatcagcccaggggccgtggccagagaggggctcgccagagaaggaggacacctcggcccctgaccagtgcccgagcaaaggcggccaatgtccaggagccggagaagaagaagaaacgcagggagtgatgtggccgggccaaggacaggcagggagggaggccaggcctcgcttgcaccgcgggacgaggctgaccgggctgttctgtagactcaggaccgtggctccagaactcctgtgccaggcgggagggaagggcggcactggagagatgggcccatcattaggggccagcatcccaggaactggacctttccccagagcctccgcctgtggctgtgatgaccttgggccagaaggtcaaactccgaagactgaaactctgcctgcagcaggactggccgcccctgctgtggggggttcagaaaataaaatgccgcgcagcccttgccaggga

SEQ ID NO: 350719 - DNA, 3649 bp, Homo sapiens
caaaaccctcatttcgagcctaatgggctaatatcttacactttaaaaataaagtgaaaagccaggataatgtcaccaagagattggactgaattccgcctgatggtcctgaggttcctgcagttgatttttctgactcctctgttctctggtgaccggagttgagaagttcttaccctgcctgtctgtaggactcacttgaggagcctctaaaaatcctcatgtccagatcctggtccagcaagatccagttctgggggtagggcctgggcatcagcattttttatctatagctatgtaaagaacgggttcctccatgttctcacctccctccccagagtggcttcgtgctcctcagtggttctcttctggcttattccttctccagagcacctgttccttcaggccttctggcagaccatgaatcgcgagtggacgggcattgacaggctgcgcctggataaattctacatgctcatgcggatggtcctgaacgagtccttgaaggttctgaagatgcaaggctgggaagaaagacagatcgaggagctgctagagctgctgatgactgagatcctgcaccccagcagccaggcccccaacggtgtgaagagccacttcatcgagatcttcctggaggagctgaccaaagtgggcgccgaggagcttacggcagaccagaacctgaagttcatcgaccccttctgcagaattgctgcccggaccaaggattccttggttttgaacaacatcactcgaggcatctttgagacgattgtggagcaggccccgcttgccattgaagacctcctgaatgaactggacacacaggatgaggaggtggcgtcggacagtgatgagtcctctgagggtggtgagcgtggagacgcgctgtcccagaagaggtctgagaagccgcccgcaggctccatctgcagggctgaacctgaggctggtgaggagcaggcaggtgacgacagggacagtggcggccccgttctccagtttgactacgaggcagttgctaacagactgtttgaaatggccagccgccagagcaccccttctcagaacagaaagcgtctctacaaagtgatccggaagctgcaggacctggcaggaggcattttccctgaagatgagatcccagagaaggcctgcaggcgcctgcttgaagggaggcggcagaagaagacgaagaagcagaagcgtctgctcaggttgcagcaggagagagggaaaggtgagaaggagcccccgagcccgggcatggagaggaagaggagcaggaggaggggtgtaggggccgaccccgaggcgcgggcagaggctggtgagcagccaggcacagctgagcgggccctgctccgagatcagcccaggggccgtggccagagaggggctcgccagagaaggaggacacctcggcccctgaccagtgcccgagcaaaggcggccaatgtccaggagccggagaagaagaagaaacgcagggagtgatgtggccgggccaaggacaggcagggagggaggccaggcctcgcttgcaccgcgggacgaggctgaccgggctgttctgtagactcaggaccgtggctccagaactcctgtgccaggcgggagggaagggcggcactggagagatgggcccatcattaggggccagcatcccaggaactggacctttccccagagcctccgcctgtggctgtgatgaccttgggccagaaggtcaaactccgaagactgaaactctgcctgcagcaggactggccgcccctgctgtggggggttcagaaaataaaatgccgcgcagcccttgccagggaagtgtcgcttcgggtgtgtcctacggacgtgtgggaggtggcaggcgccagcctccgagcagtgtggtggtttatattcatgtttgtggaaaaatcttgcaagacatttctcctttcacagaactgcccaggtgttaacagggctgtctggacggggctcttttgcttccccctcaatctggggtctagagttgtgcagggaattcagctccagtaaggcctggattgcccggggtgagcgtgtgtgtggtgggaagacctggcttccgcgagagccttgttcctggaggcaggagcgccccgccatcctgggtacccgcgggtccgcaggctgcgcacctctttccctcagccaggtcaccctcagcgtcctccctgcccctctccccttcacacctgctggagcctgtgagggaggtggcgggtccccactgtggcgacggagagctgacagtagcccagggctttccacctgcatggaacaagggcctgtctgccgccagcgctgtggccacagcctgcataggtgacaaggggccgctgcgttgggttttgcccgcatcttctgttccatgggtgcccagccagccaggccgtgtgggatccagcgagaggccagggcttggagtgggcctgggaccaggaaggacctctaggctgtggctggccttgtgcagaccctggactgcatccggttccccaaagccctgctgcattcgagtgtcccccaaccccgggcaggtggcacctggtgacacctccttcagtcccactcagctgggcggccggggcaggcttagggcacagttaggggccaaggagagggaaggccagggcccctgttctaggggttagggttctttccccaaaggaacttaaaaagacaagcgtggccaggcacagtggctcacacctgtaatcccagcactttgggaggccgaggtggccagatcacctgaggtcaggagtttgagaccagactgaccaacatggagaaaccccatctctactaaaatacaaaattagccaggcgtggtggcacatgcctgtaatcccagctactcgggaggctgaggcaggagaattgcttgaacctgggaggcagaggttgtggtgagctaagatcacgccattgcactccagcctgggcaacgagagggaaactctgtttcaaaaaaaaaaaaaaaaagacaagcgtgtctaacgtaaactgccggtggcgagcgtcaggtctgggcagtgtcccctgggcctggtcagtgttcccctgggcctggcctctttacccccagcagggcctgttgggacgagcccctgcagttggaggcctttggaagggaacggggtgcattataacgctttcttgtttttgaagtttctttggtcaaaagctaaggaaacaaccatgctaacagaagtttctggaaaaaagcaaattagagatgccgaattgcagttgtgaaactggaagccacagtgactttgcatcttctttcacatgtgtgttcacagggaggggtttttcatggctgcgccggcactgtcacgctctggctgtttccaggccctgctgggtgcacgtttccccatattcagaattgttttaaataaccgcattgtgcttatgacatgaatgactgaattcctctcctattggtagcctcttttacttttttatttttttatttttgagactgagttttgagttgagttttttttgagaccgagttgttttatttccgcacatgaatggtagttccagctactcaggaggccaaggtgggagaagcgcctgagcccaggagagaaccatcgagagg

SEQ ID NO: 350720 - DNA, 450 bp, Homo sapiens
ctccgggccggccccgtccccgcggcccacccacctggtcggcgatgtgctgggtctcggcggtggccggctgcgtggcggagggcgccccgcacatcatcttggcggcgacggagggaatctggcgaggggactcggcgaggggacgcggcggctcctcagcccaagtaggcgctggggtcacgtgacgcgcgggcggaaccaaggggcggggaggaggcactttggcttcggagtcccctgcggggtcgcggtggccccgcaagaagggacgcgcggggcggggcgcggggcggggcgcggggcggggagcctggccaccactcgccgcaggctgggtctccgcgcccagcgctggtgtcgggagggagcgcccccctcccggggctggtatcgtctttccgggcgccgagtcacacggaccggggcgggggcgcggccgggtgtcgc

SEQ ID NO: 350721 - DNA, 1592 bp, Homo sapiens
gccaggggaggcgggcgcaggaggcgcgtgctcagtgtgctgggtaccaggcgactccgggacagggggtctcggccgtcggcgtcatggtttcgcgcgtgcagctcccgcctgagatccagctggctcagcgcctggcggggaatgagcaggtgacccgggaccgggcggtgaggaagctccggaaatacatcgtcgccaggactcagcgggccgcaggtggttttacgcacgacgagctgctgaaggtgtggaaaggactgttttattgcatgtggatgcaggacaagccactcctccaggaagaattaggaaggactatttcccagctcgttcatgcttttcagaccacggaggcgcagcacctgttccttcaggccttctggcagaccatgaatcgcgagtggacgggcattgacaggctgcgcctggataaattctacatgctcatgcggatggtcctgaacgagtccttgaaggttctgaagatgcaaggctgggaagaaagacagatcgaggagctgctagagctgctgatgactgagatcctgcaccccagcagccaggcccccaacggtgtgaagagccacttcatcgagatcttcctggaggagctgaccaaagtgggcgccgaggagcttacggcagaccagaacctgaagttcatcgaccccttctgcagaattgctgcccggaccaaggattccttggttttgaacaacatcactcgaggcatctttgagacgattgtggagcaggccccgcttgccattgaagacctcctgaatgaactggacacacaggatgaggaggtggcgtcggacagtgatgagtcctctgagggtggtgagcgtggagacgcgctgtcccagaagaggtctgagaagccgcccgcaggctccatctgcagggctgaacctgaggctggtgaggagcaggcaggtgacgacagggacagtggcggccccgttctccagtttgactacgaggcagttgctaacagactgtttgaaatggccagccgccagagcaccccttctcagaacagaaagcgtctctacaaagtgatccggaagctgcaggacctggcaggaggcattttccctgaagatgagatcccagagaaggcctgcaggcgcctgcttgaagggaggcggcagaagaagacgaagaagcagaagcgtctgctcaggttgcagcaggagagaggtaggactagggggtgtgttagtcatggagccggcgtcctcacctgcttgcttctcccctggatgggggtcacctgcagtgtctccccctgaagcatgagtgccgagtcccccatcctgggtgcctgctatccacgcatcccggaaatgccctgtcctcggcatccctcctgtaggcctctccctgcctcccccacccaccttccttgtctgcagctcccccgagctgtgtgcgctgccctccctcccggtctggagccaccagggtgccggcgggcgggggcagcgcgggtctcagtgcctggccaagcgagacaggcggcacctgggcagggaggcaacctgaggcagtgcgaccctgaagccaggggagggaggtggagc

SEQ ID NO: 350722 - DNA, 1098 bp, Homo sapiens
gccaggggaggcgggcgcaggaggcgcgtgctcagtgtgctgggtaccaggcgactccgggacagggggtctcggccgtcggcgtcatggtttcgcgcgtgcagctcccgcctgagatccagctggctcagcgcctggcggggaatgagcaggtgacccgggaccgggcggtgaggaagctccggaaatacatcgtcgccaggactcagcgggccgcaggtggttttacgcacgacgagctgctgaaggtgtggaaaggactgttttattgcatgtggatgcaggacaagccactcctccaggaagaattaggaaggactatttcccagctcgttcatgcttttcagaccacggaggcgcagcacctgttccttcaggccttctggcagaccatgaatcgcgagtggacgggcattgacaggctgcgcctggataaattctacatgctcatgcggatggtcctgaacgagtccttgaaggttctgaagatgcaaggctgggaagaaagacagatcgaggagctgctagagctgctgatgactgagatcctgcaccccagcagccaggcccccaacggtgtgaagagccacttcatcgagatcttcctggaggagctgaccaaagtgggcgccgaggagcttacggcagaccagaacctgaagttcatcgaccccttctgcagaattgctgcccggaccaaggattccttggttttgaacaacatcactcgaggcatctttgagacgattgtggagcaggccccgcttgccattgaagacctcctgaatgaactggacacacaggatgaggaggtggcgtcggacagtgatgagtcctctgagggtggtgagcgtggagacgcgctgtcccagaagaggtctgagaagccgcccgcaggtgggggtcacactgcgcctggcttctcctcggggcctgtcctgggctgagccagtgcgatctcctgctgggttgctcctgccacctcctacctggtccccttgtctctgcccctctccacagtccatcctcagcatagaagccagagtgacttctgtgggcaccaagcacacgtcgtttcccctctcccccagcctctga

SEQ ID NO: 350723 - DNA, 1749 bp, Homo sapiens
ctccgggccggccccgtccccgcggcccacccacctggtcggcgatgtgctgggtctcggcggtggccggctgcgtggcggagggcgccccgcacatcatcttggcggcgacggagggaatctggcgaggggactcggcgaggggacgcggcggctcctcagcccaagtggttttacgcacgacgagctgctgaaggtgtggaaaggactgttttattgcatgtggatgcaggacaagccactcctccaggaagaattaggaaggactatttcccagctcgttcatgcttttcagaccacggaggcgcagcacctgttccttcaggccttctggcagaccatgaatcgcgagtggacgggcattgacaggctgcgcctggataaattctacatgctcatgcggatggtcctgaacgagtccttgaaggttctgaagatgcaaggctgggaagaaagacagatcgaggagctgctagagctgctgatgactgagatcctgcaccccagcagccaggcccccaacggtgtgaagagccacttcatcgagatcttcctggaggagctgaccaaagtgggcgccgaggagcttacggcagaccagaacctgaagttcatcgaccccttctgcagaattgctgcccggaccaaggattccttggttttgaacaacatcactcgaggcatctttgagacgattgtggagcaggccccgcttgccattgaagacctcctgaatgaactggacacacaggatgaggaggtggcgtcggacagtgatgagtcctctgagggtggtgagcgtggagacgcgctgtcccagaagaggtctgagaagccgcccgcaggctccatctgcagggctgaacctgaggctggtgaggagcaggcaggtgacgacagggacagtggcggccccgttctccagtttgactacgaggcagttgctaacagactgtttgaaatggccagccgccagagcaccccttctcagaacagaaagcgtctctacaaagtgatccggaagctgcaggacctggcaggaggcattttccctgaagatgagatcccagagaaggcctgcaggcgcctgcttgaagggaggcggcagaagaagacgaagaagcagaagcgtctgctcaggttgcagcaggagagagggaaaggtgagaaggagcccccgagcccgggcatggagaggaagaggagcaggaggaggggtgtaggggccgaccccgaggcgcgggcagaggctggtgagcagccaggcacagctgagcgggccctgctccgagatcagcccaggggccgtggccagagaggggctcgccagagaaggaggacacctcggcccctgaccagtgcccgagcaaaggcggccaatgtccaggagccggagaagaagaagaaacgcagggagtgatgtggccgggccaaggacaggcagggagggaggccaggcctcgcttgcaccgcgggacgaggctgaccgggctgttctgtagactcaggaccgtggctccagaactcctgtgccaggcgggagggaagggcggcactggagagatgggcccatcattaggggccagcatcccaggaactggacctttccccagagcctccgcctgtggctgtgatgaccttgggccagaaggtcaaactccgaagactgaaactctgcctgcagcaggactggccgcccctgctgtggggggttcagaaaataaaatgccgcgcagcccttgccaggga

SEQ ID NO: 350724 - DNA, 1625 bp, Homo sapiens
gtctctaagatcccccacttctgaccgcggtctatctgttggttttcggaactgaggccatgattaagaagtgcgcctggggcacccaggcgcacttctggatgcaggacatagccactcctccaggaagaattaggaaggactatttcccagctcgttcatgcttttcagaccacggaggcgcagcacctgttccttcaggccttctggcagaccatgaatcgcgagtggacgggcattgacaggctgcgcctggataaattctacatgctcatgcggatggtcctgaacgagtccttgaaggttctgaagatgcaaggctgggaagaaagacagatcgaggagctgctagagctgctgatgactgagatcctgcaccccagcagccaggcccccaacggtgtgaagagccacttcatcgagatcttcctggaggagctgaccaaagtgggcgccgaggagcttacggcagaccagaacctgaagttcatcgaccccttctgcagaattgctgcccggaccaaggattccttggttttgaacaacatcactcgaggcatctttgagacgattgtggagcaggccccgcttgccattgaagacctcctgaatgaactggacacacaggatgaggaggtggcgtcggacagtgatgagtcctctgagggtggtgagcgtggagacgcgctgtcccagaagaggtctgagaagccgcccgcaggctccatctgcagggctgaacctgaggctggtgaggagcaggcaggtgacgacagggacagtggcggccccgttctccagtttgactacgaggcagttgctaacagactgtttgaaatggccagccgccagagcaccccttctcagaacagaaagcgtctctacaaagtgatccggaagctgcaggacctggcaggaggcattttccctgaagatgagatcccagagaaggcctgcaggcgcctgcttgaagggaggcggcagaagaagacgaagaagcagaagcgtctgctcaggttgcagcaggagagagggaaaggtgagaaggagcccccgagcccgggcatggagaggaagaggagcaggaggaggggtgtaggggccgaccccgaggcgcgggcagaggctggtgagcagccaggcacagctgagcgggccctgctccgagatcagcccaggggccgtggccagagaggggctcgccagagaaggaggacacctcggcccctgaccagtgcccgagcaaaggcggccaatgtccaggagccggagaagaagaagaaacgcagggagtgatgtggccgggccaaggacaggcagggagggaggccaggcctcgcttgcaccgcgggacgaggctgaccgggctgttctgtagactcaggaccgtggctccagaactcctgtgccaggcgggagggaagggcggcactggagagatgggcccatcattaggggccagcatcccaggaactggacctttccccagagcctccgcctgtggctgtgatgaccttgggccagaaggtcaaactccgaagactgaaactctgcctgcagcaggactggccgcccctgctgtggggggttcagaaaataaaatgccgcgcagcccttgccaggga

SEQ ID NO: 350725 - DNA, 351 bp, Homo sapiens
tttttctgatgtcggcctcggctgtgcttcttctttgggggtgaagagagtggggaggcagtctccacccctgggaggcagaagccaggtgagaaccagagtgggttggggcctcattgcagggctggggttggcccagggagagggcagtgtcccaatcttagagatctgtcctggcttctcagagtggcaggggtgttgggggagcttcctgagggacacctgtggctgcctagatagggctgggggatcccagtgggatggtctctgctccaatcccaccatgttctaggacaacagcaagggttcctggggctttggcctgagagaagtccctgtggtttgacctgg

SEQ ID NO: 350726 - DNA, 964 bp, Homo sapiens
aggatacacctgggattgtgtttgagctcaaggagaatggcacagtgagatgctatgggccgaaacatgaaaaccacagtcaacagggatctcctgaagatttaaggtgctggcactgacctggtttggtttatagaagaaatctccgaaaggtcctcgccagaaagctgtgtctcctactctccaggactcaacataccgggacatcagccccatctggtagcactggaagcaaacacagggagacgtcagcgggacagggtgtaaagcaggccctctggctcaccaagaccaagttaatagaaggccttcccgagaaagtgcttagccttgttgatgatccaaggaaccacatagagaaccaagacgagtgcgttctgaatgtgatctctcacgcccgtctctggcagaccactgaggaaatccccaagagagagacctactgcccggtcatcgtggacaacctaatacagctgtgtaaatctcagattctcaagcatccttctctggccaggaggatctgtgtccaaaactccacgttttctgctacctggaaccgagagtctcttctccttcaagtccgtggttctggtggagcccgactgagcactaaggatcctctgcccaccatcgcctccagagaggagattgaagctactaagaatcatgttctagagaccttctaccccatatcacccatcatcgatcttcatgaatgcaatatttatgatgtgaaaaatgacacagattccaggaaggctatccttacccctactccccaataaagctaaaactcacctgagttgtaaaaaactccagttgacacaaaatagactacgaaagtggctttaacatatctgaacacacaatagctaagacccaaactgggattagataccccactatgcttagccctaaacctcaacagttaaatcaacaaactgctcgccatgatccacatact

SEQ ID NO: 350727 - DNA, 2024 bp, Homo sapiens
ctcctgcctgacccaggagggccatgcctcctcctacctggtgtgagcctcaggtgggattgctggggtgctctgtgaggagagccctggccctggggacttcccacccgggatctctgcctggaggactccttcagtcccgcccctacctaaggccctgcccagtgctccactccagctcctgcttccctttgcaccctccagccaatccagctcctcgcagctcccagggtgctctgcggcttcattagctctggcctttgtaggtgctgctccttttgtctgggaggcttcttgccttctcccctccccattactgtttgtcaggctatcctccacttgtccttccaggtttagcataagtgtttcttattttgggaaacttctgaccaccaccgtccccatcccaaccctcacttaagtgcctcaggtgggctgccctggcctccgtattcccccatcagagcacgatcacattgctgtgcgtagaacctcttcacatgttttttttcctccaccaaacagaactccaagctcctagatccttgagggcagggtctggggatgcattcatttgtttcatcccacagatacggagttcctcctgcggcaccattgtgctgcaccccactgctcagctgacggggtccaggcctgctctctgtgtagtgggcagtagcagtatctaaataaattcctgatagagcatcaggcagtaatatgcaccctggagagacctacagcagggtcaggactgcgaaagcggagtaggggtactgcctgctctgggaccaaccaggccccacacaggcctgagtgtgggcttgctaaatggagtcgctgagcctttgaacattctcagcaggtccgttcttgaactggttctccagcagctctcagtgctgtttccacctgaaatgcctgctgggtctgtgccctttgctttggccccagacaccctcagttcacctgcatagtcacaccagccacctccgtgctctctgctcttagtcaggttttccctcctgactctgtgtcttcaggttctcttccctcagcctctcccttccaggatactgactcagggctgggcctgttgtggtttggagacagcttctcctcacctctgcagcctcatctcctgccgctccacccctcagcattcgccctgggctccagcccgatcttgcccttcctgccttcatttctacttcttctattgcatgtgctgggctttctgaagtctccttccttttctttttctttctgccccattctgctcacccttccatgtataaatgtcggcaagtcagtcatttcttcctgctttcttctttttcctacttctgcagtggggtctgtctcctttcattttcactatttgaacagctgacggtaagctccttgaggacaggaaccagagtcaagttactgctgtgtctgtttccagcacaggatataggcgcagcagaaagcaagcaggtgcccaataaatgtgtgtggaatgggtgagggatgattgtccctgggattagagagggcagcagcccatttcaaccatcattcctggtggtggaagtgagagggcctcgggagcagagcagcgtcaacagttgttttggctgaagggggctgggaatgcttcctgtcctcccaggctacagcccctcaatgccccttcttagtccgagagagagacgatgtcagaaaaagaaagttactgtccaggcactgaagatttacttcaatccaatctttgttttaattgctgccgttaaacctagtagcaggatcctaatgaaccgtgttctttccaggaacctgttggcccagttggtttcaagccagagacattcagaaagtttttagctctatatttgcatggtgctgcgtgagcggaggacccctctgaatcctgaaacccctcttgcctctcttccacggaagagggcctgggccccgtggagcctcagtgcccgtttggcctgctgctctcgctgacaataaagagcccttgcgttgca

SEQ ID NO: 350728 - DNA, 955 bp, Homo sapiens
cccacccgaggggagaaagcagggagtggctgtggccctcctggccgatagcgactccccatagaaaacagagggcaccaggaggaacctttttctacttccagaaaaataaaagacattccagcggaccaaaatgtgtttgcaagacaagaaatggaaaatggcttttagacggcccccaaatatttaaagtgagatggataccttccctcccaacccaccttccgccaaggccatcgcgactccacaagaacacagaatttgcaggcccaggaaaagaaggcagacgcctcaaacacaaaacatcttgttatgcaccaggaacaaaaactgtgcccaagaagtcaccttgcattttgtaatcagtgtaataaactccaacccacattccccaaacatgtcaggaagggctgcggaaaaaagatgtccctttaataaaacgttatcaacatatatcgtacacaaactacaatgtatcataattacttttttttcctctcttaattcagaaccagactacaaggtaagaaaaaacacagaaacagctacaatgttcccaataatccgcacaaagtcttttttcaggcagatgatatctcacataatatgatatacatggatcagaaagggagggagtaaaacaaagaccagctacaggggagggaggaaggagaagggcatgtcaatgtacaaagaattcgggtgtcttccagggcaagacacaaaggtttccgtggggtgatgaggtgagtggggccatgagcaccctcccgggaggggacaggctccactgtcgggcttgttggtttttgaaagtaaaaacaggactggagccagcacgtctgtttggttgtcggtgtccccccaccccccacagctgctccaaagtctttccatccagtcccaagcatatacagagcaattctgatcagtatcccatctttgagaaaggacg

SEQ ID NO: 350729 - DNA, 1452 bp, Homo sapiens
accagggccatttgtgttgtgaaggcaactgccaggctgccgaggggccccaggctgaggggtagcacagcacacagcaggcgctcttcccaggctgggccccgtgacctgccttcctccagctaggcaccctgatcccatggctctcgtctgtgcctgactcctgctccaaggagcacaggtatcggatggatatcccatccacccaacctcctttccccagccctgggtcagcaccattgatacaggttagtcgcagcctcagtctcttcatctctccaatggagatgcttttccaatagttcaaaggtgtctgtactcagcaaaagcctaggaaaccttgttccaaggtgaagagggaaggaccagatggaatctcctagatcctcccagctactccccaacacacccatttggactctccccacgagtaacatcacttgtagcgaacacatgctgctcttagtccgtgcacggcactgttctaagcacttcacggtgctaacctcctcacagcctatgaggcagccaacccgccatcccccattttgcagatgagagaactgagaacagaagtatcaactaatttgcccaaggccacacagcaagttgcagcaaacaagatttaaacctgggaatttgctatctggtcccctaagggctttataaacatgggctgagcctgccctttgcttggaccctctgtctcccaacccaccttccgccaaggccatcgcgactccacaagaacacagaatttgcaggcccaggaaaagaaggcagacgcctcaaacacaaaacatcttgttatgcaccaggaacaaaaactgtgcccaagaagtcaccttgcattttgtaatcagtgtaataaactccaacccacattccccaaacatgtcaggaagggctgcggaaaaaagatgtccctttaataaaacgttatcaacatatatcgtacacaaactacaatgtatcataattacttttttttcctctcttaattcagaaccagactacaaggtaagaaaaaacacagaaacagctacaatgttcccaataatccgcacaaagtcttttttcaggcagatgatatctcacataatatgatatacatggatcagaaagggagggagtaaaacaaagaccagctacaggggagggaggaaggagaagggcatgtcaatgtacaaagaattcgggtgtcttccagggcaagacacaaaggtttccgtggggtgatgaggtgagtggggccatgagcaccctcccgggaggggacaggctccactgtcgggcttgttggtttttgaaagtaaaaacaggactggagccagcacgtctgtttggttgtcggtgtccccccaccccccacagctgctccaaagtctttccatccagtcccaagcatatacagagcaattctgatcagtatcccatctttgagaaaggacg

SEQ ID NO: 350730 - DNA, 1016 bp, Homo sapiens
accagggccatttgtgttgtgaaggcaactgccaggctgccgaggggccccaggctgaggggtagcacagcacacagcaggcgctcttcccaggctgggccccgtgacctgccttcctccagctaggcaccctgatcccatggctctcgtctgtgcctgactcctgctccaaggagcacaggtatcggatggatatcccatccacccaacctcctttccccagccctgggtcagcaccattgatacaggttagtcgcagcctcagtctcttcatctctccaatggagatgcttttccaatagttcaaaggtgtctgtactcagcaaaagcctaggaaaccttgttccaaggtgaagagggaaggaccagatggaatctcctagatcctcccagctactccccaacacacccatttggactctccccacgagtaacatcacttgtagcgaacacatgctgctcttagtccgtgcacggcactgttctaagcacttcacggtgctaacctcctcacagcctatgaggcagccaacccgccatcccccattttgcagatgagagaactgagaacagaagtatcaactaatttgcccaaggccacacagcaagttgcagcaaacaagatttaaacctgggaatttgctatctggtcccctaagggctttataaacatgggctgagcctgccctttgcttggaccctctgtctcccacccacccaccacggcatccgctcctgctacaagcctagaatgaggtccccagagctccagggaagtacaaagttctttctagtcgtgcaagtcagcatccatagcagcttacctcaccctagccctcagcatttcttgcctaaatgtcgtctgggaatgcctctctccatatcttgccagccccacctgattcatctcccaggagaccaccagcatacactttccaaaatttaagtagactgcactactctcaaaacccttcaagggctcccagtacaccttggaggtttaggaaaaaaaaaaa

SEQ ID NO: 350731 - DNA, 282 bp, Homo sapiens
agcttgtggacctgtgtgccgaatgggcctcttttctttataaatcacccagtgatccaaaagagagtggttgtggaacctgttggcccagttggtttcaagccagagacattcagaaagtttttagctctatatttgcatggtgctgcgtgagcggaggacccctctgaatcctgaaacccctcttgcctctcttccacggaagagggcctgggccccgtggagcctcagtgcccgtttggcctgctgctctcgctgacaataaagagcccttgcgttgca

SEQ ID NO: 350732 - DNA, 1498 bp, Homo sapiens
aacgagctttggcgcccggtctcattcgttcccagcaggccctgcgcgcggcaacatggcggggtccaggtggaggtcttgaggctatcagatcggtatggcattggcgtccgggcccgcaaggcgggcgctagctggctccgggcagctcggccttgggggcttcggggccccgagacgcggggcgtatgagtggggcgtgcgctccacgcggaagtcggagcctcctcccctggatagggtgtacgagatccctggactggagcccatcacctttgcggggaagatgcacttcgtgccctggctggcgcggccgatctttccgccctgggaccgcggctacaaggacccaaggttctaccgctcgccccctcttcacgagcatccgctgtacaaagaccaggcctgctatatctttcaccaccgttgccgccttctcgagggtgtaaagcaggccctctggctcaccaagaccaagttaatagaaggccttcccgagaaagtgcttagccttgttgatgatccaaggaaccacatagagaaccaagacgagtgcgttctgaatgtgatctctcacgcccgtctctggcagaccactgaggaaatccccaagagagagacctactgcccggtcatcgtggacaacctaatacagctgtgtaaatctcagattctcaagcatccttctctggccaggaggatctgtgtccaaaactccacgttttctgctacctggaaccgagagtctcttctccttcaagtccgtggttctggtggagcccgactgagcactaaggatcctctgcccaccatcgcctccagagaggagattgaagctactaagaatcatgttctagagaccttctaccccatatcacccatcatcgatcttcatgaatgcaatatttatgatgtgaaaaatgacacaggattccaggaaggctatccttacccctatccccataccctgtacttactggacaaagccaatttacgaccacaccgccttcaaccagatcagctgcgggccaagatgatcctgtttgcttttggcagtgccctggctcaggcccggctcctctatgggaatgatgccaaggtcttggagcagcccgtggtggtgcagagcgtgggcacggatggacgtgtcttccatttcctagtgtttcaactgaataccacagacctggactctaacgagggtgtcaagaatttggcctgggtggactcagaccagctcctctatcagcatttttggtgtctcccagtgatcaaaaagagagtggttgtggaacctgttggcccagttggtttcaagccagagacattcagaaagtttttagctctatatttgcatggtgctgcgtgagcggaggacccctctgaatcctgaaacccctcttgcctctcttccacggaagagggcctgggccccgtggagcctcagtgcccgtttggcctgctgctctcgctgacaataaagagcccttgcgttgca

SEQ ID NO: 350733 - DNA, 1777 bp, Homo sapiens
  misc_feature (1620)..(1620): n is a, c, g, or t
aacgagctttggcgcccggtctcattcgttcccagcaggccctgcgcgcggcaacatggcggggtccaggtggaggtcttgaggctatcagatcggtatggcattggcgtccgggcccgcaaggcgggcgctagctggctccgggcagctcggccttgggggcttcggggccccgagacgcggggcgtatgagtggggcgtgcgctccacgcggaagtcggagcctcctcccctggatagggtgtacgagatccctggactggagcccatcacctttgcggggaagatgcacttcgtgccctggctggcgcggccgatctttccgccctgggaccgcggctacaaggacccaaggttctaccgctcgccccctcttcacgagcatccgctgtacaaagaccaggcctgctatatctttcaccaccgttgccgccttctcgagggtgtaaagcaggccctctggctcaccaagaccaagttaatagaaggccttcccgagaaagtgcttagccttgttgatgatccaaggaaccacatagagaaccaagacgagtgcgttctgaatgtgatctctcacgcccgtctctggcagaccactgaggaaatccccaagagagagacctactgcccggtcatcgtggacaacctaatacagctgtgtaaatctcagattctcaagcatccttctctggccaggaggatctgtgtccaaaactccacgttttctgctacctggaaccgagagtctcttctccttcaagtccgtggttctggtggagcccgactgagcactaaggatcctctgcccaccatcgcctccagagaggagattgaagctactaagaatcatgttctagagaccttctaccccatatcacccatcatcgatcttcatgaatgcaatatttatgatgtgaaaaatgacacaggattccaggaaggctatccttacccctatccccataccctgtacttactggacaaagccaatttacgaccacaccgccttcaaccagatcagctgcgggccaagatgatcctgtttgcttttggcagtgccctggctcaggcccggctcctctatgggaatgatgccaaggtcttggagcagcccgtggtggtgcagagcgtgggcacggatggacgtgtcttccatttcctagtgtttcaactgaataccacagacctggactctaacgagggtgtcaagaatttggcctgggtggactcagaccagctcctctatcagcatttttggtgtctcccagtgatcaaaaagagagtggttgtggaacctgttggcccagttggtttcaagccagagacattcagaaagtttttagctctatatttgcatggtgctgcgtgagcggaggacccctctgaatcctgaaacccctcttgcctctcttccacggaagagggcctgggccccgtggagcctcagtgcccgtttggcctgctgctctcgctgacaataaagagcccttgcgttgcaaaaacaaacaaaagaaaaaaaaaaaaaaaaaaaaaaacaaggggggggccggcaaaaaaattcccccgggggggcgccacaagtcatcgcgcctcgcacccaggtttgtcggtgaaccaagngggggcgccccatattaggggcgacgcgcagatgtatagacgccacagcggcacagggcggacgggatgtaacacacgggcgcaactgggggaaaccccgggcgcaccggggaactctggggggagagagcccataactccgggggggggcgacctt

SEQ ID NO: 350734 - DNA, 1611 bp, Homo sapiens
aacgagctttggcgcccggtctcattcgttcccagcaggccctgcgcgcggcaacatggcggggtccaggtggaggtcttgaggctatcagatcggtatggcattggcgtccgggcccgcaaggcgggcgctagctggctccgggcagctcggccttgggggcttcggggccccgagacgcggggcgtatgagtggggcgtgcgctccacgcggaagtcggagcctcctcccctggatagggtgtacgagatccctggactggagcccatcacctttgcggggaagatgcacttcgtgccctggctggcgcggccgatctttccgccctgggaccgcggctacaaggacccaaggttctaccgctcgccccctcttcacgagcatccgctgtacaaagaccaggcctgctatatctttcaccaccgttgccgccttctcgagggtgtaaagcaggccctctggctcaccaagaccaagttaatagaaggccttcccgagaaagtgcttagccttgttgatgatccaaggaaccacatagagaaccaagacgagtgcgttctgaatgtgatctctcacgcccgtctctggcagaccactgaggaaatccccaagagagagacctactgcccggtcatcgtggacaacctaatacagctgtgtaaatctcagattctcaagcatccttctctggccaggaggatctgtgtccaaaactccacgttttctgctacctggaaccgagagtctcttctccttcaagtccgtggttctggtggagcccgactgagcactaaggatcctctgcccaccatcgcctccagagaggagattgaagctactaagaatcatgttctagagaccttctaccccatatcacccatcatcgatcttcatgaatgcaatatttatgatgtgaaaaatgacacaggattccaggaaggctatccttacccctatccccataccctgtacttactggacaaagccaatttacgaccacaccgccttcaaccagatcagctgcgggccaagatgatcctgtttgcttttggcagtgccctggctcaggcccggctcctctatgggaatgatgccaaggtcttggagcagcccgtggtggtgcagagcgtgggcacggatggacgtgtcttccatttcctagtgtttcaactgaataccacagacctggactctaacgagggtgtcaagaatttggcctgggtggactcagaccagctcctctatcagcatttttggtgtctcccagtgatcaaaaagagagtggttgtgacaggtccttgcttctccaaatcccaaatgtctaccagcttcgtcctcactccctcattcaacgcaggagaggaagtgatgcagcggaacttgagggcctcagccagcctcccgcccagtacaggctccccagccagtgagctggtgaaggagcaggagcacgctgcagggagagtgctgcgccgggtcatgctggatagcgaaaccccacgagaggaacttccagcagcagacttttggaaatgaaatggtgacattcccattgtgaacgtatttctcactgtctcatatatttaaattcctggttgttccattcaaaa

SEQ ID NO: 350735 - DNA, 1340 bp, Homo sapiens
aacgagctttggcgcccggtctcattcgttcccagcaggccctgcgcgcggcaacatggcggggtccaggtggaggtcttgaggctatcagatcggtatggcattggcgtccgggcccgcaaggcgggcgctagctggctccgggcagctcggccttgggggcttcggggccccgagacgcggggcgtatgagtggggcgtgcgctccacgcggaagtcggagcctcctcccctggatagggtgtacgagatccctggactggagcccatcacctttgcggggaagatgcacttcgtgccctggctggcgcggccgatctttccgccctgggaccgcggctacaaggacccaaggttctaccgctcgccccctcttcacgagcatccgctgtacaaagaccaggcctgctatatctttcaccaccgttgccgccttctcgagggtgtaaagcaggccctctggctcaccaagaccaagttaatagaaggccttcccgagaaagtgcttagccttgttgatgatccaaggaaccacatagagaaccaagacgagtgcgttctgaatgtgatctctcacgcccgtctctggcagaccactgaggaaatccccaagagagagacctactgcccggtcatcgtggacaacctaatacagctgtgtaaatctcagattctcaagcatccttctctggccaggaggatctgtgtccaaaactccacgttttctgctacctggaaccgagagtctcttctccttcaagtccgtggttctggtggagcccgactgagcactaaggatcctctgcccaccatcgcctccagagaggagattgaagctactaagaatcatgttctagagaccttctaccccatatcacccatcatcgatcttcatgaatgcaatatttatgatgtgaaaaatgacacagaatgatgccaaggtcttggagcagcccgtggtggtgcagagcgtgggcacggatggacgtgtcttccatttcctagtgtttcaactgaataccacagacctggactctaacgagggtgtcaagaatttggcctgggtggactcagaccagctcctctatcagcatttttggtgtctcccagtgatcaaaaagagagtggttgtggaacctgttggcccagttggtttcaagccagagacattcagaaagtttttagctctatatttgcatggtgctgcgtgagcggaggacccctctgaatcctgaaacccctcttgcctctcttccacggaagagggcctgggccccgtggagcctcagtgcccgtttggcctgctgctctcgctgacaataaagagcccttgcgttgca

SEQ ID NO: 350736 - DNA, 1146 bp, Homo sapiens
aacgagctttggcgcccggtctcattcgttcccagcaggccctgcgcgcggcaacatggcggggtccaggtggaggtcttgaggctatcagatcggtatggcattggcgtccgggcccgcaaggcgggcgctagctggctccgggcagctcggccttgggggcttcggggccccgagacgcggggcgtatgagtggggcgtgcgctccacgcggaagtcggagcctcctcccctggatagggtgtacgagatccctggactggagcccatcacctttgcggggaagatgcacttcgtgccctggctggcgcggccgatctttccgccctgggaccgcggctacaaggacccaaggttctaccgctcgccccctcttcacgagcatccgctgtacaaagaccaggcctgctatatctttcaccaccgttgccgccttctcgagggtgtaaagcaggccctctggctcaccaagaccaagttaatagaaggccttcccgagaaagtgcttagccttgttgatgatccaaggaaccacatagagaaccaagacgagtgcgttctgaatgtgatctctcacgcccgtctctggcagaccactgaggaaatccccaagagagagacctactgcccggtcatcgtggacaacctaatacagctgtgtaaatctcagattctcaagcatccttctctggccaggaggatctgtgtccaaaactccacgttttctgctacctggaaccgagagtctcttctccttcaagtccgtggttctggtggagcccgactgagcactaaggatcctctgcccaccatcgcctccagagaggagattgaagctactaagaatcatgttctagagaccttctaccccatatcacccatcatcgatcttcatgaatgcaatatttatgatgtgaaaaatgacacagattccaggaaggctatccttacccctactccccaataaagctaaaactcacctgagttgtaaaaaactccagttgacacaaaatagactacgaaagtggctttaacatatctgaacacacaatagctaagacccaaactgggattagataccccactatgcttagccctaaacctcaacagttaaatcaacaaactgctcgccatgatccacatact

SEQ ID NO: 350737 - DNA, 1269 bp, Homo sapiens
  misc_feature (14)..(14): n is a, c, g, or t
  misc_feature (25)..(25): n is a, c, g, or t
gagattgtggtagntctagaggatncctacttttccacagggcactttgcggggaagatgcacttcgtgccctggctggcgcggccgatctttccgccctgggaccgcggctacaaggacccaaggttctaccgctcgccccctcttcacgagcatccgctgtacaaagaccaggcctgctatatctttcaccaccgttgccgccttctcgagggtgtaaagcaggccctctggctcaccaagaccaagttaatagaaggccttcccgagaaagtgcttagccttgttgatgatccaaggaaccacatagagaaccaagacgagtgcgttctgaatgtgatctctcacgcccgtctctggcagaccactgaggaaatccccaagagagagacctactgcccggtcatcgtggacaacctaatacagctgtgtaaatctcagattctcaagcatccttctctggccaggaggatctgtgtccaaaactccacgttttctgctacctggaaccgagagtctcttctccttcaagtccgtggttctggtggagcccgactgagcactaaggatcctctgcccaccatcgcctccagagaggagattgaagctactaagaatcatgttctagagaccttctaccccatatcacccatcatcgatcttcatgaatgcaatatttatgatgtgaaaaatgacacaggattccaggaaggctatccttacccctatccccataccctgtacttactggacaaagccaatttacgaccacaccgccttcaaccagatcagctgcgggccaagatgatcctgtttgcttttggcagtgccctggctcaggcccggctcctctatgggaatgatgccaaggtcttggagcagcccgtggtggtgcagagcgtgggcacggatggacgtgtcttccatttcctagtgtttcaactgaataccacagacctggactctaacgagggtgtcaagaatttggcctgggtggactcagaccagctcctctatcagcatttttggtgtctcccagtgatcaaaaagagagtggttgtggaacctgttggcccagttggtttcaagccagagacattcagaaagtttttagctctatatttgcatggtgctgcgtgagcggaggacccctctgaatcctgaaacccctcttgcctctcttccacggaagagggcctgggccccgtggagcctcagtgcccgtttggcctgctgctctcgctgacaataaagagcccttgcgttgca

SEQ ID NO: 350738 - DNA, 1202 bp, Homo sapiens
ctatccaggggaggaggctccgacttccgccctgggaccgcggctacaaggacccaaggttctaccgctcgccccctcttcacgagcatccgctgtacaaagaccaggcctgctatatctttcaccaccgttgccgccttctcgagggtgtaaagcaggccctctggctcaccaagaccaagttaatagaaggccttcccgagaaagtgcttagccttgttgatgatccaaggaaccacatagagaaccaagacgagtgcgttctgaatgtgatctctcacgcccgtctctggcagaccactgaggaaatccccaagagagagacctactgcccggtcatcgtggacaacctaatacagctgtgtaaatctcagattctcaagcatccttctctggccaggaggatctgtgtccaaaactccacgttttctgctacctggaaccgagagtctcttctccttcaagtccgtggttctggtggagcccgactgagcactaaggatcctctgcccaccatcgcctccagagaggagattgaagctactaagaatcatgttctagagaccttctaccccatatcacccatcatcgatcttcatgaatgcaatatttatgatgtgaaaaatgacacaggattccaggaaggctatccttacccctatccccataccctgtacttactggacaaagccaatttacgaccacaccgccttcaaccagatcagctgcgggccaagatgatcctgtttgcttttggcagtgccctggctcaggcccggctcctctatgggaatgatgccaaggtcttggagcagcccgtggtggtgcagagcgtgggcacggatggacgtgtcttccatttcctagtgtttcaactgaataccacagacctggactctaacgagggtgtcaagaatttggcctgggtggactcagaccagctcctctatcagcatttttggtgtctcccagtgatcaaaaagagagtggttgtggaacctgttggcccagttggtttcaagccagagacattcagaaagtttttagctctatatttgcatggtgctgcgtgagcggaggacccctctgaatcctgaaacccctcttgcctctcttccacggaagagggcctgggccccgtggagcctcagtgcccgtttggcctgctgctctcgctgacaataaagagcccttgcgttgca

SEQ ID NO: 350739 - DNA, 1414 bp, Homo sapiens
  misc_feature (14)..(14): n is a, c, g, or t
  misc_feature (25)..(25): n is a, c, g, or t
gagattgtggtagntctagaggatncctacttttccacagggcactttgcggggaagatgcacttcgtgccctggctggcgcggccgatctttccgccctgggaccgcggctacaaggacccaaggttctaccgctcgccccctcttcacgagcatccgctgtacaaagaccaggcctgctatatctttcaccaccgttgccgccttctcgagggtgtaaagcaggccctctggctcaccaagaccaagttaatagaaggccttcccgagaaagtgcttagccttgttgatgatccaaggaaccacatagagaaccaagacgagtgcgttctgaatgtgatctctcacgcccgtctctggcagaccactgaggaaatccccaagagagagacctactgcccggtcatcgtggacaacctaatacagctgtgtaaatctcagattctcaagcatccttctctggccaggaggatctgtgtccaaaactccacgttttctgctacctggaaccgaggcagggatgttcagagaacacaggtgttctaactggtggaatcctggagcaggaaaaccagctacggaatgatctgggatttcaggacatctgcttggtcaggatttgtgtatagacttcctggcaatgagtcagctttgcagagagtctcttctccttcaagtccgtggttctggtggagcccgactgagcactaaggatcctctgcccaccatcgcctccagagaggagattgaagctactaagaatcatgttctagagaccttctaccccatatcacccatcatcgatcttcatgaatgcaatatttatgatgtgaaaaatgacacaggattccaggaaggctatccttacccctatccccataccctgtacttactggacaaagccaatttacgaccacaccgccttcaaccagatcagctgcgggccaagatgatcctgtttgcttttggcagtgccctggctcaggcccggctcctctatgggaatgatgccaaggtcttggagcagcccgtggtggtgcagagcgtgggcacggatggacgtgtcttccatttcctagtgtttcaactgaataccacagacctggactctaacgagggtgtcaagaatttggcctgggtggactcagaccagctcctctatcagcatttttggtgtctcccagtgatcaaaaagagagtggttgtggaacctgttggcccagttggtttcaagccagagacattcagaaagtttttagctctatatttgcatggtgctgcgtgagcggaggacccctctgaatcctgaaacccctcttgcctctcttccacggaagagggcctgggccccgtggagcctcagtgcccgtttggcctgctgctctcgctgacaataaagagcccttgcgttgca

SEQ ID NO: 350740 - DNA, 941 bp, Homo sapiens
aacatggcggggtccaggtggaggtcttgaggctatcagatcgggtgtaaagcaggccctctggctcaccaagaccaagttaatagaaggccttcccgagaaagtgcttagccttgttgatgatccaaggaaccacatagagaaccaagacgagtgcgttctgaatgtgatctctcacgcccgtctctggcagaccactgaggaaatccccaagagagagacctactgcccggtcatcgtggacaacctaatacagctgtgtaaatctcagattctcaagcatccttctctggccaggaggatctgtgtccaaaactccacgttttctgctacctggaaccgagagtctcttctccttcaagtccgtggttctggtggagcccgactgagcactaaggatcctctgcccaccatcgcctccagagaggagattgaagctactaagaatcatgttctagagaccttctaccccatatcacccatcatcgatcttcatgaatgcaatatttatgatgtgaaaaatgacacagaatgatgccaaggtcttggagcagcccgtggtggtgcagagcgtgggcacggatggacgtgtcttccatttcctagtgtttcaactgaataccacagacctggactctaacgagggtgtcaagaatttggcctgggtggactcagaccagctcctctatcagcatttttggtgtctcccagtgatcaaaaagagagtggttgtggaacctgttggcccagttggtttcaagccagagacattcagaaagtttttagctctatatttgcatggtgctgcgtgagcggaggacccctctgaatcctgaaacccctcttgcctctcttccacggaagagggcctgggccccgtggagcctcagtgcccgtttggcctgctgctctcgctgacaataaagagcccttgcgttgca

SEQ ID NO: 350741 - DNA, 462 bp, Homo sapiens
caggtcagcgggtgtatcggacgaggagcaggccctgcgcgcggcaacatggcggggtccaggtggaggtcttgaggctatcagatcggtatggcattggcgtccgggcccgcaaggcgggcgctagctggctccgggcagctcggccttgggggcttcggggccccgagacgcggggcgtatgagtggggcgtgcgctccacgcggaagtcggagcctcctcccctggatagggtgtacgagatccctggactggagcccatcacctttgcggggaagatgcacttcgtgccctggctggcgcggccgatctttccgccctgggaccgcggctacaaggacccctctgaatcctgaaacccctcttgcctctcttccacggaagagggcctgggccccgtggagcctcagtgcccgtttggcctgctgctctcgctgacaataaagagcccttgcgttgca

SEQ ID NO: 350742 - DNA, 281 bp, Homo sapiens
cgcggccgatctttccgccctgggaccgcggctacaaggacccaaggttctaccgctcgccccctcttcacgagcatccgctgtacaaagaccaggcctgctatatctttcaccaccgttgccgccttctcgagggtgaggccccaggacgggcggcaagggaccgtgttcctctaaccagcaccgaccccgaccctctgtggctttgggcaagacattgaaaccctgtggggcttggttttaaagcaggccctctggctcaccaagaccaagttaataga

SEQ ID NO: 350743 - DNA, 1491 bp, Homo sapiens
caggtcagcgggtgtatcggacgaggagcaggccctgcgcgcggcaacatggcggggtccaggtggaggtcttgaggctatcagatcggtatggcattggcgtccgggcccgcaaggcgggcgctagctggctccgggcagctcggccttgggggcttcggggccccgagacgcggggcgtatgagtggggcgtgcgctccacgcggaagtcggagcctcctcccctggatagggtgtacgagatccctggactggagcccatcacctttgcggggaagatgcacttcgtgccctggctggcgcggccgatctttccgccctgggaccgcggctacaaggacccaaggttctaccgctcgccccctcttcacgagcatccgctgtacaaagaccaggcctgctatatctttcaccaccgttgccgccttctcgagggtgtaaagcaggccctctggctcaccaagaccaagttaatagaaggccttcccgagaaagtgcttagccttgttgatgatccaaggaaccacatagagaaccaagacgagtgcgttctgaatgtgatctctcacgcccgtctctggcagaccactgaggaaatccccaagagagagacctactgcccggtcatcgtggacaacctaatacagctgtgtaaatctcagattctcaagcatccttctctggccaggaggatctgtgtccaaaactccacgttttctgctacctggaaccgagagtctcttctccttcaagtccgtggttctggtggagcccgactgagcactaaggatcctctgcccaccatcgcctccagagaggagattgaagctactaagaatcatgttctagagaccttctaccccatatcacccatcatcgatcttcatgaatgcaatatttatgatgtgaaaaatgacacaggattccaggaaggctatccttacccctatccccataccctgtacttactggacaaagccaatttacgaccacaccgccttcaaccagatcagctgcgggccaagatgatcctgtttgcttttggcagtgccctggctcaggcccggctcctctatgggaatgatgccaaggtcttggagcagcccgtggtggtgcagagcgtgggcacggatggacgtgtcttccatttcctagtgtttcaactgaataccacagacctggactctaacgagggtgtcaagaatttggcctgggtggactcagaccagctcctctatcagcatttttggtgtctcccagtgatcaaaaagagagtggttgtggaacctgttggcccagttggtttcaagccagagacattcagaaagtttttagctctatatttgcatggtgctgcgtgagcggaggacccctctgaatcctgaaacccctcttgcctctcttccacggaagagggcctgggccccgtggagcctcagtgcccgtttggcctgctgctctcgctgacaataaagagcccttgcgttgca

SEQ ID NO: 350744 - DNA, 1580 bp, Homo sapiens
aacgagctttggcgcccggtctcattcgttcccagcaggccctgcgcgcggcaacatggcggggtccaggtggaggtcttgaggctatcagatcggtatggcattggcgtccgggcccgcaaggcgggcgctagctggctccgggcagctcggccttgggggcttcggggccccgagacgcggggcgtatgagtggggcgtgcgctccacgcggaagtcggagcctcctcccctggatagggtgtacgagatccctggactggagcccatcacctttgcggggaagatgcacttcgtgccctggctggcgcggccgatctttccgccctgggaccgcggctacaaggacccaaggttctaccgctcgccccctcttcacgagcatccgctgtacaaagaccaggcctgctatatctttcaccaccgttgccgccttctcgagggtgtaaagcaggccctctggctcaccaagaccaagttaatagaaggccttcccgagaaagtgcttagccttgttgatgatccaaggaaccacatagagaaccaagacgagtgcgttctgaatgtgatctctcacgcccgtctctggcagaccactgaggaaatccccaagagagagacctactgcccggtcatcgtggacaacctaatacagctgtgtaaatctcagattctcaagcatccttctctggccaggaggatctgtgtccaaaactccacgttttctgctacctggaaccgagagtctcttctccttcaagtccgtggttctggtggagcccgactgagcactaaggatcctctgcccaccatcgcctccagagaggagattgaagctactaagaatcatgttctagagaccttctaccccatatcacccatcatcgatcttcatgaatgcaatatttatgatgtgaaaaatgacacaggattccaggaaggctatccttacccctatccccataccctgtacttactggacaaagccaatttacgaccacaccgccttcaaccagatcagctgcgggccaagatgatcctgtttgcttttggcagtgccctggctcaggcccggctcctctatgggaatgatgccaaggtcttggagcagcccgtggtggtgcagagcgtgggcacggatggacgtgtcttccatttcctagtgtttcaactgaataccacagacctggactctaacgagggtgtcaagaatttggcctgggtggactcagaccagctcctctatcagcatttttggtgtctcccagtgatcaaaaagagagtggttgtggaacctgttggcccagttggtttcaagccagagacattcagaaagtttttagctctatatttgcatggtgctgcgtgagcggaggacccctctgaatcctgaaacccctcttgcctctcttccacggaagagggcctgggccccgtggagcctcagtgcccgtttggcctgctgctctcgctgacaataaagagcccttgcgttgcaaaaaaaaaaaccgggtctttcggggcgggaaggagaaggcctggttggtccgcccttgaagggaaccggccagaggtaaagc

SEQ ID NO: 350745 - DNA, 2142 bp, Homo sapiens
aacgagctttggcgcccggtctcattcgttcccagcaggccctgcgcgcggcaacatggcggggtccaggtggaggtcttgaggctatcagatcggtatggcattggcgtccgggcccgcaaggcgggcgctagctggctccgggcagctcggccttgggggcttcggggccccgagacgcggggcgtatgagtggggcgtgcgctccacgcggaagtcggagcctcctcccctggatagggtgtacgagatccctggactggagcccatcacctttgcggggaagatgcacttcgtgccctggctggcgcggccgatctttccgccctgggaccgcggctacaaggacccaaggttctaccgctcgccccctcttcacgagcatccgctgtacaaagaccaggcctgctatatctttcaccaccgttgccgccttctcgagggtgtaaagcaggccctctggctcaccaagaccaagttaatagaaggccttcccgagaaagtgcttagccttgttgatgatccaaggaaccacatagagaaccaagacgagtgcgttctgaatgtgatctctcacgcccgtctctggcagaccactgaggaaatccccaagagagagacctactgcccggtcatcgtggacaacctaatacagctgtgtaaatctcagattctcaagcatccttctctggccaggaggatctgtgtccaaaactccacgttttctgctacctggaaccgagagtctcttctccttcaagtccgtggttctggtggagcccgactgagcactaaggatcctctgcccaccatcgcctccagagaggagattgaagctactaagaatcatgttctagagaccttctaccccatatcacccatcatcgatcttcatgaatgcaatatttatgatgtgaaaaatgacacaggattccaggaaggctatccttacccctatccccataccctgtacttactggacaaagccaatttacgaccacaccgccttcaaccagatcagctgcgggccaagatgatcctgtttgcttttggcagtgccctggctcaggcccggctcctctatgggaatgatgccaaggtcttggagcagcccgtggtggtgcagagcgtgggcacggatggacgtgtcttccatttcctagtgtttcaactgaataccacagacctggactctaacgagggtgtcaagaatttggcctgggtggactcagaccagctcctctatcagcatttttggtgtctcccagtgatcaaaaagagagtggttgtgaaaaataaaagacattccagcggaccaaaatgtgtttgcaagacaagaaatggaaaatggcttttagacggcccccaaatatttaaagtgagatggataccttccctcccaacccaccttccgccaaggccatcgcgactccacaagaacacagaatttgcaggcccaggaaaagaaggcagacgcctcaaacacaaaacatcttgttatgcaccaggaacaaaaactgtgcccaagaagtcaccttgcattttgtaatcagtgtaataaactccaacccacattccccaaacatgtcaggaagggctgcggaaaaaagatgtccctttaataaaacgttatcaacatatatcgtacacaaactacaatgtatcataattacttttttttcctctcttaattcagaaccagactacaaggtaagaaaaaacacagaaacagctacaatgttcccaataatccgcacaaagtcttttttcaggcagatgatatctcacataatatgatatacatggatcagaaagggagggagtaaaacaaagaccagctacaggggagggaggaaggagaagggcatgtcaatgtacaaagaattcgggtgtcttccagggcaagacacaaaggtttccgtggggtgatgaggtgagtggggccatgagcaccctcccgggaggggacaggctccactgtcgggcttgttggtttttgaaagtaaaaacaggactggagccagcacgtctgtttggttgtcggtgtccccccaccccccacagctgctccaaagtctttccatccagtcccaagcatatacagagcaattctgatcagtatcccatctttgagaaaggacg

SEQ ID NO: 350746 - DNA, 1458 bp, Homo sapiens
agggcgtatcggatatcgtcgacccacggcgctcggtcttgaggctatcagatcggtatggcattggcgtccgggcccgcaaggcgggcgctagctggctccgggcagctcggccttgggggcttcggggccccgagacgcggggcgtatgagtggggcgtgcgctccacgcggaagtcggagcctcctcccctggatagggtgtacgagatccctggactggagcccatcacctttgcggggaagatgcacttcgtgccctggctggcgcggccgatctttccgccctgggaccgcggctacaaggacccaaggttctaccgctcgccccctcttcacgagcatccgctgtacaaagaccaggcctgctatatctttcaccaccgttgccgccttctcgagggtgtaaagcaggccctctggctcaccaagaccaagttaatagaaggccttcccgagaaagtgcttagccttgttgatgatccaaggaaccacatagagaaccaagacgagtgcgttctgaatgtgatctctcacgcccgtctctggcagaccactgaggaaatccccaagagagagacctactgcccggtcatcgtggacaacctaatacagctgtgtaaatctcagattctcaagcatccttctctggccaggaggatctgtgtccaaaactccacgttttctgctacctggaaccgagagtctcttctccttcaagtccgtggttctggtggagcccgactgagcactaaggatcctctgcccaccatcgcctccagagaggagattgaagctactaagaatcatgttctagagaccttctaccccatatcacccatcatcgatcttcatgaatgcaatatttatgatgtgaaaaatgacacaggattccaggaaggctatccttacccctatccccataccctgtacttactggacaaagccaatttacgaccacaccgccttcaaccagatcagctgcgggccaagatgatcctgtttgcttttggcagtgccctggctcaggcccggctcctctatgggaatgatgccaaggtcttggagcagcccgtggtggtgcagagcgtgggcacggatggacgtgtcttccatttcctagtgtttcaactgaataccacagacctggactctaacgagggtgtcaagaatttggcctgggtggactcagaccagctcctctatcagcatttttggtgtctcccagtgatcaaaaagagagtggttgtggaacctgttggcccagttggtttcaagccagagacattcagaaagtttttagctctatatttgcatggtgctgcgtgagcggaggacccctctgaatcctgaaacccctcttgcctctcttccacggaagagggcctgggccccgtggagcctcagtgcccgtttggcctgctgctctcgctgacaataaagagcccttgcgttgca

SEQ ID NO: 350747 - DNA, 1448 bp, Homo sapiens
acttaggctaggtcgaggctgggttctcttgaggctatcagatcggtatggcattggcgtccgggcccgcaaggcgggcgctagctggctccgggcagctcggccttgggggcttcggggccccgagacgcggggcgtatgagtggggcgtgcgctccacgcggaagtcggagcctcctcccctggatagggtgtacgagatccctggactggagcccatcacctttgcggggaagatgcacttcgtgccctggctggcgcggccgatctttccgccctgggaccgcggctacaaggacccaaggttctaccgctcgccccctcttcacgagcatccgctgtacaaagaccaggcctgctatatctttcaccaccgttgccgccttctcgagggtgtaaagcaggccctctggctcaccaagaccaagttaatagaaggccttcccgagaaagtgcttagccttgttgatgatccaaggaaccacatagagaaccaagacgagtgcgttctgaatgtgatctctcacgcccgtctctggcagaccactgaggaaatccccaagagagagacctactgcccggtcatcgtggacaacctaatacagctgtgtaaatctcagattctcaagcatccttctctggccaggaggatctgtgtccaaaactccacgttttctgctacctggaaccgagagtctcttctccttcaagtccgtggttctggtggagcccgactgagcactaaggatcctctgcccaccatcgcctccagagaggagattgaagctactaagaatcatgttctagagaccttctaccccatatcacccatcatcgatcttcatgaatgcaatatttatgatgtgaaaaatgacacaggattccaggaaggctatccttacccctatccccataccctgtacttactggacaaagccaatttacgaccacaccgccttcaaccagatcagctgcgggccaagatgatcctgtttgcttttggcagtgccctggctcaggcccggctcctctatgggaatgatgccaaggtcttggagcagcccgtggtggtgcagagcgtgggcacggatggacgtgtcttccatttcctagtgtttcaactgaataccacagacctggactctaacgagggtgtcaagaatttggcctgggtggactcagaccagctcctctatcagcatttttggtgtctcccagtgatcaaaaagagagtggttgtggaacctgttggcccagttggtttcaagccagagacattcagaaagtttttagctctatatttgcatggtgctgcgtgagcggaggacccctctgaatcctgaaacccctcttgcctctcttccacggaagagggcctgggccccgtggagcctcagtgcccgtttggcctgctgctctcgctgacaataaagagcccttgcgttgca

SEQ ID NO: 350748 - DNA, 1170 bp, Homo sapiens
aacgagctttggcgcccggtctcattcgttcccagcaggccctgcgcgcggcaacatggcggggtccaggtggaggtcttgaggctatcagatcggtatggcattggcgtccgggcccgcaaggcgggcgctagctggctccgggcagctcggccttgggggcttcggggccccgagacgcggggcgtatgagtggggcgtgcgctccacgcggaagtcggagcctcctcccctggatagggtgtacgagatccctggactggagcccatcacctttgcggggaagatgcacttcgtgccctggctggcgcggccgatctttccgccctgggaccgcggctacaaggacccaaggttctaccgctcgccccctcttcacgagcatccgctgtacaaagaccaggcctgctatatctttcaccaccgttgccgccttctcgagggtgtaaagcaggccctctggctcaccaagaccaagttaatagaaggccttcccgagaaagtgcttagccttgttgatgatccaaggaaccacatagagaaccaagacgagtgcgttctgaatgtgatctctcacgcccgtctctggcagaccactgaggaaatccccaagagagagacctactgcccggtcatcgtggacaacctaatacagctgtgtaaatctcagattctcaagcatccttctctggccaggaggatctgtgtccaaaactccacgttttctgctacctggaaccgagagtctcttctccttcaagtccgtggttctggtggagcccgactgagcactaaggatcctctgcccaccatcgcctccagagaggagattgaagctactaagaatcatgttctagagaccttctaccccatatcacccatcatcgatcttcatgaatgcaatatttatgatgtgaaaaatgacacaggattccaggaaggctatccttacccctatccccataccctgtacttactggacaaagccaatttacgaccacaccgccttcaaccagatcagctgcgggccaagatgatcctgtttgcttttggcagtgccctggctcaggcccggctcctctatgggatgatgcaagtcttggaggcagccgggtggtgcagacgtgggcggatggcggtctcatttctagtgttaacgatacaagacgg

SEQ ID NO: 350749 - DNA, 1450 bp, Homo sapiens
aaaggctaaatcagatcgggtagtgggcattgggcggtcccggggtccacggcaaaggggcggggggccgcaatagacgttgtgcttccccgggcccatgctcggccttgggggcttcggggccccgagacgcggggcgtatgagtggggcgtgcgctccacgcggaagtcggagcctcctcccctggatagggtgtacgagatccctggactggagcccatcacctttgcggggaagatgcacttcgtgccctggctggcgcggccgatctttccgccctgggaccgcggctacaaggacccaaggttctaccgctcgccccctcttcacgagcatccgctgtacaaagaccaggcctgctatatctttcaccaccgttgccgccttctcgagggtgtaaagcaggccctctggctcaccaagaccaagttaatagaaggccttcccgagaaagtgcttagccttgttgatgatccaaggaaccacatagagaaccaagacgagtgcgttctgaatgtgatctctcacgcccgtctctggcagaccactgaggaaatccccaagagagagacctactgcccggtcatcgtggacaacctaatacagctgtgtaaatctcagattctcaagcatccttctctggccaggaggatctgtgtccaaaactccacgttttctgctacctggaaccgagagtctcttctccttcaagtccgtggttctggtggagcccgactgagcactaaggatcctctgcccaccatcgcctccagagaggagattgaagctactaagaatcatgttctagagaccttctaccccatatcacccatcatcgatcttcatgaatgcaatatttatgatgtgaaaaatgacacaggattccaggaaggctatccttacccctatccccataccctgtacttactggacaaagccaatttacgaccacaccgccttcaaccagatcagctgcgggccaagatgatcctgtttgcttttggcagtgccctggctcaggcccggctcctctatgggaatgatgccaaggtcttggagcagcccgtggtggtgcagagcgtgggcacggatggacgtgtcttccatttcctagtgtttcaactgaataccacagacctggactctaacgagggtgtcaagaatttggcctgggtggactcagaccagctcctctatcagcatttttggtgtctcccagtgatcaaaaagagagtggttgtggaacctgttggcccagttggtttcaagccagagacattcagaaagtttttagctctatatttgcatggtgctgcgtgagcggaggacccctctgaatcctgaaacccctcttgcctctcttccacggaagagggcctgggccccgtggagcctcagtgcccgtttggcctgctgctctcgctgacaataaagagcccttgcgttgca

SEQ ID NO: 350750 - DNA, 1099 bp, Homo sapiens
aacatggcggggtccaggtggaggtcttgaggctatcagatcgggtgtaaagcaggccctctggctcaccaagaccaagttaatagaaggccttcccgagaaagtgcttagccttgttgatgatccaaggaaccacatagagaaccaagacgagtgcgttctgaatgtgatctctcacgcccgtctctggcagaccactgaggaaatccccaagagagagacctactgcccggtcatcgtggacaacctaatacagctgtgtaaatctcagattctcaagcatccttctctggccaggaggatctgtgtccaaaactccacgttttctgctacctggaaccgagagtctcttctccttcaagtccgtggttctggtggagcccgactgagcactaaggatcctctgcccaccatcgcctccagagaggagattgaagctactaagaatcatgttctagagaccttctaccccatatcacccatcatcgatcttcatgaatgcaatatttatgatgtgaaaaatgacacaggattccaggaaggctatccttacccctatccccataccctgtacttactggacaaagccaatttacgaccacaccgccttcaaccagatcagctgcgggccaagatgatcctgtttgcttttggcagtgccctggctcaggcccggctcctctatgggaatgatgccaaggtcttggagcagcccgtggtggtgcagagcgtgggcacggatggacgtgtcttccatttcctagtgtttcaactgaataccacagacctggactctaacgagggtgtcaagaatttggcctgggtggactcagaccagctcctctatcagcatttttggtgtctcccagtgatcaaaaagagagtggttgtggaacctgttggcccagttggtttcaagccagagacattcagaaagtttttagctctatatttgcatggtgctgcgtgagcggaggacccctctgaatcctgaaacccctcttgcctctcttccacggaagagggcctgggccccgtggagcctcagtgcccgtttggcctgctgctctcgctgacaataaagagcccttgcgttgca

SEQ ID NO: 350751 - DNA, 1244 bp, Homo sapiens
aacatggcggggtccaggtggaggtcttgaggctatcagatcgggtgtaaagcaggccctctggctcaccaagaccaagttaatagaaggccttcccgagaaagtgcttagccttgttgatgatccaaggaaccacatagagaaccaagacgagtgcgttctgaatgtgatctctcacgcccgtctctggcagaccactgaggaaatccccaagagagagacctactgcccggtcatcgtggacaacctaatacagctgtgtaaatctcagattctcaagcatccttctctggccaggaggatctgtgtccaaaactccacgttttctgctacctggaaccgaggcagggatgttcagagaacacaggtgttctaactggtggaatcctggagcaggaaaaccagctacggaatgatctgggatttcaggacatctgcttggtcaggatttgtgtatagacttcctggcaatgagtcagctttgcagagagtctcttctccttcaagtccgtggttctggtggagcccgactgagcactaaggatcctctgcccaccatcgcctccagagaggagattgaagctactaagaatcatgttctagagaccttctaccccatatcacccatcatcgatcttcatgaatgcaatatttatgatgtgaaaaatgacacaggattccaggaaggctatccttacccctatccccataccctgtacttactggacaaagccaatttacgaccacaccgccttcaaccagatcagctgcgggccaagatgatcctgtttgcttttggcagtgccctggctcaggcccggctcctctatgggaatgatgccaaggtcttggagcagcccgtggtggtgcagagcgtgggcacggatggacgtgtcttccatttcctagtgtttcaactgaataccacagacctggactctaacgagggtgtcaagaatttggcctgggtggactcagaccagctcctctatcagcatttttggtgtctcccagtgatcaaaaagagagtggttgtggaacctgttggcccagttggtttcaagccagagacattcagaaagtttttagctctatatttgcatggtgctgcgtgagcggaggacccctctgaatcctgaaacccctcttgcctctcttccacggaagagggcctgggccccgtggagcctcagtgcccgtttggcctgctgctctcgctgacaataaagagcccttgcgttgca

SEQ ID NO: 350752 - DNA, 909 bp, Homo sapiens
acgcgtgggtcgacccacgcgtgcggagagacctactgcccggtcatcgtggacaacctaatacagctgtgtaaatctcagattctcaagcatccttctctggccaggaggatctgtgtccaaaactccacgttttctgctacctggaaccgagagtctcttctccttcaagtccgtggttctggtggagcccgactgagcactaaggatcctctgcccaccatcgcctccagagaggagattgaagctactaagaatcatgttctagagaccttctaccccatatcacccatcatcgatcttcatgaatgcaatatttatgatgtgaaaaatgacacaggattccaggaaggctatccttacccctatccccataccctgtacttactggacaaagccaatttacgaccacaccgccttcaaccagatcagctgcgggccaagatgatcctgtttgcttttggcagtgccctggctcaggcccggctcctctatgggaatgatgccaaggtcttggagcagcccgtggtggtgcagagcgtgggcacggatggacgtgtcttccatttcctagtgtttcaactgaataccacagacctggactctaacgagggtgtcaagaatttggcctgggtggactcagaccagctcctctatcagcatttttggtgtctcccagtgatcaaaaagagagtggttgtggaacctgttggcccagttggtttcaagccagagacattcagaaagtttttagctctatatttgcatggtgctgcgtgagcggaggacccctctgaatcctgaaacccctcttgcctctcttccacggaagagggcctgggccccgtggagcctcagtgcccgtttggcctgctgctctcgctgacaataaagagcccttgcgttgca

SEQ ID NO: 350753 - DNA, 917 bp, Homo sapiens
  misc_feature (14)..(14): n is a, c, g, or t
  misc_feature (25)..(25): n is a, c, g, or t
gagattgtggtagntctagaggatncctacttttccacagggcactttgcggggaagatgcacttcgtgccctggctggcgcggccgatctttccgccctgggaccgcggctacaaggacccaaggttctaccgctcgccccctcttcacgagcatccgctgtacaaagaccaggcctgctatatctttcaccaccgttgccgccttctcgagggtgtaaagcaggccctctggctcaccaagaccaagttaatagaaggccttcccgagaaagtgcttagccttgttgatgatccaaggaaccacatagagaaccaagacgagtgcgttctgaatgtgatctctcacgcccgtctctggcagaccactgaggaaatccccaagagagagacctactgcccggtcatcgtggacaacctaatacagctgtgtaaatctcagattctcaagcatccttctctggccaggaggatctgtgtccaaaactccacgttttctgctacctggaaccgagagtctcttctccttcaagtccgtggttctggtggagcccgactgagcactaaggatcctctgcccaccatcgcctccagagaggagattgaagctactaagaatcatgttctagagaccttctaccccatatcacccatcatcgatcttcatgaatgcaatatttatgatgtgaaaaatgacacagattccaggaaggctatccttacccctactccccaataaagctaaaactcacctgagttgtaaaaaactccagttgacacaaaatagactacgaaagtggctttaacatatctgaacacacaatagctaagacccaaactgggattagataccccactatgcttagccctaaacctcaacagttaaatcaacaaactgctcgccatgatccacatact

SEQ ID NO: 350754 - DNA, 493 bp, Homo sapiens
aacgtgagctttggagaggacatatgaaaacatattagctggtcatgctggagaagttggggatcagaacatcaaaatatggcaaggcgtggtaactcatgccggtaatacccgcactttgggaggccgaggcaggtggatcacctgaggtcaggagttcgagaccagcctggccagcatggcaaaaccccatctctactaaaaatacaaaaattagctgggcgtggtggtgcacgcctgtagtcccagctactagggagactgaggcaggagaaatgcttgaacccaggaggcggaggttgcagtgagccgagatctcaccactgcactccagcgtaggcaacagagcaagactctgtcttagaaaaaaaaaagaacatcagaatgtgaaaaaacctgaaatgaatttagaagtttaaaacagtttcttacaacaaaaaataatagcttttaagtcaaaatatgtaatgtaggaaatgtcggaattcagtga

SEQ ID NO: 350755 - DNA, 356 bp, Homo sapiens
tgaattagagctgttccaatgcacatgaagagatttctatgaagtatttattgagagagaaaaggaagaggcagggaaagtatatcttttatgatttttttacaaaaattacatccctgtgagtgtgtatatatacacatagacatgtgtgtgtagtaagaatttagagaaaaatacatatatatgtaaaatatgtaaacgtgctagattgttaacatggaggagggtggggtgatgtggctgtgtaggtgaggggggcagaacagtttaggcatattgctattttatgggcttttatggctggggctggacacttccttttaataatattattattttttttttgagatggactc

SEQ ID NO: 350756 - DNA, 429 bp, Homo sapiens
ctccacctacacccccatttcaggagaccccaagggagtgtatgtagatggtaaagaccacgtgcttccatttgtgcagcactttgacatttgcagggcatttttgaacatgttatctcattaaattttcacaataaccaagcgagacatattatattctacttccagactagaaaatgaaggtccaaaagcttaagggctttgcacaaagcccacagccatgaagtggctgaggtggcttggccactattctagagaaacctgggcccttgattgtgctataagcgtactagcctcagggtcagatctcttcctcaatagagaccaagcattcactcctctgcatcaatgccttctaaggctcaaattctcttaccctcgtgtttcacaagtttttctccaagtaactaagcaaaatcctctgtatta

SEQ ID NO: 350757 - DNA, 339 bp, Homo sapiens
atacacaggttccacttcataaaaggaatgatagaagcttagctaatgcacatttcattacaatggatattttaaagcagtacataaaaatttcccaaaataaaactattagctgatttacatttatgaatttgtacaattattcttctggctaaagctgatttacatttatgaattaagaataatttatgaattattcttctagctgacaataatctagttctttcttcaagcataatatacatacatacatacatttatgtttagatttcatatataggctgggtgcagttgctcacgcctgtaatcccagcactttgggaggaccaggtggatgga

SEQ ID NO: 350758 - DNA, 738 bp, Homo sapiens
cagcaactgcttcaaccgaaaagaaattgctcttcatgtaagcatgccatgttaccaaaagaaagaaaacaaaggagaaaattggttcattcaaaattataatagtaaaactcgacatcagaacacagctctggctgatttcctggaaagtaatttttcttcgatcctgacatgtgatggagagccatccagggacaaactgttcatttcctaactctgtagacagagtttaaatacagtggaattcagataataatgaaaatggtcatgaaacaagtgaccatttatgttgtaactgggtccaataaatgggtcttttcattgactttcacaaaatttgattattataattggctgtcttaaagtgtcacagtatcactaggagacttaaatgtctctcttcatatgtgtgtatttatgtgtgtgtctgtgtgtgtattttttctatacctttgagcagaaagtcttattcgttcaaactgtcggcaatctgtaaaaatgaaaattaagattttcaaaattcagtcagaataaaaagaaatcatgattctatttccttttacctctgaagagttaatgattgatcactaattgtacatttgtttctaaaagtatatgaacaatgcctcaggaatgtaacaaagttatagcttaagagctccactgacaaaaatttacaggatatgttactactttaccttggctcctccgctgcattgtatatgctggcaaagtgct

SEQ ID NO: 350759 - DNA, 772 bp, Homo sapiens
ggggttttgccatgttggccaggctggtcttgagctcctgacgtcaagtgatttgcctgcttccgcgtcccaaaatcctgggattacaggcctgagccaccatgcctggcctgtcctcatttgtttatccatctcattttttgtccttctcaccaaagatatgttgctttgtcttgtggggtttttttcatgtggattcctgaaccccatccagccccttgtcccctccccagccagctcacactcttttgcacagctcctgggactcccgttgacacacagggaacagccacccacaatggactgcactgttctgtttgcacccttaaatttatcgtgcttacagaatgacacttctgcaaactagtcaagtagggggaagtgatttgtggatatgcacccttgttcattctctttgaaaaggtaaccagctctgaattctttctccttttaggaggagtttcacttgtcgcccaggctggagtgtagtggtgcaatcttgactcactgctacctccgcctcccaggttcaagcaattctcctgcaccagcctcccaagtagcttggattacaggcatgcaccaccatgctcacctaattttttttttttagtagagacggggttcctgacctcaagcagtccacccgacttggcctccccaagtactgggattacaggcgtgacccaaccgtgcctggcctgtaatgtggtttttatattccagttagtccagatatgacgcacttgaacgcagtcaagctccacatcgc

SEQ ID NO: 350760 - DNA, 561 bp, Homo sapiens
tgttcaggctgccagcccattggaagcacagcaaatgacttctatttatagagaaggcattcctgggccacacacagcactcttggcctgctgagaagtcggccaagtccctgacagacaccaaggggcaagactgcaagcctcctctgccagagaaggcattgttctgtcgcacacaatggtagagcggccctggcatgatgtcagatgagttgacagtagcagcagctgcctgtacgttccctctcctcgtttacagctgagctctgccaaacccagggagcagtccggagttttaggtttggattttggaaaatgaattgcaccaagaggccaggaccgtcttgcttcagttggcttagtaaggaaatggccacaagccataggtggtaatttagcagtggctgcctgagtcgttaggggaatgtaaccacaaaaggcagtagaacgggcagccagggccattgcagggcacagtcacagtggctggccaggaggtctgatggggaggcctttccttcctgaagacccagcctcccctggaatcctcccatttcccga

SEQ ID NO: 350761 - DNA, 552 bp, Homo sapiens
cttaattaaatcacatatgaaaagcgattggcgattaatgaagttgggtgacaggcatatgtaagcttctataatctttttacttttgtgaatttggaaatttctcacaatttgaaaattaaatttctaaattaaaataaaaaaccatacatatgtatatttgtaaaaataaatacataaaactaagggctccttcggtcatgtccacagccgcctggacgcacacacatgtgggtgtggctgctggggctcaggctgtggccagtgggcctgggagcggggcaaggctggctgctggctgctgcagatgggggagctgacttgagatgtgacgataagggctgtgctgtagggtggggactttgagatgcacagtcctctctttggggtgaggctgggtcttccccatagtgatcccttggggccagcacaatgtcacagtctcctaggagattgttttgtaatagtcttgcttaagagatgaacctgcttcaggaattattgaaaataaactttggattaattgtagtcacttctttgtgctgatacata

SEQ ID NO: 350762 - DNA, 1649 bp, Homo sapiens
cctcccaggctcaactgatcctcctacctcagcctcccaagtagctgagactgcatgctcatgtcaccatgcctggctaatttccggattttttcatagaggcggagtttcaccatcttgcccaggctggtcttgaacttctgagctaaagcaatctacctgccttgacctcccaaaatgctggcattacaggcatgaggcatcacgcctggcttccctctgatgtaattttttaaaattagatttcaaacaaaagtaaagttttgaggacttaccaaatatctgtgtactttcagccttggccagatttcaatattttaccatatttgctttagaattttttttggatatttaaatccctgtatacccttccctccctgcctaggggtagctactatcctgagtttggttttgtttgcctacttattgcacttgtatatatcaataaacaatatattgctgggtacagtggctcacacctgtaatcccagcactttgagaagccgggacaggtggatcacctgaggttaggagttcaagaccagcctggccaacatggcgaaaccttgtctctactaaaaatacaaaaattagcccaacatggtggcgggcgcctgtaatccccactactcgggaggctgaggcaggagaatcgcttcaacctgagaggcagagattgcagtgagccgagatcgtgccactgcactccagcctgggtgacagagtgaagactccgtctccaaaacaaaaaaacaatatacaatagggctaatatgtttttaaacttaatatgaatggtatcatactgtacaattggttttgtagtttgcttttgtcactcaatattatgttgatgagatttattgggctgctatttaaagcagttttcttagcacagaggccctgtttgcttgccaaactgcatgtctgctgggttgcgtctgtctttaaagggtgacttcctctaattaatccactggggtgaggggtaagttgaaccttttttctgttcacaagtgtggatacaagctaaaggtggccctgtgtggttccctcactacaaccatggtatagtagtccattgtagaaatataccacagttctattgatggacctgttgggttattctatatgttttgctgttaaaagtcatacttcactgaacattcttggacttgcatctttgtgcacacctggaatattacataaaagtggagttgccagggtgcatataccaaattgcttaacaggctgggtgtagtggctcacacctgtaatcccagcattttgggaggctgaggcaggcagatcatttgaggtcaggagttggagaccagcctggccaatatggtgaaaccccatctctacttaaaaaaaaaaaaaaaaaagccaggcatgctggtgggtacctgtaatcccaactacttgggaggctgaggcatgcgaatcgcttaaacccaggaaggcagaggttgtaatgagctgagatcaagccactgcaagactttgtctcaaaaacaacaacaaaaaccaaattgctgatcaaagtggttttaccagtttacattttgactagcagtatattagtgttcatgatgttctctgtatatctttgttatcagatttttttgataatctgctgggtttga

SEQ ID NO: 350763 - DNA, 360 bp, Homo sapiens
ctcagacaacataatatagcagaaaagatttatagtgtttttggcttgctcacactaaaggcagcaagaaagggaacaacccagtggcataaatataaaatgataaatgagccaaaaagtatagatgtttagctctgatgtgtaccacaatagtttagaagtaaaatgtactttcttgcttttagcttaggctgacagaatcttctttgacaaagtgacaacattcattcactcagcaaaaattctaagctctacattccaagcattgtgtagaaagaaaaataacctgggattaaaagtcactaaaatcacctacaaagtatatgctctgataaaatcatacttcccttaaccacattc

SEQ ID NO: 350764 - DNA, 202 bp, Homo sapiens
tgcgaaaccccatctctacgaaaaatagaaatattagccgggcatggtgtcaggcacctgtaatcccagcctcccaaagctgcttccacattttcaggtattcgttaccagaaacccgcacttctcagtaccaattttctttgttttcttttttcttttttttttttttatagccagggtcttgctctgtcacccaggctgg

SEQ ID NO: 350765 - DNA, 1165 bp, Homo sapiens
ccactctccagccatttggaaacaaaaacagatgctattgttcttccttagagaacgtggcgcagtggagacggcacactggaaatcagagtgaatgttcttgaaagagggtcacgggtcaacaaggcccagccaaaggatgcagtagaaccattttccttagaaatctttgggagtgaagtaggcttcagccactcccatccctgcccttgcggctaccactaccccattagtttagacagggtcgggcggggaggggtgtggagaagaaatgagcttgcctgtggcccccaggctccctctgtcctagctcaggtctgggtgccattctttacactcgtgtgctcgctcacgcacacatcacacaccttgctggtcacacagtcacagactcgcctctgctcctgtggtccagtggccggacaccccctgggatggctcaaaggagtcaggacttggaagtggggacatcagggtagctgaaggaaatccacacacccagagcatctcggagttcagactctcagacctgaagtaggcgcccccgggactgggctaggagttggacggaatggaggatggaggacagcgagaagaaaggaagagaaatgcaaagtgtgggcagccgccaagagtgaaaatagagggaagtgtcatgcaagtgctggacagaaggcggcaggtgggacgagccccacagccccctcctcaaaaacgaccacctccaggactcagtgatccctggggggcaggctctgccagccctcggccacacgtggctccggcacccatggtcccagtgccttggatggagacggccagttctggcggccagatgtggtgctctggaatccagtcccatttccttcctggccacgcctgtccagcggcctctttggctgcattcagcccctacttacctggggaccccggctggggcacaagagcaccaggggggtagggccaaagggatcaggggaagcctctggcctggagggtatggggcacacttccccaagggcggacccagcaggaggaagcccaggagctgggtcctgccgcccaggagctgggccctgccacccaggccgggctagggacatggcagggcctgggcatcctggcgctggacttgggcgacctgggaggcacagggaggggagag

SEQ ID NO: 350766 - DNA, 2811 bp, Homo sapiens
agcggatcgcaacgaaccggaagtgctaaaagcctccgaggccaaggccgctgctactgccgccgctgcttcttagtgccgcgttcgccgcctgggttgtcaccggcgccgccgccgaggaagccactgcaaccaggaccggagtggaggcggcgcagcatgaagcggcgcaggcccgctccatagcgcacgtcgggacggtccgggcggggccggggggaaggaaaatgcaacatggcagcagcaatggaaacagaacagctgggtgttgagatatttgaaactgcggactgtgaggagaatattgaatcacaggatcggcctaaattggagcctttttatgttgagcggtattcctggagtcagcttaaaaagctgcttgccgataccagaaaatatcatggctacatgatggctaaggcaccacatgatttcatgtttgtgaagaggaatgatccagatggacctcattcagacagaatctattaccttgccatgtctggtgagaacagagaaaatacactgttttattctgaaattcccaaaactatcaatagagcagcagtcttaatgctctcttggaagcctcttttggatctttttcaggcaacactggactatggaatgtattctcgagaagaagaactattaagagaaagaaaacgcattggaacagtcggaattgcttcttacgattatcaccaaggaagtggaacatttctgtttcaagccggtagtggaatttatcacgtaaaagatggagggccacaaggatttacgcaacaacctttaaggcccaatctagtggaaactagttgtcccaacatacggatggatccaaaattatgccctgctgatccagactggattgcttttatacatagcaacgatatttggatatctaacatcgtaaccagagaagaaaggagactcacttatgtgcacaatgagctagccaacatggaagaagatgccagatcagctggagtcgctacctttgttctccaagaagaatttgatagatattctggctattggtggtgtccaaaagctgaaacaactcccagtggtggtaaaattcttagaattctatatgaagaaaatgatgaatctgaggtggaaattattcatgttacatcccctatgttggaaacaaggagggcagattcattccgttatcctaaaacaggtacagcaaatcctaaagtcacttttaagatgtcagaaataatgattgatgctgaaggaaggatcatagatgtcatagataaggaactaattcaaccttttgagattctatttgaaggagttgaatatattgccagagctggatggactcctgagggaaaatatgcttggtccatcctactagatcgctcccagactcgcctacagatagtgttgatctcacctgaattatttatcccagtagaagatgatgttatggaaaggcagagactcattgagtcagtgcctgattctgtgacgccactaattatctatgaagaaacaacagacatctggataaatatccatgacatctttcatgtttttccccaaagtcacgaagaggaaattgagtttatttttgcctctgaatgcaaaacaggtttccgtcatttatacaaaattacatctattttaaaggaaagcaaatataaacgatccagtggtgggctgcctgctccaagtgatttcaagtgtcctatcaaagaggagatagcaattaccagtggtgaatgggaagttcttggccggcatggatctaatatccaagttgatgaagtcagaaggctggtatattttgaaggcaccaaagactcccctttagagcatcacctgtacgtagtcagttacgtaaatcctggagaggtgacaaggctgactgaccgtggctactcacattcttgctgcatcagtcagcactgtgacttctttataagtaagtatagtaaccagaagaatccacactgtgtgtccctttacaagctatcaagtcctgaagatgacccaacttgcaaaacaaaggaattttgggccaccattttggattcagcaggtcctcttcctgactatactcctccagaaattttctcttttgaaagtactactggatttacattgtatgggatgctctacaagcctcatgatctacagcctggaaagaaatatcctactgtgctgttcatatatggtggtcctcaggttgctattgctggggccccagtcactctgtggatcttctatgatacaggatacacggaacgttatatgggtcaccctgaccagaatgaacagggctattacttaggatctgtggccatgcaagcagaaaagttcccctctgaaccaaatcgtttactgctcttacatggtttcctggatgagaatgtccattttgcacataccagtatattactgagttttttagtgagggctggaaagccatatgatttacagatctatcctcaggagagacacagcataagagttcctgaatcgggagaacattatgaactgcatcttttgcactaccttcaagaaaaccttggatcacgtattgctgctctaaaagtgatataattttgacctgtgtagaactctctggtatacactggctatttaaccaaatgaggaggtttaatcaacagaaaacacagaattgatcatcacattttgatacctgccatgtaacatctactcctgaaaataaatgtggtgccatgcaggggtctacggtttgtggtagtaatctaataccttaaccccacatgctcaaaatcaaatgatacatattcctgagagacccag

SEQ ID NO: 350767 - DNA, 641 bp, Homo sapiens
agcggatcgcaacgaaccggaagtgctaaaagcctccgaggccaaggccgctgctactgccgccgctgcttcttagtgccgcgttcgccgcctgggttgtcaccggcgccgccgccgaggaagccactgcaaccaggaccggagtggaggcggcgcagcatgaagcggcgcaggcccgctccatagcgcacgtcgggacggtccgggcggggccggggggaaggaaaatgcaacatggcagcagcaatggaaacagaacagctgggtgttgagatatttgaaactgcggactgtgaggagaatattgaatcacaggatcggcctaaattggagcctttttatgttgagcggtattcctggagtcagcttaaaaagctgcttgccgataccagaaaatatcatggctacatgatggctaaggcaccacatgatttcatgtttgtgaagaggaatgatccagatggacctcattcagacagaatctattaccttggtaacaagtcattaattgatcatgatcgtttttcaaaatcgaagatgccagaaattgcttcttcctaaagctagcttgaaatgcctttctttagatggtctgattaggaaaacaaacaataaaaccattagtttgttcccactcaaca

SEQ ID NO: 350768 - DNA, 4846 bp, Homo sapiens
tgccggaagaggaagccgaggctctgagattccgagtcaaccaccgttcactgggcgccccttgagctctgggcgctggcctcctggcttccacgctttgatggtgaggaaaggaaagattcctgtgagaagagcaggatgagcagagggattctatgcttgaagtcgagtcacttgaaaaagatctctttgaatgtggaagagatctgagcagatgaaaataaaatcaggaaaatgcaacatggcagcagcaatggaaacagaacagctgggtgttgagatatttgaaactgcggactgtgaggagaatattgaatcacaggatcggcctaaattggagcctttttatgttgagcggtattcctggagtcagcttaaaaagctgcttgccgataccagaaaatatcatggctacatgatggctaaggcaccacatgatttcatgtttgtgaagaggaatgatccagatggacctcattcagacagaatctattaccttgccatgtctggtgagaacagagaaaatacactgttttattctgaaattcccaaaactatcaatagagcagcagtcttaatgctctcttggaagcctcttttggatctttttcaggcaacactggactatggaatgtattctcgagaagaagaactattaagagaaagaaaacgcattggaacagtcggaattgcttcttacgattatcaccaaggaagtggaacatttctgtttcaagccggtagtggaatttatcacgtaaaagatggagggccacaaggatttacgcaacaacctttaaggcccaatctagtggaaactagttgtcccaacatacggatggatccaaaattatgccctgctgatccagactggattgcttttatacatagcaacgatatttggatatctaacatcgtaaccagagaagaaaggagactcacttatgtgcacaatgagctagccaacatggaagaagatgccagatcagctggagtcgctacctttgttctccaagaagaatttgatagatattctggctattggtggtgtccaaaagctgaaacaactcccagtggtggtaaaattcttagaattctatatgaagaaaatgatgaatctgaggtggaaattattcatgttacatcccctatgttggaaacaaggagggcagattcattccgttatcctaaaacaggtacagcaaatcctaaagtcacttttaagatgtcagaaataatgattgatgctgaaggaaggatcatagatgtcatagataaggaactaattcaaccttttgagattctatttgaaggagttgaatatattgccagagctggatggactcctgagggaaaatatgcttggtccatcctactagatcgctcccagactcgcctacagatagtgttgatctcacctgaattatttatcccagtagaagatgatgttatggaaaggcagagactcattgagtcagtgcctgattctgtgacgccactaattatctatgaagaaacaacagacatctggataaatatccatgacatctttcatgtttttccccaaagtcacgaagaggaaattgagtttatttttgcctctgaatgcaaaacaggtttccgtcatttatacaaaattacatctattttaaaggaaagcaaatataaacgatccagtggtgggctgcctgctccaagtgatttcaagtgtcctatcaaagaggagatagcaattaccagtggtgaatgggaagttcttggccggcatggatctaatatccaagttgatgaagtcagaaggctggtatattttgaaggcaccaaagactcccctttagagcatcacctgtacgtagtcagttacgtaaatcctggagaggtgacaaggctgactgaccgtggctactcacattcttgctgcatcagtcagcactgtgacttctttataagtaagtatagtaaccagaagaatccacactgtgtgtccctttacaagctatcaagtcctgaagatgacccaacttgcaaaacaaaggaattttgggccaccattttggattcagcaggtcctcttcctgactatactcctccagaaattttctcttttgaaagtactactggatttacattgtatgggatgctctacaagcctcatgatctacagcctggaaagaaatatcctactgtgctgttcatatatggtggtcctcaggtgcagttggtgaataatcggtttaaaggagtcaagtatttccgcttgaataccctagcctctctaggttatgtggttgtagtgatagacaacaggggatcctgtcaccgagggcttaaatttgaaggcgcctttaaatataaaatgggtcaaatagaaattgacgatcaggtggaaggactccaatatctagcttctcgatatgatttcattgacttagatcgtgtgggcatccacggctggtcctatggaggatacctctccctgatggcattaatgcagaggtcagatatcttcagggttgctattgctggggccccagtcactctgtggatcttctatgatacaggatacacggaacgttatatgggtcaccctgaccagaatgaacagggctattacttaggatctgtggccatgcaagcagaaaagttcccctctgaaccaaatcgtttactgctcttacatggtttcctggatgagaatgtccattttgcacataccagtatattactgagttttttagtgagggctggaaagccatatgatttacagatctatcctcaggagagacacagcataagagttcctgaatcgggagaacattatgaactgcatcttttgcactaccttcaagaaaaccttggatcacgtattgctgctctaaaagtgatataattttgacctgtgtagaactctctggtatacactggctatttaaccaaatgaggaggtttaatcaacagaaaacacagaattgatcatcacattttgatacctgccatgtaacatctactcctgaaaataaatgtggtgccatgcaggggtctacggtttgtggtagtaatctaataccttaaccccacatgctcaaaatcaaatgatacatattcctgagagacccagcaataccataagaattactaaaaaaaaaaaaaaaaaaaaagacattagcaccatgtattcatactaccctattttcacttttaatagtattataaacttcatgaacttaattagtgtatttttacagtatacttttgagtttgttaaaatatgatgatattagtgattggtttggttcagttccagaatctttgactagttacagatttgatagcacttaaatgtaattgaatagcttatgcttcattgcttgggcatatccagcatgttatgaactaataactattaaacttgacttaaccagtcattcattaataatttttcaaggataacttagtggcctcctaaagacacttgttttggcactgaccagtttttagccaatttaatctgtatctagtataaataattctcatttttctttgatgatattaacagagtgggcttttccttttgcataaaggctagtaactgtatatgtagcatggatttaattagtcatgatattgataattacaggcagaaaatttttaatcaaatgattagagcttaaatatttgcaggcaagtttttttttttcctttaagaaaaggaaaaagtacacattcactagaattcttcagaaaatttagtggtgccagtttccatttggtatttccttattaaaatattctagaattttaaggagattgaagggaatcacagtggggtggggagacctgggtttggggaatgacagagagaagaggtggtgagggcctgattaaaaactaagcagaagtagttttaacaaaaatactcatgaaaatgtttggaaactgaaatttaaacaactgtaatattaaggaaaccagaatcaataaatcactgtcttgccagcacagctacagagtaacatgattcaggggaggaaaagttccttagagttacttttataattctttttttttttcctcttaggtttagaaatcttacaaatttaaactttatccttttaaaattatttgaacataatttagatattgtaagcttaaaatacaaatgtttatagataacctctttaccataaactaatccctggcaagccatggctctctttttttttttggtgtttaaagcctgtaaacagtttttctgaatgatcatgaacttttcttggtttagcactaggatttagctatgaagagagctcataggctttcaggtgctaattgagatctgccctgttagagtcttggggtgctagattggtcacattgacaccagtggcagggaaggcatctatgagtttgatgctttttatcacacacttcagtgtttagaaagttattaccaatacttttaaacaacactccaagaaaatttgctatatttctttctcatcactacagagagagtagatttccccatagagagcacagcctccattagtaaggttggtgactattggtaagaggtggacttcattgacaccaagtgggaggtagggaaagcccagaaatggcaggatgatatggtggttctgtcgttgggaaaggtattgggttttgctgtttgtatttatactgtataatagataccacgctttttcttattatctgtatatgtattgcttttcatgtttgatattttcccatgccaagatttgtttatatatattttcaatgttaaattaaattgatttgggtaactttcttccccaagaaagtattttcccccttaagtata

SEQ ID NO: 350769 - DNA, 4884 bp, Homo sapiens
taaggagagccttttataaaagctaccaaagggatttataggcactgtgaagtagacctgacctcaatttttttttaatttcatttttaaactgaacacagagaagggagagctgttgcttttcttactaagtttcattgcagctgtgctaaaaagcatttttttcttgccctccccactcccccgctttttttttgaccctctcagagaatcattctgataatagaagatagacccgtgaacagcttcatgtgccttgtttttctaggaaaatgcaacatggcagcagcaatggaaacagaacagctgggtgttgagatatttgaaactgcggactgtgaggagaatattgaatcacaggatcggcctaaattggagcctttttatgttgagcggtattcctggagtcagcttaaaaagctgcttgccgataccagaaaatatcatggctacatgatggctaaggcaccacatgatttcatgtttgtgaagaggaatgatccagatggacctcattcagacagaatctattaccttgccatgtctggtgagaacagagaaaatacactgttttattctgaaattcccaaaactatcaatagagcagcagtcttaatgctctcttggaagcctcttttggatctttttcaggcaacactggactatggaatgtattctcgagaagaagaactattaagagaaagaaaacgcattggaacagtcggaattgcttcttacgattatcaccaaggaagtggaacatttctgtttcaagccggtagtggaatttatcacgtaaaagatggagggccacaaggatttacgcaacaacctttaaggcccaatctagtggaaactagttgtcccaacatacggatggatccaaaattatgccctgctgatccagactggattgcttttatacatagcaacgatatttggatatctaacatcgtaaccagagaagaaaggagactcacttatgtgcacaatgagctagccaacatggaagaagatgccagatcagctggagtcgctacctttgttctccaagaagaatttgatagatattctggctattggtggtgtccaaaagctgaaacaactcccagtggtggtaaaattcttagaattctatatgaagaaaatgatgaatctgaggtggaaattattcatgttacatcccctatgttggaaacaaggagggcagattcattccgttatcctaaaacaggtacagcaaatcctaaagtcacttttaagatgtcagaaataatgattgatgctgaaggaaggatcatagatgtcatagataaggaactaattcaaccttttgagattctatttgaaggagttgaatatattgccagagctggatggactcctgagggaaaatatgcttggtccatcctactagatcgctcccagactcgcctacagatagtgttgatctcacctgaattatttatcccagtagaagatgatgttatggaaaggcagagactcattgagtcagtgcctgattctgtgacgccactaattatctatgaagaaacaacagacatctggataaatatccatgacatctttcatgtttttccccaaagtcacgaagaggaaattgagtttatttttgcctctgaatgcaaaacaggtttccgtcatttatacaaaattacatctattttaaaggaaagcaaatataaacgatccagtggtgggctgcctgctccaagtgatttcaagtgtcctatcaaagaggagatagcaattaccagtggtgaatgggaagttcttggccggcatggatctaatatccaagttgatgaagtcagaaggctggtatattttgaaggcaccaaagactcccctttagagcatcacctgtacgtagtcagttacgtaaatcctggagaggtgacaaggctgactgaccgtggctactcacattcttgctgcatcagtcagcactgtgacttctttataagtaagtatagtaaccagaagaatccacactgtgtgtccctttacaagctatcaagtcctgaagatgacccaacttgcaaaacaaaggaattttgggccaccattttggattcagcaggtcctcttcctgactatactcctccagaaattttctcttttgaaagtactactggatttacattgtatgggatgctctacaagcctcatgatctacagcctggaaagaaatatcctactgtgctgttcatatatggtggtcctcaggtgcagttggtgaataatcggtttaaaggagtcaagtatttccgcttgaataccctagcctctctaggttatgtggttgtagtgatagacaacaggggatcctgtcaccgagggcttaaatttgaaggcgcctttaaatataaaatgggtcaaatagaaattgacgatcaggtggaaggactccaatatctagcttctcgatatgatttcattgacttagatcgtgtgggcatccacggctggtcctatggaggatacctctccctgatggcattaatgcagaggtcagatatcttcagggttgctattgctggggccccagtcactctgtggatcttctatgatacaggatacacggaacgttatatgggtcaccctgaccagaatgaacagggctattacttaggatctgtggccatgcaagcagaaaagttcccctctgaaccaaatcgtttactgctcttacatggtttcctggatgagaatgtccattttgcacataccagtatattactgagttttttagtgagggctggaaagccatatgatttacagatctatcctcaggagagacacagcataagagttcctgaatcgggagaacattatgaactgcatcttttgcactaccttcaagaaaaccttggatcacgtattgctgctctaaaagtgatataattttgacctgtgtagaactctctggtatacactggctatttaaccaaatgaggaggtttaatcaacagaaaacacagaattgatcatcacattttgatacctgccatgtaacatctactcctgaaaataaatgtggtgccatgcaggggtctacggtttgtggtagtaatctaataccttaaccccacatgctcaaaatcaaatgatacatattcctgagagacccagcaataccataagaattactaaaaaaaaaaaaaaaaaaaaagacattagcaccatgtattcatactaccctattttcacttttaatagtattataaacttcatgaacttaattagtgtatttttacagtatacttttgagtttgttaaaatatgatgatattagtgattggtttggttcagttccagaatctttgactagttacagatttgatagcacttaaatgtaattgaatagcttatgcttcattgcttgggcatatccagcatgttatgaactaataactattaaacttgacttaaccagtcattcattaataatttttcaaggataacttagtggcctcctaaagacacttgttttggcactgaccagtttttagccaatttaatctgtatctagtataaataattctcatttttctttgatgatattaacagagtgggcttttccttttgcataaaggctagtaactgtatatgtagcatggatttaattagtcatgatattgataattacaggcagaaaatttttaatcaaatgattagagcttaaatatttgcaggcaagtttttttttttcctttaagaaaaggaaaaagtacacattcactagaattcttcagaaaatttagtggtgccagtttccatttggtatttccttattaaaatattctagaattttaaggagattgaagggaatcacagtggggtggggagacctgggtttggggaatgacagagagaagaggtggtgagggcctgattaaaaactaagcagaagtagttttaacaaaaatactcatgaaaatgtttggaaactgaaatttaaacaactgtaatattaaggaaaccagaatcaataaatcactgtcttgccagcacagctacagagtaacatgattcaggggaggaaaagttccttagagttacttttataattctttttttttttcctcttaggtttagaaatcttacaaatttaaactttatccttttaaaattatttgaacataatttagatattgtaagcttaaaatacaaatgtttatagataacctctttaccataaactaatccctggcaagccatggctctctttttttttttggtgtttaaagcctgtaaacagtttttctgaatgatcatgaacttttcttggtttagcactaggatttagctatgaagagagctcataggctttcaggtgctaattgagatctgccctgttagagtcttggggtgctagattggtcacattgacaccagtggcagggaaggcatctatgagtttgatgctttttatcacacacttcagtgtttagaaagttattaccaatacttttaaacaacactccaagaaaatttgctatatttctttctcatcactacagagagagtagatttccccatagagagcacagcctccattagtaaggttggtgactattggtaagaggtggacttcattgacaccaagtgggaggtagggaaagcccagaaatggcaggatgatatggtggttctgtcgttgggaaaggtattgggttttgctgtttgtatttatactgtataatagataccacgctttttcttattatctgtatatgtattgcttttcatgtttgatattttcccatgccaagatttgtttatatatattttcaatgttaaattaaattgatttgggtaactttcttccccaagaaagtattttcccccttaagtata

SEQ ID NO: 350770 - DNA, 4888 bp, Homo sapiens
tgccggaagaggaagccgaggctctgagattccgagtcaaccaccgttcactgggcgccccttgagctctgggcgctggcctcctggcttccacgtccgttatcttaattgagtctcgctggggttgggaggccgggctttgatggtgaggaaaggaaagattcctgtgagaagagcaggatgagcagagggattctatgcttgaagtcgagtcacttgaaaaagatctctttgaatgtggaagagatctgagcagatgaaaataaaatcaggaaaatgcaacatggcagcagcaatggaaacagaacagctgggtgttgagatatttgaaactgcggactgtgaggagaatattgaatcacaggatcggcctaaattggagcctttttatgttgagcggtattcctggagtcagcttaaaaagctgcttgccgataccagaaaatatcatggctacatgatggctaaggcaccacatgatttcatgtttgtgaagaggaatgatccagatggacctcattcagacagaatctattaccttgccatgtctggtgagaacagagaaaatacactgttttattctgaaattcccaaaactatcaatagagcagcagtcttaatgctctcttggaagcctcttttggatctttttcaggcaacactggactatggaatgtattctcgagaagaagaactattaagagaaagaaaacgcattggaacagtcggaattgcttcttacgattatcaccaaggaagtggaacatttctgtttcaagccggtagtggaatttatcacgtaaaagatggagggccacaaggatttacgcaacaacctttaaggcccaatctagtggaaactagttgtcccaacatacggatggatccaaaattatgccctgctgatccagactggattgcttttatacatagcaacgatatttggatatctaacatcgtaaccagagaagaaaggagactcacttatgtgcacaatgagctagccaacatggaagaagatgccagatcagctggagtcgctacctttgttctccaagaagaatttgatagatattctggctattggtggtgtccaaaagctgaaacaactcccagtggtggtaaaattcttagaattctatatgaagaaaatgatgaatctgaggtggaaattattcatgttacatcccctatgttggaaacaaggagggcagattcattccgttatcctaaaacaggtacagcaaatcctaaagtcacttttaagatgtcagaaataatgattgatgctgaaggaaggatcatagatgtcatagataaggaactaattcaaccttttgagattctatttgaaggagttgaatatattgccagagctggatggactcctgagggaaaatatgcttggtccatcctactagatcgctcccagactcgcctacagatagtgttgatctcacctgaattatttatcccagtagaagatgatgttatggaaaggcagagactcattgagtcagtgcctgattctgtgacgccactaattatctatgaagaaacaacagacatctggataaatatccatgacatctttcatgtttttccccaaagtcacgaagaggaaattgagtttatttttgcctctgaatgcaaaacaggtttccgtcatttatacaaaattacatctattttaaaggaaagcaaatataaacgatccagtggtgggctgcctgctccaagtgatttcaagtgtcctatcaaagaggagatagcaattaccagtggtgaatgggaagttcttggccggcatggatctaatatccaagttgatgaagtcagaaggctggtatattttgaaggcaccaaagactcccctttagagcatcacctgtacgtagtcagttacgtaaatcctggagaggtgacaaggctgactgaccgtggctactcacattcttgctgcatcagtcagcactgtgacttctttataagtaagtatagtaaccagaagaatccacactgtgtgtccctttacaagctatcaagtcctgaagatgacccaacttgcaaaacaaaggaattttgggccaccattttggattcagcaggtcctcttcctgactatactcctccagaaattttctcttttgaaagtactactggatttacattgtatgggatgctctacaagcctcatgatctacagcctggaaagaaatatcctactgtgctgttcatatatggtggtcctcaggtgcagttggtgaataatcggtttaaaggagtcaagtatttccgcttgaataccctagcctctctaggttatgtggttgtagtgatagacaacaggggatcctgtcaccgagggcttaaatttgaaggcgcctttaaatataaaatgggtcaaatagaaattgacgatcaggtggaaggactccaatatctagcttctcgatatgatttcattgacttagatcgtgtgggcatccacggctggtcctatggaggatacctctccctgatggcattaatgcagaggtcagatatcttcagggttgctattgctggggccccagtcactctgtggatcttctatgatacaggatacacggaacgttatatgggtcaccctgaccagaatgaacagggctattacttaggatctgtggccatgcaagcagaaaagttcccctctgaaccaaatcgtttactgctcttacatggtttcctggatgagaatgtccattttgcacataccagtatattactgagttttttagtgagggctggaaagccatatgatttacagatctatcctcaggagagacacagcataagagttcctgaatcgggagaacattatgaactgcatcttttgcactaccttcaagaaaaccttggatcacgtattgctgctctaaaagtgatataattttgacctgtgtagaactctctggtatacactggctatttaaccaaatgaggaggtttaatcaacagaaaacacagaattgatcatcacattttgatacctgccatgtaacatctactcctgaaaataaatgtggtgccatgcaggggtctacggtttgtggtagtaatctaataccttaaccccacatgctcaaaatcaaatgatacatattcctgagagacccagcaataccataagaattactaaaaaaaaaaaaaaaaaaaaagacattagcaccatgtattcatactaccctattttcacttttaatagtattataaacttcatgaacttaattagtgtatttttacagtatacttttgagtttgttaaaatatgatgatattagtgattggtttggttcagttccagaatctttgactagttacagatttgatagcacttaaatgtaattgaatagcttatgcttcattgcttgggcatatccagcatgttatgaactaataactattaaacttgacttaaccagtcattcattaataatttttcaaggataacttagtggcctcctaaagacacttgttttggcactgaccagtttttagccaatttaatctgtatctagtataaataattctcatttttctttgatgatattaacagagtgggcttttccttttgcataaaggctagtaactgtatatgtagcatggatttaattagtcatgatattgataattacaggcagaaaatttttaatcaaatgattagagcttaaatatttgcaggcaagtttttttttttcctttaagaaaaggaaaaagtacacattcactagaattcttcagaaaatttagtggtgccagtttccatttggtatttccttattaaaatattctagaattttaaggagattgaagggaatcacagtggggtggggagacctgggtttggggaatgacagagagaagaggtggtgagggcctgattaaaaactaagcagaagtagttttaacaaaaatactcatgaaaatgtttggaaactgaaatttaaacaactgtaatattaaggaaaccagaatcaataaatcactgtcttgccagcacagctacagagtaacatgattcaggggaggaaaagttccttagagttacttttataattctttttttttttcctcttaggtttagaaatcttacaaatttaaactttatccttttaaaattatttgaacataatttagatattgtaagcttaaaatacaaatgtttatagataacctctttaccataaactaatccctggcaagccatggctctctttttttttttggtgtttaaagcctgtaaacagtttttctgaatgatcatgaacttttcttggtttagcactaggatttagctatgaagagagctcataggctttcaggtgctaattgagatctgccctgttagagtcttggggtgctagattggtcacattgacaccagtggcagggaaggcatctatgagtttgatgctttttatcacacacttcagtgtttagaaagttattaccaatacttttaaacaacactccaagaaaatttgctatatttctttctcatcactacagagagagtagatttccccatagagagcacagcctccattagtaaggttggtgactattggtaagaggtggacttcattgacaccaagtgggaggtagggaaagcccagaaatggcaggatgatatggtggttctgtcgttgggaaaggtattgggttttgctgtttgtatttatactgtataatagataccacgctttttcttattatctgtatatgtattgcttttcatgtttgatattttcccatgccaagatttgtttatatatattttcaatgttaaattaaattgatttgggtaactttcttccccaagaaagtattttcccccttaagtata

SEQ ID NO: 350771 - DNA, 4304 bp, Homo sapiens
aaggctagtacgaggctgggtttgaaatcggccgaggctctcttggaagccatactttggatctttttcaggcaacactggactatggaatgtattctcgagaagaagaactattaagagaaagaaaacgcattggaacagtcggaattgcttcttacgattatcaccaaggaagtggaacatttctgtttcaagccggtagtggaatttatcacgtaaaagatggagggccacaaggatttacgcaacaacctttaaggcccaatctagtggaaactagttgtcccaacatacggatggatccaaaattatgccctgctgatccagactggattgcttttatacatagcaacgatatttggatatctaacatcgtaaccagagaagaaaggagactcacttatgtgcacaatgagctagccaacatggaagaagatgccagatcagctggagtcgctacctttgttctccaagaagaatttgatagatattctggctattggtggtgtccaaaagctgaaacaactcccagtggtggtaaaattcttagaattctatatgaagaaaatgatgaatctgaggtggaaattattcatgttacatcccctatgttggaaacaaggagggcagattcattccgttatcctaaaacaggtacagcaaatcctaaagtcacttttaagatgtcagaaataatgattgatgctgaaggaaggatcatagatgtcatagataaggaactaattcaaccttttgagattctatttgaaggagttgaatatattgccagagctggatggactcctgagggaaaatatgcttggtccatcctactagatcgctcccagactcgcctacagatagtgttgatctcacctgaattatttatcccagtagaagatgatgttatggaaaggcagagactcattgagtcagtgcctgattctgtgacgccactaattatctatgaagaaacaacagacatctggataaatatccatgacatctttcatgtttttccccaaagtcacgaagaggaaattgagtttatttttgcctctgaatgcaaaacaggtttccgtcatttatacaaaattacatctattttaaaggaaagcaaatataaacgatccagtggtgggctgcctgctccaagtgatttcaagtgtcctatcaaagaggagatagcaattaccagtggtgaatgggaagttcttggccggcatggatctaatatccaagttgatgaagtcagaaggctggtatattttgaaggcaccaaagactcccctttagagcatcacctgtacgtagtcagttacgtaaatcctggagaggtgacaaggctgactgaccgtggctactcacattcttgctgcatcagtcagcactgtgacttctttataagtaagtatagtaaccagaagaatccacactgtgtgtccctttacaagctatcaagtcctgaagatgacccaacttgcaaaacaaaggaattttgggccaccattttggattcagcaggtcctcttcctgactatactcctccagaaattttctcttttgaaagtactactggatttacattgtatgggatgctctacaagcctcatgatctacagcctggaaagaaatatcctactgtgctgttcatatatggtggtcctcaggtgcagttggtgaataatcggtttaaaggagtcaagtatttccgcttgaataccctagcctctctaggttatgtggttgtagtgatagacaacaggggatcctgtcaccgagggcttaaatttgaaggcgcctttaaatataaaatgggtcaaatagaaattgacgatcaggtggaaggactccaatatctagcttctcgatatgatttcattgacttagatcgtgtgggcatccacggctggtcctatggaggatacctctccctgatggcattaatgcagaggtcagatatcttcagggttgctattgctggggccccagtcactctgtggatcttctatgatacaggatacacggaacgttatatgggtcaccctgaccagaatgaacagggctattacttaggatctgtggccatgcaagcagaaaagttcccctctgaaccaaatcgtttactgctcttacatggtttcctggatgagaatgtccattttgcacataccagtatattactgagttttttagtgagggctggaaagccatatgatttacagatctatcctcaggagagacacagcataagagttcctgaatcgggagaacattatgaactgcatcttttgcactaccttcaagaaaaccttggatcacgtattgctgctctaaaagtgatataattttgacctgtgtagaactctctggtatacactggctatttaaccaaatgaggaggtttaatcaacagaaaacacagaattgatcatcacattttgatacctgccatgtaacatctactcctgaaaataaatgtggtgccatgcaggggtctacggtttgtggtagtaatctaataccttaaccccacatgctcaaaatcaaatgatacatattcctgagagacccagcaataccataagaattactaaaaaaaaaaaaaaaaaaaaagacattagcaccatgtattcatactaccctattttcacttttaatagtattataaacttcatgaacttaattagtgtatttttacagtatacttttgagtttgttaaaatatgatgatattagtgattggtttggttcagttccagaatctttgactagttacagatttgatagcacttaaatgtaattgaatagcttatgcttcattgcttgggcatatccagcatgttatgaactaataactattaaacttgacttaaccagtcattcattaataatttttcaaggataacttagtggcctcctaaagacacttgttttggcactgaccagtttttagccaatttaatctgtatctagtataaataattctcatttttctttgatgatattaacagagtgggcttttccttttgcataaaggctagtaactgtatatgtagcatggatttaattagtcatgatattgataattacaggcagaaaatttttaatcaaatgattagagcttaaatatttgcaggcaagtttttttttttcctttaagaaaaggaaaaagtacacattcactagaattcttcagaaaatttagtggtgccagtttccatttggtatttccttattaaaatattctagaattttaaggagattgaagggaatcacagtggggtggggagacctgggtttggggaatgacagagagaagaggtggtgagggcctgattaaaaactaagcagaagtagttttaacaaaaatactcatgaaaatgtttggaaactgaaatttaaacaactgtaatattaaggaaaccagaatcaataaatcactgtcttgccagcacagctacagagtaacatgattcaggggaggaaaagttccttagagttacttttataattctttttttttttcctcttaggtttagaaatcttacaaatttaaactttatccttttaaaattatttgaacataatttagatattgtaagcttaaaatacaaatgtttatagataacctctttaccataaactaatccctggcaagccatggctctctttttttttttggtgtttaaagcctgtaaacagtttttctgaatgatcatgaacttttcttggtttagcactaggatttagctatgaagagagctcataggctttcaggtgctaattgagatctgccctgttagagtcttggggtgctagattggtcacattgacaccagtggcagggaaggcatctatgagtttgatgctttttatcacacacttcagtgtttagaaagttattaccaatacttttaaacaacactccaagaaaatttgctatatttctttctcatcactacagagagagtagatttccccatagagagcacagcctccattagtaaggttggtgactattggtaagaggtggacttcattgacaccaagtgggaggtagggaaagcccagaaatggcaggatgatatggtggttctgtcgttgggaaaggtattgggttttgctgtttgtatttatactgtataatagataccacgctttttcttattatctgtatatgtattgcttttcatgtttgatattttcccatgccaagatttgtttatatatattttcaatgttaaattaaattgatttgggtaactttcttccccaagaaagtattttcccccttaagtata

SEQ ID NO: 350772 - DNA, 3462 bp, Homo sapiens
agcggatcgcaacgaaccggaagtgctaaaagcctccgaggccaaggccgctgctactgccgccgctgcttcttagtgccgcgttcgccgcctgggttgtcaccggcgccgccgccgaggaagccactgcaaccaggaccggagtggaggcggcgcagcatgaagcggcgcaggcccgctccatagcgcacgtcgggacggtccgggcggggccggggggaaggaaaatgcaacatggcagcagcaatggaaacagaacagctgggtgttgagatatttgaaactgcggactgtgaggagaatattgaatcacaggatcggcctaaattggagcctttttatgttgagcggtattcctggagtcagcttaaaaagctgcttgccgataccagaaaatatcatggctacatgatggctaaggcaccacatgatttcatgtttgtgaagaggaatgatccagatggacctcattcagacagaatctattaccttgccatgtctggtgagaacagagaaaatacactgttttattctgaaattcccaaaactatcaatagagcagcagtcttaatgctctcttggaagcctcttttggatctttttcaggcaacactggactatggaatgtattctcgagaagaagaactattaagagaaagaaaacgcattggaacagtcggaattgcttcttacgattatcaccaaggaagtggaacatttctgtttcaagccggtagtggaatttatcacgtaaaagatggagggccacaaggatttacgcaacaacctttaaggcccaatctagtggaaactagttgtcccaacatacggatggatccaaaattatgccctgctgatccagactggattgcttttatacatagcaacgatatttggatatctaacatcgtaaccagagaagaaaggagactcacttatgtgcacaatgagctagccaacatggaagaagatgccagatcagctggagtcgctacctttgttctccaagaagaatttgatagatattctggctattggtggtgtccaaaagctgaaacaactcccagtggtggtaaaattcttagaattctatatgaagaaaatgatgaatctgaggtggaaattattcatgttacatcccctatgttggaaacaaggagggcagattcattccgttatcctaaaacaggtacagcaaatcctaaagtcacttttaagatgtcagaaataatgattgatgctgaaggaaggatcatagatgtcatagataaggaactaattcaaccttttgagattctatttgaaggagttgaatatattgccagagctggatggactcctgagggaaaatatgcttggtccatcctactagatcgctcccagactcgcctacagatagtgttgatctcacctgaattatttatcccagtagaagatgatgttatggaaaggcagagactcattgagtcagtgcctgattctgtgacgccactaattatctatgaagaaacaacagacatctggataaatatccatgacatctttcatgtttttccccaaagtcacgaagaggaaattgagtttatttttgcctctgaatgcaaaacaggtttccgtcatttatacaaaattacatctattttaaaggaaagcaaatataaacgatccagtggtgggctgcctgctccaagtgatttcaagtgtcctatcaaagaggagatagcaattaccagtggtgaatgggaagttcttggccggcatggatctaatatccaagttgatgaagtcagaaggctggtatattttgaaggcaccaaagactcccctttagagcatcacctgtacgtagtcagttacgtaaatcctggagaggtgacaaggctgactgaccgtggctactcacattcttgctgcatcagtcagcactgtgacttctttataagtaagtatagtaaccagaagaatccacactgtgtgtccctttacaagctatcaagtcctgaagatgacccaacttgcaaaacaaaggaattttgggccaccattttggattcagcaggtcctcttcctgactatactcctccagaaattttctcttttgaaagtactactggatttacattgtatgggatgctctacaagcctcatgatctacagcctggaaagaaatatcctactgtgctgttcatatatggtggtcctcaggtgcagttggtgaataatcggtttaaaggagtcaagtatttccgcttgaataccctagcctctctaggttatgtggttgtagtgatagacaacaggggatcctgtcaccgagggcttaaatttgaaggcgcctttaaatataaaatgggtcaaatagaaattgacgatcaggtggaaggactccaatatctagcttctcgatatgatttcattgacttagatcgtgtgggcatccacggctggtcctatggaggatacctctccctgatggcattaatgcagaggtcagatatcttcagggttgctattgctggggccccagtcactctgtggatcttctatgatacaggatacacggaacgttatatgggtcaccctgaccagaatgaacagggctattacttaggatctgtggccatgcaagcagaaaagttcccctctgaaccaaatcgtttactgctcttacatggtttcctggatgagaatgtccattttgcacataccagtatattactgagttttttagtgagggctggaaagccatatgatttacagatctatcctcaggagagacacagcataagagttcctgaatcgggagaacattatgaactgcatcttttgcactaccttcaagaaaaccttggatcacgtattgctgctctaaaagtgatataattttgacctgtgtagaactctctggtatacactggctatttaaccaaatgaggaggtttaatcaacagaaaacacagaattgatcatcacattttgatacctgccatgtaacatctactcctgaaaataaatgtggtgccatgcaggggtctacggtttgtggtagtaatctaataccttaaccccacatgctcaaaatcaaatgatacatattcctgagagacccagcaataccataagaattactaaaaaaaaaaaaaaaaaaaaaaaaaaaaaacggggggggggcgcatccggcgcccccgaaaaagtctttcttaacaaccatatccgcgttgggcgagaccacggggccccaagcgaggtaacatggaacactggggccaaacgtgcgtgtccctacaagaaacaccggggcaaagaacaaaggggcgggagtctcaccaccaccattaaaaacccccccggggcacccccggagacggatccaggacaaaactcccacacggcgcccccaggagggccactccggggggctctctacacaccagggacgccaacgcagagcccaacatcaaa

SEQ ID NO: 350773 - DNA, 3111 bp, Homo sapiens
agcggatcgcaacgaaccggaagtgctaaaagcctccgaggccaaggccgctgctactgccgccgctgcttcttagtgccgcgttcgccgcctgggttgtcaccggcgccgccgccgaggaagccactgcaaccaggaccggagtggaggcggcgcagcatgaagcggcgcaggcccgctccatagcgcacgtcgggacggtccgggcggggccggggggaaggaaaatgcaacatggcagcagcaatggaaacagaacagctgggtgttgagatatttgaaactgcggactgtgaggagaatattgaatcacaggatcggcctaaattggagcctttttatgttgagcggtattcctggagtcagcttaaaaagctgcttgccgataccagaaaatatcatggctacatgatggctaaggcaccacatgatttcatgtttgtgaagaggaatgatccagatggacctcattcagacagaatctattaccttgccatgtctggtgagaacagagaaaatacactgttttattctgaaattcccaaaactatcaatagagcagcagtcttaatgctctcttggaagcctcttttggatctttttcaggcaacactggactatggaatgtattctcgagaagaagaactattaagagaaagaaaacgcattggaacagtcggaattgcttcttacgattatcaccaaggaagtggaacatttctgtttcaagccggtagtggaatttatcacgtaaaagatggagggccacaaggatttacgcaacaacctttaaggcccaatctagtggaaactagttgtcccaacatacggatggatccaaaattatgccctgctgatccagactggattgcttttatacatagcaacgatatttggatatctaacatcgtaaccagagaagaaaggagactcacttatgtgcacaatgagctagccaacatggaagaagatgccagatcagctggagtcgctacctttgttctccaagaagaatttgatagatattctggctattggtggtgtccaaaagctgaaacaactcccagtggtggtaaaattcttagaattctatatgaagaaaatgatgaatctgaggtggaaattattcatgttacatcccctatgttggaaacaaggagggcagattcattccgttatcctaaaacaggtacagcaaatcctaaagtcacttttaagatgtcagaaataatgattgatgctgaaggaaggatcatagatgtcatagataaggaactaattcaaccttttgagattctatttgaaggagttgaatatattgccagagctggatggactcctgagggaaaatatgcttggtccatcctactagatcgctcccagactcgcctacagatagtgttgatctcacctgaattatttatcccagtagaagatgatgttatggaaaggcagagactcattgagtcagtgcctgattctgtgacgccactaattatctatgaagaaacaacagacatctggataaatatccatgacatctttcatgtttttccccaaagtcacgaagaggaaattgagtttatttttgcctctgaatgcaaaacaggtttccgtcatttatacaaaattacatctattttaaaggaaagcaaatataaacgatccagtggtgggctgcctgctccaagtgatttcaagtgtcctatcaaagaggagatagcaattaccagtggtgaatgggaagttcttggccggcatggatctaatatccaagttgatgaagtcagaaggctggtatattttgaaggcaccaaagactcccctttagagcatcacctgtacgtagtcagttacgtaaatcctggagaggtgacaaggctgactgaccgtggctactcacattcttgctgcatcagtcagcactgtgacttctttataagtaagtatagtaaccagaagaatccacactgtgtgtccctttacaagctatcaagtcctgaagatgacccaacttgcaaaacaaaggaattttgggccaccattttggattcagcaggtcctcttcctgactatactcctccagaaattttctcttttgaaagtactactggatttacattgtatgggatgctctacaagcctcatgatctacagcctggaaagaaatatcctactgtgctgttcatatatggtggtcctcaggtgcagttggtgaataatcggtttaaaggagtcaagtatttccgcttgaataccctagcctctctaggttatgtggttgtagtgatagacaacaggggatcctgtcaccgagggcttaaatttgaaggcgcctttaaatataaaatgggtcaaatagaaattgacgatcaggtggaaggactccaatatctagcttctcgatatgatttcattgacttagatcgtgtgggcatccacggctggtcctatggaggatacctctccctgatggcattaatgcagaggtcagatatcttcagggttgctattgctggggccccagtcactctgtggatcttctatgatacaggatacacggaacgttatatgggtcaccctgaccagaatgaacagggctattacttaggatctgtggccatgcaagcagaaaagttcccctctgaaccaaatcgtttactgctcttacatggtttcctggatgagaatgtccattttgcacataccagtatattactgagttttttagtgagggctggaaagccatatgatttacagatctatcctcaggagagacacagcataagagttcctgaatcgggagaacattatgaactgcatcttttgcactaccttcaagaaaaccttggatcacgtattgctgctctaaaagtgatataattttgacctgtgtagaactctctggtatacactggctatttaaccaaatgaggaggtttaatcaacagaaaacacagaattgatcatcacattttgatacctgccatgtaacatctactcctgaaaataaatgtggtgccatgcaggggtctacggtttgtggtagtaatctaataccttaaccccacatgctcaaaatcaaatgatacatattcctgagagacccag

SEQ ID NO: 350774 - DNA, 3154 bp, Homo sapiens
agcggatcgcaacgaaccggaagtgctaaaagcctccgaggccaaggccgctgctactgccgccgctgcttcttagtgccgcgttcgccgcctgggttgtcaccggcgccgccgccgaggaagccactgcaaccaggaccggagtggaggcggcgcagcatgaagcggcgcaggcccgctccatagcgcacgtcgggacggtccgggcggggccggggggaaggaaaatgcaacatggcagcagcaatggaaacagaacagctgggtgttgagatatttgaaactgcggactgtgaggagaatattgaatcacaggatcggcctaaattggagcctttttatgttgagcggtattcctggagtcagcttaaaaagctgcttgccgataccagaaaatatcatggctacatgatggctaaggcaccacatgatttcatgtttgtgaagaggaatgatccagatggacctcattcagacagaatctattaccttgccatgtctggtgagaacagagaaaatacactgttttattctgaaattcccaaaactatcaatagagcagcagtcttaatgctctcttggaagcctcttttggatctttttcaggcaacactggactatggaatgtattctcgagaagaagaactattaagagaaagaaaacgcattggaacagtcggaattgcttcttacgattatcaccaaggaagtggaacatttctgtttcaagccggtagtggaatttatcacgtaaaagatggagggccacaaggatttacgcaacaacctttaaggcccaatctagtggaaactagttgtcccaacatacggatggatccaaaattatgccctgctgatccagactggattgcttttatacatagcaacgatatttggatatctaacatcgtaaccagagaagaaaggagactcacttatgtgcacaatgagctagccaacatggaagaagatgccagatcagctggagtcgctacctttgttctccaagaagaatttgatagatattctggctattggtggtgtccaaaagctgaaacaactcccagtggtggtaaaattcttagaattctatatgaagaaaatgatgaatctgaggtggaaattattcatgttacatcccctatgttggaaacaaggagggcagattcattccgttatcctaaaacaggtacagcaaatcctaaagtcacttttaagatgtcagaaataatgattgatgctgaaggaaggatcatagatgtcatagataaggaactaattcaaccttttgagattctatttgaaggagttgaatatattgccagagctggatggactcctgagggaaaatatgcttggtccatcctactagatcgctcccagactcgcctacagatagtgttgatctcacctgaattatttatcccagtagaagatgatgttatggaaaggcagagactcattgagtcagtgcctgattctgtgacgccactaattatctatgaagaaacaacagacatctggataaatatccatgacatctttcatgtttttccccaaagtcacgaagaggaaattgagtttatttttgcctctgaatgcaaaacaggtttccgtcatttatacaaaattacatctattttaaaggaaagcaaatataaacgatccagtggtgggctgcctgctccaagtgatttcaagtgtcctatcaaagaggagatagcaattaccagtggtgaatgggaagttcttggccggcatggatctaatatccaagttgatgaagtcagaaggctggtatattttgaaggcaccaaagactcccctttagagcatcacctgtacgtagtcagttacgtaaatcctggagaggtgacaaggctgactgaccgtggctactcacattcttgctgcatcagtcagcactgtgacttctttataagtaagtatagtaaccagaagaatccacactgtgtgtccctttacaagctatcaagtcctgaagatgacccaacttgcaaaacaaaggaattttgggccaccattttggattcagcaggtcctcttcctgactatactcctccagaaattttctcttttgaaagtactactggatttacattgtatgggatgctctacaagcctcatgatctacagcctggaaagaaatatcctactgtgctgttcatatatggtggtcctcaggtgcagttggtgaataatcggtttaaaggagtcaagtatttccgcttgaataccctagcctctctaggttatgtggttgtagtgatagacaacaggggatcctgtcaccgagggcttaaatttgaaggcgcctttaaatataaaatggttgctattgctggggccccagtcactctgtggatcttctatgatacaggatacacggaacgttatatgggtcaccctgaccagaatgaacagggctattacttaggatctgtggccatgcaagcagaaaagttcccctctgaaccaaatcgtttactgctcttacatggtttcctggatgagaatgtccattttgcacataccagtatattactgagttttttagtgagggctggaaagccatatgatttacagatctatcctcaggagagacacagcataagagttcctgaatcgggagaacattatgaactgcatcttttgcactaccttcaagaaaaccttggatcacgtattgctgctctaaaagtgatataattttgacctgtgtagaactctctggtatacactggctatttaaccaaatgaggaggtttaatcaacagaaaacacagaattgatcatcacattttgatacctgccatgtaacatctactcctgaaaataaatgtggtgccatgcaggggtctacggtttgtggtagtaatctaataccttaaccccacatgctcaaaatcaaatgatacatattcctgagagacccagagatacttagattttagaaaaaaaaaaagggggggttagatactcggagggcaagttagtgaccgtttggaaggcgcatagagggaaagaagaggcgtaaagggaggaagcggttggagaccttttggggagggaacaggtaggagtatttatagtactgtggattgtagaaagtagaatgagtcaattagtttga

SEQ ID NO: 350775 - DNA, 3208 bp, Homo sapiens
agcggatcgcaacgaaccggaagtgctaaaagcctccgaggccaaggccgctgctactgccgccgctgcttcttagtgccgcgttcgccgcctgggttgtcaccggcgccgccgccgaggaagccactgcaaccaggaccggagtggaggcggcgcagcatgaagcggcgcaggcccgctccatagcgcacgtcgggacggtccgggcggggccggggggaaggaaaatgcaacatggcagcagcaatggaaacagaacagctgggtgttgagatatttgaaactgcggactgtgaggagaatattgaatcacaggatcggcctaaattggagcctttttatgttgagcggtattcctggagtcagcttaaaaagctgcttgccgataccagaaaatatcatggctacatgatggctaaggcaccacatgatttcatgtttgtgaagaggaatgatccagatggacctcattcagacagaatctattaccttgccatgtctggtgagaacagagaaaatacactgttttattctgaaattcccaaaactatcaatagagcagcagtcttaatgctctcttggaagcctcttttggatctttttcaggcaacactggactatggaatgtattctcgagaagaagaactattaagagaaagaaaacgcattggaacagtcggaattgcttcttacgattatcaccaaggaagtggaacatttctgtttcaagccggtagtggaatttatcacgtaaaagatggagggccacaaggatttacgcaacaacctttaaggcccaatctagtggaaactagttgtcccaacatacggatggatccaaaattatgccctgctgatccagactggattgcttttatacatagcaacgatatttggatatctaacatcgtaaccagagaagaaaggagactcacttatgtgcacaatgagctagccaacatggaagaagatgccagatcagctggagtcgctacctttgttctccaagaagaatttgatagatattctggctattggtggtgtccaaaagctgaaacaactcccagtggtggtaaaattcttagaattctatatgaagaaaatgatgaatctgaggtggaaattattcatgttacatcccctatgttggaaacaaggagggcagattcattccgttatcctaaaacaggtacagcaaatcctaaagtcacttttaagatgtcagaaataatgattgatgctgaaggaaggatcatagatgtcatagataaggaactaattcaaccttttgagattctatttgaaggagttgaatatattgccagagctggatggactcctgagggaaaatatgcttggtccatcctactagatcgctcccagactcgcctacagatagtgttgatctcacctgaattatttatcccagtagaagatgatgttatggaaaggcagagactcattgagtcagtgcctgattctgtgacgccactaattatctatgaagaaacaacagacatctggataaatatccatgacatctttcatgtttttccccaaagtcacgaagaggaaattgagtttatttttgcctctgaatgcaaaacaggtttccgtcatttatacaaaattacatctattttaaaggaaagcaaatataaacgatccagtggtgggctgcctgctccaagtgatttcaagtgtcctatcaaagaggagatagcaattaccagtggtgaatgggaagttcttggccggcatggatctaatatccaagttgatgaagtcagaaggctggtatattttgaaggcaccaaagactcccctttagagcatcacctgtacgtagtcagttacgtaaatcctggagaggtgacaaggctgactgaccgtggctactcacattcttgctgcatcagtcagcactgtgacttctttataagtaagtatagtaaccagaagaatccacactgtgtgtccctttacaagctatcaagtcctgaagatgacccaacttgcaaaacaaaggaattttgggccaccattttggattcagcaggtcctcttcctgactatactcctccagaaattttctcttttgaaagtactactggatttacattgtatgggatgctctacaagcctcatgatctacagcctggaaagaaatatcctactgtgctgttcatatatggtggtcctcaggtgcagttggtgaataatcggtttaaaggagtcaagtatttccgcttgaataccctagcctctctaggttatgtggttgtagtgatagacaacaggggatcctgtcaccgagggcttaaatttgaaggcgcctttaaatataaaatggaagctttaaatgctaccttttagagatgccccatgtcctttctgctgctttgggaaatgatgagaatccgatgttccttttgcacagtaaggcagttactgtgtttgccagtgttattggacatgctgagtaagacatggggattttctcccacagccagttctttgaccttatgttgtattctcatggtcaaatagaaattgacgatcaggtggaaggactccaatatctagcttctcgatatgatttcattgacttagatcgtgtgggcatccacggctggtcctatggaggatacctctccctgatggcattaatgcagaggtcagatatcttcagggttgctattgctggggccccagtcactctgtggatcttctatgatacaggatacacggaacgttatatgggtcaccctgaccagaatgaacagggctattacttaggatctgtggccatgcaagcagaaaagttcccctctgaaccaaatcgtttactgctcttacatggtttcctggatgagaatgtccattttgcacataccagtatattactgagttttttagtgagggctggaaagccatatgatttacaggtgagttactctacattttctagttaaatgcagtcatgattagtgattgattactttgaaatctattagctgtggggtaagtccagatttttagagtgtccaccctctgcttaagagaactaaagtaagaggcatatttagtagtgcctgtagttggataaaaattaagattctgttgcagtcaggctgacatacctgcctatcagattacatgactgtgtgtctgtatctgctttcagtttggaagcatggaaaagatg

SEQ ID NO: 350776 - DNA, 1377 bp, Homo sapiens
agcggatcgcaacgaaccggaagtgctaaaagcctccgaggccaaggccgctgctactgccgccgctgcttcttagtgccgcgttcgccgcctgggttgtcaccggcgccgccgccgaggaagccactgcaaccaggaccggagtggaggcggcgcagcatgaagcggcgcaggcccgctccatagcgcacgtcgggacggtccgggcggggccggggggaaggaaaatgcaacatggcagcagcaatggaaacagaacagctgggtgttgagatatttgaaactgcggactgtgaggagaatattgaatcacaggatcggcctaaattggagcctttttatgttgagcggtattcctggagtcagcttaaaaagctgcttgccgataccagaaaatatcatggctacatgatggctaaggcaccacatgatttcatgtttgtgaagaggaatgatccagatggacctcattcagacagaatctattaccttgccatgtctggtgagaacagagaaaatacactgttttattctgaaattcccaaaactatcaatagagcagcagtcttaatgctctcttggaagcctcttttggatctttttcaggcaacactggactatggaatgtattctcgagaagaagaactattaagagaaagaaaacgcattggaacagtcggaattgcttcttacgattatcaccaaggaagtggaacatttctgtttcaagccggtagtggaatttatcacgtaaaagatggagggccacaaggatttacgcaacaacctttaaggcccaatctagtggaaactagttgtcccaacatacggatggatccaaaattatgccctgctgatccagactggattgcttttatacatagcaacgatatttggatatctaacatcgtaaccagagaagaaaggagactcacttatgtgcacaatggtaaggcgtagttcttcagatttacttttctgaacagtattttttgaagtataatttgctgcttgcattttgaaattagattaccacgttgggtgatctttatatttgaaattcaagtctttaaaatttttaaaaaatggagaaaagtacagaggataacttgtatgtaccacatgtataatattcattttaatgttttaatgttcattttcaaacagtgaaacaaaagaacctctgacatgattgttcttttagcttgctaagactgccagaattttcccaaaactgttcttattaaaataaaattttaggctaggcatggtggctcatgcctgtaatcctagcactctgggaggctgaggcaggcagattgtttgagcccagaagttcaagatcaggatgggcaacatggtgacacctcgtttgac

SEQ ID NO: 350777 - DNA, 509 bp, Homo sapiens
ctctgagattccgagtcaaccaccgttcactgggcgccccttgagctctgggcgctggcctcctggcttccacgtccgttatcttaattgagtctcgctggggttgggaggccgggtattgtcagcgcttacagatgaggaaacggaagcccacagaggcgaagggattttccttaagtccgacttggcagatgggcttcggcctcagattttctggtttttcagctggtggtcttttttctctcctgcctcatgctaggtcgattccctccctgctcactgccctctcccattctgttccacccactcgcagcaggacactttcctttcctgccacacctgtcttctcacacacttttcttctaagacttggcattcctcccatctctcttctcaatattctctgctatgcctctcctcttgttcctcattcatagtttttcaaggtctttgccccctctgtgctattgaatctctcaactaggtgtggaccctaaagaatgagatag

SEQ ID NO: 350778 - DNA, 4839 bp, Homo sapiens
agcggatcgcaacgaaccggaagtgctaaaagcctccgaggccaaggccgctgctactgccgccgctgcttcttagtgccgcgttcgccgcctgggttgtcaccggcgccgccgccgaggaagccactgcaaccaggaccggagtggaggcggcgcagcatgaagcggcgcaggcccgctccatagcgcacgtcgggacggtccgggcggggccggggggaaggaaaatgcaacatggcagcagcaatggaaacagaacagctgggtgttgagatatttgaaactgcggactgtgaggagaatattgaatcacaggatcggcctaaattggagcctttttatgttgagcggtattcctggagtcagcttaaaaagctgcttgccgataccagaaaatatcatggctacatgatggctaaggcaccacatgatttcatgtttgtgaagaggaatgatccagatggacctcattcagacagaatctattaccttgccatgtctggtgagaacagagaaaatacactgttttattctgaaattcccaaaactatcaatagagcagcagtcttaatgctctcttggaagcctcttttggatctttttcaggcaacactggactatggaatgtattctcgagaagaagaactattaagagaaagaaaacgcattggaacagtcggaattgcttcttacgattatcaccaaggaagtggaacatttctgtttcaagccggtagtggaatttatcacgtaaaagatggagggccacaaggatttacgcaacaacctttaaggcccaatctagtggaaactagttgtcccaacatacggatggatccaaaattatgccctgctgatccagactggattgcttttatacatagcaacgatatttggatatctaacatcgtaaccagagaagaaaggagactcacttatgtgcacaatgagctagccaacatggaagaagatgccagatcagctggagtcgctacctttgttctccaagaagaatttgatagatattctggctattggtggtgtccaaaagctgaaacaactcccagtggtggtaaaattcttagaattctatatgaagaaaatgatgaatctgaggtggaaattattcatgttacatcccctatgttggaaacaaggagggcagattcattccgttatcctaaaacaggtacagcaaatcctaaagtcacttttaagatgtcagaaataatgattgatgctgaaggaaggatcatagatgtcatagataaggaactaattcaaccttttgagattctatttgaaggagttgaatatattgccagagctggatggactcctgagggaaaatatgcttggtccatcctactagatcgctcccagactcgcctacagatagtgttgatctcacctgaattatttatcccagtagaagatgatgttatggaaaggcagagactcattgagtcagtgcctgattctgtgacgccactaattatctatgaagaaacaacagacatctggataaatatccatgacatctttcatgtttttccccaaagtcacgaagaggaaattgagtttatttttgcctctgaatgcaaaacaggtttccgtcatttatacaaaattacatctattttaaaggaaagcaaatataaacgatccagtggtgggctgcctgctccaagtgatttcaagtgtcctatcaaagaggagatagcaattaccagtggtgaatgggaagttcttggccggcatggatctaatatccaagttgatgaagtcagaaggctggtatattttgaaggcaccaaagactcccctttagagcatcacctgtacgtagtcagttacgtaaatcctggagaggtgacaaggctgactgaccgtggctactcacattcttgctgcatcagtcagcactgtgacttctttataagtaagtatagtaaccagaagaatccacactgtgtgtccctttacaagctatcaagtcctgaagatgacccaacttgcaaaacaaaggaattttgggccaccattttggattcagcaggtcctcttcctgactatactcctccagaaattttctcttttgaaagtactactggatttacattgtatgggatgctctacaagcctcatgatctacagcctggaaagaaatatcctactgtgctgttcatatatggtggtcctcaggtgcagttggtgaataatcggtttaaaggagtcaagtatttccgcttgaataccctagcctctctaggttatgtggttgtagtgatagacaacaggggatcctgtcaccgagggcttaaatttgaaggcgcctttaaatataaaatgggtcaaatagaaattgacgatcaggtggaaggactccaatatctagcttctcgatatgatttcattgacttagatcgtgtgggcatccacggctggtcctatggaggatacctctccctgatggcattaatgcagaggtcagatatcttcagggttgctattgctggggccccagtcactctgtggatcttctatgatacaggatacacggaacgttatatgggtcaccctgaccagaatgaacagggctattacttaggatctgtggccatgcaagcagaaaagttcccctctgaaccaaatcgtttactgctcttacatggtttcctggatgagaatgtccattttgcacataccagtatattactgagttttttagtgagggctggaaagccatatgatttacagatctatcctcaggagagacacagcataagagttcctgaatcgggagaacattatgaactgcatcttttgcactaccttcaagaaaaccttggatcacgtattgctgctctaaaagtgatataattttgacctgtgtagaactctctggtatacactggctatttaaccaaatgaggaggtttaatcaacagaaaacacagaattgatcatcacattttgatacctgccatgtaacatctactcctgaaaataaatgtggtgccatgcaggggtctacggtttgtggtagtaatctaataccttaaccccacatgctcaaaatcaaatgatacatattcctgagagacccagcaataccataagaattactaaaaaaaaaaaaaaaaaaaaagacattagcaccatgtattcatactaccctattttcacttttaatagtattataaacttcatgaacttaattagtgtatttttacagtatacttttgagtttgttaaaatatgatgatattagtgattggtttggttcagttccagaatctttgactagttacagatttgatagcacttaaatgtaattgaatagcttatgcttcattgcttgggcatatccagcatgttatgaactaataactattaaacttgacttaaccagtcattcattaataatttttcaaggataacttagtggcctcctaaagacacttgttttggcactgaccagtttttagccaatttaatctgtatctagtataaataattctcatttttctttgatgatattaacagagtgggcttttccttttgcataaaggctagtaactgtatatgtagcatggatttaattagtcatgatattgataattacaggcagaaaatttttaatcaaatgattagagcttaaatatttgcaggcaagtttttttttttcctttaagaaaaggaaaaagtacacattcactagaattcttcagaaaatttagtggtgccagtttccatttggtatttccttattaaaatattctagaattttaaggagattgaagggaatcacagtggggtggggagacctgggtttggggaatgacagagagaagaggtggtgagggcctgattaaaaactaagcagaagtagttttaacaaaaatactcatgaaaatgtttggaaactgaaatttaaacaactgtaatattaaggaaaccagaatcaataaatcactgtcttgccagcacagctacagagtaacatgattcaggggaggaaaagttccttagagttacttttataattctttttttttttcctcttaggtttagaaatcttacaaatttaaactttatccttttaaaattatttgaacataatttagatattgtaagcttaaaatacaaatgtttatagataacctctttaccataaactaatccctggcaagccatggctctctttttttttttggtgtttaaagcctgtaaacagtttttctgaatgatcatgaacttttcttggtttagcactaggatttagctatgaagagagctcataggctttcaggtgctaattgagatctgccctgttagagtcttggggtgctagattggtcacattgacaccagtggcagggaaggcatctatgagtttgatgctttttatcacacacttcagtgtttagaaagttattaccaatacttttaaacaacactccaagaaaatttgctatatttctttctcatcactacagagagagtagatttccccatagagagcacagcctccattagtaaggttggtgactattggtaagaggtggacttcattgacaccaagtgggaggtagggaaagcccagaaatggcaggatgatatggtggttctgtcgttgggaaaggtattgggttttgctgtttgtatttatactgtataatagataccacgctttttcttattatctgtatatgtattgcttttcatgtttgatattttcccatgccaagatttgtttatatatattttcaatgttaaattaaattgatttgggtaactttcttccccaagaaagtattttcccccttaagtata

SEQ ID NO: 350779 - DNA, 4320 bp, Homo sapiens
agcggatcgcaacgaaccggaagtgctaaaagcctccgaggccaaggccgctgctactgccgccgctgcttcttagtgccgcgttcgccgcctgggttgtcaccggcgccgccgccgaggaagccactgcaaccaggaccggagtggaggcggcgcagcatgaagcggcgcaggcccgctccatagcgcacgtcgggacggtccgggcggggccggggggaaggaaaatgcaacatggcagcagcaatggaaacagaacagctgggtgttgagatatttgaaactgcggactgtgaggagaatattgaatcacaggatcggcctaaattggagcctttttatgttgagcggtattcctggagtcagcttaaaaagctgcttgccgataccagaaaatatcatggctacatgatggctaaggcaccacatgatttcatgtttgtgaagaggaatgatccagatggacctcattcagacagaatctattaccttgccatgtctggtgagaacagagaaaatacactgttttattctgaaattcccaaaactatcaatagagcagcagtcttaatgctctcttggaagcctcttttggatctttttcaggcaacactggactatggaatgtattctcgagaagaagaactattaagagaaagaaaacgcattggaacagtcggaattgcttcttacgattatcaccaaggaagtggaacatttctgtttcaagccggtagtggaatttatcacgtaaaagatggagggccacaaggatttacgcaacaacctttaaggcccaatctagtggaaactagttgtcccaacatacggatggatccaaaattatgccctgctgatccagactggattgcttttatacatagcaacgatatttggatatctaacatcgtaaccagagaagaaaggagactcacttatgtgcacaatgagctagccaacatggaagaagatgccagatcagctggagtcgctacctttgttctccaagaagaatttgatagatattctggctattggtggtgtccaaaagctgaaacaactcccagtggtggtaaaattcttagaattctatatgaagaaaatgatgaatctgaggtggaaattattcatgttacatcccctatgttggaaacaaggagggcagattcattccgttatcctaaaacaggtacagcaaatcctaaagtcacttttaagatgtcagaaataatgattgatgctgaaggaaggatccaagttgatgaagtcagaaggctggtatattttgaaggcaccaaagactcccctttagagcatcacctgtacgtagtcagttacgtaaatcctggagaggtgacaaggctgactgaccgtggctactcacattcttgctgcatcagtcagcactgtgacttctttataagtaagtatagtaaccagaagaatccacactgtgtgtccctttacaagctatcaagtcctgaagatgacccaacttgcaaaacaaaggaattttgggccaccattttggattcagcaggtcctcttcctgactatactcctccagaaattttctcttttgaaagtactactggatttacattgtatgggatgctctacaagcctcatgatctacagcctggaaagaaatatcctactgtgctgttcatatatggtggtcctcaggtgcagttggtgaataatcggtttaaaggagtcaagtatttccgcttgaataccctagcctctctaggttatgtggttgtagtgatagacaacaggggatcctgtcaccgagggcttaaatttgaaggcgcctttaaatataaaatgggtcaaatagaaattgacgatcaggtggaaggactccaatatctagcttctcgatatgatttcattgacttagatcgtgtgggcatccacggctggtcctatggaggatacctctccctgatggcattaatgcagaggtcagatatcttcagggttgctattgctggggccccagtcactctgtggatcttctatgatacaggatacacggaacgttatatgggtcaccctgaccagaatgaacagggctattacttaggatctgtggccatgcaagcagaaaagttcccctctgaaccaaatcgtttactgctcttacatggtttcctggatgagaatgtccattttgcacataccagtatattactgagttttttagtgagggctggaaagccatatgatttacagatctatcctcaggagagacacagcataagagttcctgaatcgggagaacattatgaactgcatcttttgcactaccttcaagaaaaccttggatcacgtattgctgctctaaaagtgatataattttgacctgtgtagaactctctggtatacactggctatttaaccaaatgaggaggtttaatcaacagaaaacacagaattgatcatcacattttgatacctgccatgtaacatctactcctgaaaataaatgtggtgccatgcaggggtctacggtttgtggtagtaatctaataccttaaccccacatgctcaaaatcaaatgatacatattcctgagagacccagcaataccataagaattactaaaaaaaaaaaaaaaaaaaaagacattagcaccatgtattcatactaccctattttcacttttaatagtattataaacttcatgaacttaattagtgtatttttacagtatacttttgagtttgttaaaatatgatgatattagtgattggtttggttcagttccagaatctttgactagttacagatttgatagcacttaaatgtaattgaatagcttatgcttcattgcttgggcatatccagcatgttatgaactaataactattaaacttgacttaaccagtcattcattaataatttttcaaggataacttagtggcctcctaaagacacttgttttggcactgaccagtttttagccaatttaatctgtatctagtataaataattctcatttttctttgatgatattaacagagtgggcttttccttttgcataaaggctagtaactgtatatgtagcatggatttaattagtcatgatattgataattacaggcagaaaatttttaatcaaatgattagagcttaaatatttgcaggcaagtttttttttttcctttaagaaaaggaaaaagtacacattcactagaattcttcagaaaatttagtggtgccagtttccatttggtatttccttattaaaatattctagaattttaaggagattgaagggaatcacagtggggtggggagacctgggtttggggaatgacagagagaagaggtggtgagggcctgattaaaaactaagcagaagtagttttaacaaaaatactcatgaaaatgtttggaaactgaaatttaaacaactgtaatattaaggaaaccagaatcaataaatcactgtcttgccagcacagctacagagtaacatgattcaggggaggaaaagttccttagagttacttttataattctttttttttttcctcttaggtttagaaatcttacaaatttaaactttatccttttaaaattatttgaacataatttagatattgtaagcttaaaatacaaatgtttatagataacctctttaccataaactaatccctggcaagccatggctctctttttttttttggtgtttaaagcctgtaaacagtttttctgaatgatcatgaacttttcttggtttagcactaggatttagctatgaagagagctcataggctttcaggtgctaattgagatctgccctgttagagtcttggggtgctagattggtcacattgacaccagtggcagggaaggcatctatgagtttgatgctttttatcacacacttcagtgtttagaaagttattaccaatacttttaaacaacactccaagaaaatttgctatatttctttctcatcactacagagagagtagatttccccatagagagcacagcctccattagtaaggttggtgactattggtaagaggtggacttcattgacaccaagtgggaggtagggaaagcccagaaatggcaggatgatatggtggttctgtcgttgggaaaggtattgggttttgctgtttgtatttatactgtataatagataccacgctttttcttattatctgtatatgtattgcttttcatgtttgatattttcccatgccaagatttgtttatatatattttcaatgttaaattaaattgatttgggtaactttcttccccaagaaagtattttcccccttaagtata

SEQ ID NO: 350780 - DNA, 4975 bp, Homo sapiens
agcggatcgcaacgaaccggaagtgctaaaagcctccgaggccaaggccgctgctactgccgccgctgcttcttagtgccgcgttcgccgcctgggttgtcaccggcgccgccgccgaggaagccactgcaaccaggaccggagtggaggcggcgcagcatgaagcggcgcaggcccgctccatagcgcacgtcgggacggtccgggcggggccggggggaaggctttgatggtgaggaaaggaaagattcctgtgagaagagcaggatgagcagagggattctatgcttgaagtcgagtcacttgaaaaagatctctttgaatgtggaagagatctgagcagatgaaaataaaatcaggaaaatgcaacatggcagcagcaatggaaacagaacagctgggtgttgagatatttgaaactgcggactgtgaggagaatattgaatcacaggatcggcctaaattggagcctttttatgttgagcggtattcctggagtcagcttaaaaagctgcttgccgataccagaaaatatcatggctacatgatggctaaggcaccacatgatttcatgtttgtgaagaggaatgatccagatggacctcattcagacagaatctattaccttgccatgtctggtgagaacagagaaaatacactgttttattctgaaattcccaaaactatcaatagagcagcagtcttaatgctctcttggaagcctcttttggatctttttcaggcaacactggactatggaatgtattctcgagaagaagaactattaagagaaagaaaacgcattggaacagtcggaattgcttcttacgattatcaccaaggaagtggaacatttctgtttcaagccggtagtggaatttatcacgtaaaagatggagggccacaaggatttacgcaacaacctttaaggcccaatctagtggaaactagttgtcccaacatacggatggatccaaaattatgccctgctgatccagactggattgcttttatacatagcaacgatatttggatatctaacatcgtaaccagagaagaaaggagactcacttatgtgcacaatgagctagccaacatggaagaagatgccagatcagctggagtcgctacctttgttctccaagaagaatttgatagatattctggctattggtggtgtccaaaagctgaaacaactcccagtggtggtaaaattcttagaattctatatgaagaaaatgatgaatctgaggtggaaattattcatgttacatcccctatgttggaaacaaggagggcagattcattccgttatcctaaaacaggtacagcaaatcctaaagtcacttttaagatgtcagaaataatgattgatgctgaaggaaggatcatagatgtcatagataaggaactaattcaaccttttgagattctatttgaaggagttgaatatattgccagagctggatggactcctgagggaaaatatgcttggtccatcctactagatcgctcccagactcgcctacagatagtgttgatctcacctgaattatttatcccagtagaagatgatgttatggaaaggcagagactcattgagtcagtgcctgattctgtgacgccactaattatctatgaagaaacaacagacatctggataaatatccatgacatctttcatgtttttccccaaagtcacgaagaggaaattgagtttatttttgcctctgaatgcaaaacaggtttccgtcatttatacaaaattacatctattttaaaggaaagcaaatataaacgatccagtggtgggctgcctgctccaagtgatttcaagtgtcctatcaaagaggagatagcaattaccagtggtgaatgggaagttcttggccggcatggatctaatatccaagttgatgaagtcagaaggctggtatattttgaaggcaccaaagactcccctttagagcatcacctgtacgtagtcagttacgtaaatcctggagaggtgacaaggctgactgaccgtggctactcacattcttgctgcatcagtcagcactgtgacttctttataagtaagtatagtaaccagaagaatccacactgtgtgtccctttacaagctatcaagtcctgaagatgacccaacttgcaaaacaaaggaattttgggccaccattttggattcagcaggtcctcttcctgactatactcctccagaaattttctcttttgaaagtactactggatttacattgtatgggatgctctacaagcctcatgatctacagcctggaaagaaatatcctactgtgctgttcatatatggtggtcctcaggtgcagttggtgaataatcggtttaaaggagtcaagtatttccgcttgaataccctagcctctctaggttatgtggttgtagtgatagacaacaggggatcctgtcaccgagggcttaaatttgaaggcgcctttaaatataaaatgggtcaaatagaaattgacgatcaggtggaaggactccaatatctagcttctcgatatgatttcattgacttagatcgtgtgggcatccacggctggtcctatggaggatacctctccctgatggcattaatgcagaggtcagatatcttcagggttgctattgctggggccccagtcactctgtggatcttctatgatacaggatacacggaacgttatatgggtcaccctgaccagaatgaacagggctattacttaggatctgtggccatgcaagcagaaaagttcccctctgaaccaaatcgtttactgctcttacatggtttcctggatgagaatgtccattttgcacataccagtatattactgagttttttagtgagggctggaaagccatatgatttacagatctatcctcaggagagacacagcataagagttcctgaatcgggagaacattatgaactgcatcttttgcactaccttcaagaaaaccttggatcacgtattgctgctctaaaagtgatataattttgacctgtgtagaactctctggtatacactggctatttaaccaaatgaggaggtttaatcaacagaaaacacagaattgatcatcacattttgatacctgccatgtaacatctactcctgaaaataaatgtggtgccatgcaggggtctacggtttgtggtagtaatctaataccttaaccccacatgctcaaaatcaaatgatacatattcctgagagacccagcaataccataagaattactaaaaaaaaaaaaaaaaaaaaagacattagcaccatgtattcatactaccctattttcacttttaatagtattataaacttcatgaacttaattagtgtatttttacagtatacttttgagtttgttaaaatatgatgatattagtgattggtttggttcagttccagaatctttgactagttacagatttgatagcacttaaatgtaattgaatagcttatgcttcattgcttgggcatatccagcatgttatgaactaataactattaaacttgacttaaccagtcattcattaataatttttcaaggataacttagtggcctcctaaagacacttgttttggcactgaccagtttttagccaatttaatctgtatctagtataaataattctcatttttctttgatgatattaacagagtgggcttttccttttgcataaaggctagtaactgtatatgtagcatggatttaattagtcatgatattgataattacaggcagaaaatttttaatcaaatgattagagcttaaatatttgcaggcaagtttttttttttcctttaagaaaaggaaaaagtacacattcactagaattcttcagaaaatttagtggtgccagtttccatttggtatttccttattaaaatattctagaattttaaggagattgaagggaatcacagtggggtggggagacctgggtttggggaatgacagagagaagaggtggtgagggcctgattaaaaactaagcagaagtagttttaacaaaaatactcatgaaaatgtttggaaactgaaatttaaacaactgtaatattaaggaaaccagaatcaataaatcactgtcttgccagcacagctacagagtaacatgattcaggggaggaaaagttccttagagttacttttataattctttttttttttcctcttaggtttagaaatcttacaaatttaaactttatccttttaaaattatttgaacataatttagatattgtaagcttaaaatacaaatgtttatagataacctctttaccataaactaatccctggcaagccatggctctctttttttttttggtgtttaaagcctgtaaacagtttttctgaatgatcatgaacttttcttggtttagcactaggatttagctatgaagagagctcataggctttcaggtgctaattgagatctgccctgttagagtcttggggtgctagattggtcacattgacaccagtggcagggaaggcatctatgagtttgatgctttttatcacacacttcagtgtttagaaagttattaccaatacttttaaacaacactccaagaaaatttgctatatttctttctcatcactacagagagagtagatttccccatagagagcacagcctccattagtaaggttggtgactattggtaagaggtggacttcattgacaccaagtgggaggtagggaaagcccagaaatggcaggatgatatggtggttctgtcgttgggaaaggtattgggttttgctgtttgtatttatactgtataatagataccacgctttttcttattatctgtatatgtattgcttttcatgtttgatattttcccatgccaagatttgtttatatatattttcaatgttaaattaaattgatttgggtaactttcttccccaagaaagtattttcccccttaagtata

SEQ ID NO: 350781 - DNA, 4686 bp, Homo sapiens
agcggatcgcaacgaaccggaagtgctaaaagcctccgaggccaaggccgctgctactgccgccgctgcttcttagtgccgcgttcgccgcctgggttgtcaccggcgccgccgccgaggaagccactgcaaccaggaccggagtggaggcggcgcagcatgaagcggcgcaggcccgctccatagcgcacgtcgggacggtccgggcggggccggggggaaggaaaatgcaacatggcagcagcaatggaaacagaacagctgggtgttgagatatttgaaactgcggactgtgaggagaatattgaatcacaggatcggcctaaattggagcctttttatgttgagcggtattcctggagtcagcttaaaaagctgcttgccgataccagaaaatatcatggctacatgatggctaaggcaccacatgatttcatgtttgtgaagaggaatgatccagatggacctcattcagacagaatctattaccttgccatgtctggtgagaacagagaaaatacactgttttattctgaaattcccaaaactatcaatagagcagcagtcttaatgctctcttggaagcctcttttggatctttttcaggcaacactggactatggaatgtattctcgagaagaagaactattaagagaaagaaaacgcattggaacagtcggaattgcttcttacgattatcaccaaggaagtggaacatttctgtttcaagccggtagtggaatttatcacgtaaaagatggagggccacaaggatttacgcaacaacctttaaggcccaatctagtggaaactagttgtcccaacatacggatggatccaaaattatgccctgctgatccagactggattgcttttatacatagcaacgatatttggatatctaacatcgtaaccagagaagaaaggagactcacttatgtgcacaatgagctagccaacatggaagaagatgccagatcagctggagtcgctacctttgttctccaagaagaatttgatagatattctggctattggtggtgtccaaaagctgaaacaactcccagtggtggtaaaattcttagaattctatatgaagaaaatgatgaatctgaggtggaaattattcatgttacatcccctatgttggaaacaaggagggcagattcattccgttatcctaaaacaggtacagcaaatcctaaagtcacttttaagatgtcagaaataatgattgatgctgaaggaaggatcatagatgtcatagataaggaactaattcaaccttttgagattctatttgaaggagttgaatatattgccagagctggatggactcctgagggaaaatatgcttggtccatcctactagatcgctcccagactcgcctacagatagtgttgatctcacctgaattatttatcccagtagaagatgatgttatggaaaggcagagactcattgagtcagtgcctgattctgtgacgccactaattatctatgaagaaacaacagacatctggataaatatccatgacatctttcatgtttttccccaaagtcacgaagaggaaattgagtttatttttgcctctgaatgcaaaacaggtttccgtcatttatacaaaattacatctattttaaaggaaagcaaatataaacgatccagtggtgggctgcctgctccaagtgatttcaagtgtcctatcaaagaggagatagcaattaccagtggtgaatgggaagttcttggccggcatggatctaatatccaagttgatgaagtcagaaggctggtatattttgaaggcaccaaagactcccctttagagcatcacctgtacgtagtcagttacgtaaatcctggagaggtgacaaggctgactgaccgtggctactcacattcttgctgcatcagtcagcactgtgacttctttataagtaagtatagtaaccagaagaatccacactgtgtgtccctttacaagctatcaagtcctgaagatgacccaacttgcaaaacaaaggaattttgggccaccattttggattcagcaggtcctcttcctgactatactcctccagaaattttctcttttgaaagtactactggatttacattgtatgggatgctctacaagcctcatgatctacagcctggaaagaaatatcctactgtgctgttcatatatggtggtcctcaggtgcagttggtgaataatcggtttaaaggagtcaagtatttccgcttgaataccctagcctctctaggttatgtggttgtagtgatagacaacaggggatcctgtcaccgagggcttaaatttgaaggcgcctttaaatataaaatggttgctattgctggggccccagtcactctgtggatcttctatgatacaggatacacggaacgttatatgggtcaccctgaccagaatgaacagggctattacttaggatctgtggccatgcaagcagaaaagttcccctctgaaccaaatcgtttactgctcttacatggtttcctggatgagaatgtccattttgcacataccagtatattactgagttttttagtgagggctggaaagccatatgatttacagatctatcctcaggagagacacagcataagagttcctgaatcgggagaacattatgaactgcatcttttgcactaccttcaagaaaaccttggatcacgtattgctgctctaaaagtgatataattttgacctgtgtagaactctctggtatacactggctatttaaccaaatgaggaggtttaatcaacagaaaacacagaattgatcatcacattttgatacctgccatgtaacatctactcctgaaaataaatgtggtgccatgcaggggtctacggtttgtggtagtaatctaataccttaaccccacatgctcaaaatcaaatgatacatattcctgagagacccagcaataccataagaattactaaaaaaaaaaaaaaaaaaaaagacattagcaccatgtattcatactaccctattttcacttttaatagtattataaacttcatgaacttaattagtgtatttttacagtatacttttgagtttgttaaaatatgatgatattagtgattggtttggttcagttccagaatctttgactagttacagatttgatagcacttaaatgtaattgaatagcttatgcttcattgcttgggcatatccagcatgttatgaactaataactattaaacttgacttaaccagtcattcattaataatttttcaaggataacttagtggcctcctaaagacacttgttttggcactgaccagtttttagccaatttaatctgtatctagtataaataattctcatttttctttgatgatattaacagagtgggcttttccttttgcataaaggctagtaactgtatatgtagcatggatttaattagtcatgatattgataattacaggcagaaaatttttaatcaaatgattagagcttaaatatttgcaggcaagtttttttttttcctttaagaaaaggaaaaagtacacattcactagaattcttcagaaaatttagtggtgccagtttccatttggtatttccttattaaaatattctagaattttaaggagattgaagggaatcacagtggggtggggagacctgggtttggggaatgacagagagaagaggtggtgagggcctgattaaaaactaagcagaagtagttttaacaaaaatactcatgaaaatgtttggaaactgaaatttaaacaactgtaatattaaggaaaccagaatcaataaatcactgtcttgccagcacagctacagagtaacatgattcaggggaggaaaagttccttagagttacttttataattctttttttttttcctcttaggtttagaaatcttacaaatttaaactttatccttttaaaattatttgaacataatttagatattgtaagcttaaaatacaaatgtttatagataacctctttaccataaactaatccctggcaagccatggctctctttttttttttggtgtttaaagcctgtaaacagtttttctgaatgatcatgaacttttcttggtttagcactaggatttagctatgaagagagctcataggctttcaggtgctaattgagatctgccctgttagagtcttggggtgctagattggtcacattgacaccagtggcagggaaggcatctatgagtttgatgctttttatcacacacttcagtgtttagaaagttattaccaatacttttaaacaacactccaagaaaatttgctatatttctttctcatcactacagagagagtagatttccccatagagagcacagcctccattagtaaggttggtgactattggtaagaggtggacttcattgacaccaagtgggaggtagggaaagcccagaaatggcaggatgatatggtggttctgtcgttgggaaaggtattgggttttgctgtttgtatttatactgtataatagataccacgctttttcttattatctgtatatgtattgcttttcatgtttgatattttcccatgccaagatttgtttatatatattttcaatgttaaattaaattgatttgggtaactttcttccccaagaaagtattttcccccttaagtata

SEQ ID NO: 350782 - DNA, 4693 bp, Homo sapiens
agcggatcgcaacgaaccggaagtgctaaaagcctccgaggccaaggccgctgctactgccgccgctgcttcttagtgccgcgttcgccgcctgggttgtcaccggcgccgccgccgaggaagccactgcaaccaggaccggagtggaggcggcgcagcatgaagcggcgcaggcccgctccatagcgcacgtcgggacggtccgggcggggccggggggaaggaaaatgcaacatggcagcagcaatggaaacagaacagctgggtgttgagatatttgaaactgcggactgtgaggagaatattgaatcacaggatcggcctaaattggagcctttttatgttgagcggtattcctggagtcagcttaaaaagctgcttgccgataccagaaaatatcatggctacatgatggctaaggcaccacatgatttcatgtttgtgaagaggaatgatccagatggacctcattcagacagaatctattaccttgccatgtctggtgagaacagagaaaatacactgttttattctgaaattcccaaaactatcaatagagcagcagtcttaatgctctcttggaagcctcttttggatctttttcaggcaacactggactatggaatgtattctcgagaagaagaactattaagagaaagaaaacgcattggaacagtcggaattgcttcttacgattatcaccaaggaagtggaacatttctgtttcaagccggtagtggaatttatcacgtaaaagatggagggccacaaggatttacgcaacaacctttaaggcccaatctagtggaaactagttgtcccaacatacggatggatccaaaattatgccctgctgatccagactggattgcttttatacatagcaacgatatttggatatctaacatcgtaaccagagaagaaaggagactcacttatgtgcacaatgagctagccaacatggaagaagatgccagatcagctggagtcgctacctttgttctccaagaagaatttgatagatattctggctattggtggtgtccaaaagctgaaacaactcccagtggtggtaaaattcttagaattctatatgaagaaaatgatgaatctgaggtggaaattattcatgttacatcccctatgttggaaacaaggagggcagattcattccgttatcctaaaacaggtacagcaaatcctaaagtcacttttaagatgtcagaaataatgattgatgctgaaggaaggatcatagatgtcatagataaggaactaattcaaccttttgagattctatttgaaggagttgaatatattgccagagctggatggactcctgagggaaaatatgcttggtccatcctactagatcgctcccagactcgcctacagatagtgttgatctcacctgaattatttatcccagtagaagatgatgttatggaaaggcagagactcattgagtcagtgcctgattctgtgacgccactaattatctatgaagaaacaacagacatctggataaatatccatgacatctttcatgtttttccccaaagtcacgaagaggaaattgagtttatttttgcctctgaatgcaaaacaggtttccgtcatttatacaaaattacatctattttaaaggaaagcaaatataaacgatccagtggtgggctgcctgctccaagtgatttcaagtgtcctatcaaagaggagatagcaattaccagtggtgaatgggaagttcttggccggcatggatctaatatccaagttgatgaagtcagaaggctggtatattttgaaggcaccaaagactcccctttagagcatcacctgtacgtagtcagttacgtaaatcctggagaggtgacaaggctgactgaccgtggctactcacattcttgctgcatcagtcagcactgtgacttctttataagtaagtatagtaaccagaagaatccacactgtgtgtccctttacaagctatcaagtcctgaagatgacccaacttgcaaaacaaaggaattttgggccaccattttggattcagcaggtgcagttggtgaataatcggtttaaaggagtcaagtatttccgcttgaataccctagcctctctaggttatgtggttgtagtgatagacaacaggggatcctgtcaccgagggcttaaatttgaaggcgcctttaaatataaaatgggtcaaatagaaattgacgatcaggtggaaggactccaatatctagcttctcgatatgatttcattgacttagatcgtgtgggcatccacggctggtcctatggaggatacctctccctgatggcattaatgcagaggtcagatatcttcagggttgctattgctggggccccagtcactctgtggatcttctatgatacaggatacacggaacgttatatgggtcaccctgaccagaatgaacagggctattacttaggatctgtggccatgcaagcagaaaagttcccctctgaaccaaatcgtttactgctcttacatggtttcctggatgagaatgtccattttgcacataccagtatattactgagttttttagtgagggctggaaagccatatgatttacagatctatcctcaggagagacacagcataagagttcctgaatcgggagaacattatgaactgcatcttttgcactaccttcaagaaaaccttggatcacgtattgctgctctaaaagtgatataattttgacctgtgtagaactctctggtatacactggctatttaaccaaatgaggaggtttaatcaacagaaaacacagaattgatcatcacattttgatacctgccatgtaacatctactcctgaaaataaatgtggtgccatgcaggggtctacggtttgtggtagtaatctaataccttaaccccacatgctcaaaatcaaatgatacatattcctgagagacccagcaataccataagaattactaaaaaaaaaaaaaaaaaaaaagacattagcaccatgtattcatactaccctattttcacttttaatagtattataaacttcatgaacttaattagtgtatttttacagtatacttttgagtttgttaaaatatgatgatattagtgattggtttggttcagttccagaatctttgactagttacagatttgatagcacttaaatgtaattgaatagcttatgcttcattgcttgggcatatccagcatgttatgaactaataactattaaacttgacttaaccagtcattcattaataatttttcaaggataacttagtggcctcctaaagacacttgttttggcactgaccagtttttagccaatttaatctgtatctagtataaataattctcatttttctttgatgatattaacagagtgggcttttccttttgcataaaggctagtaactgtatatgtagcatggatttaattagtcatgatattgataattacaggcagaaaatttttaatcaaatgattagagcttaaatatttgcaggcaagtttttttttttcctttaagaaaaggaaaaagtacacattcactagaattcttcagaaaatttagtggtgccagtttccatttggtatttccttattaaaatattctagaattttaaggagattgaagggaatcacagtggggtggggagacctgggtttggggaatgacagagagaagaggtggtgagggcctgattaaaaactaagcagaagtagttttaacaaaaatactcatgaaaatgtttggaaactgaaatttaaacaactgtaatattaaggaaaccagaatcaataaatcactgtcttgccagcacagctacagagtaacatgattcaggggaggaaaagttccttagagttacttttataattctttttttttttcctcttaggtttagaaatcttacaaatttaaactttatccttttaaaattatttgaacataatttagatattgtaagcttaaaatacaaatgtttatagataacctctttaccataaactaatccctggcaagccatggctctctttttttttttggtgtttaaagcctgtaaacagtttttctgaatgatcatgaacttttcttggtttagcactaggatttagctatgaagagagctcataggctttcaggtgctaattgagatctgccctgttagagtcttggggtgctagattggtcacattgacaccagtggcagggaaggcatctatgagtttgatgctttttatcacacacttcagtgtttagaaagttattaccaatacttttaaacaacactccaagaaaatttgctatatttctttctcatcactacagagagagtagatttccccatagagagcacagcctccattagtaaggttggtgactattggtaagaggtggacttcattgacaccaagtgggaggtagggaaagcccagaaatggcaggatgatatggtggttctgtcgttgggaaaggtattgggttttgctgtttgtatttatactgtataatagataccacgctttttcttattatctgtatatgtattgcttttcatgtttgatattttcccatgccaagatttgtttatatatattttcaatgttaaattaaattgatttgggtaactttcttccccaagaaagtattttcccccttaagtata

SEQ ID NO: 350783 - DNA, 2964 bp, Homo sapiens
agcggatcgcaacgaaccggaagtgctaaaagcctccgaggccaaggccgctgctactgccgccgctgcttcttagtgccgcgttcgccgcctgggttgtcaccggcgccgccgccgaggaagccactgcaaccaggaccggagtggaggcggcgcagcatgaagcggcgcaggcccgctccatagcgcacgtcgggacggtccgggcggggccggggggaaggaaaatgcaacatggcagcagcaatggaaacagaacagctgggtgttgagatatttgaaactgcggactgtgaggagaatattgaatcacaggatcggcctaaattggagcctttttatgttgagcggtattcctggagtcagcttaaaaagctgcttgccgataccagaaaatatcatggctacatgatggctaaggcaccacatgatttcatgtttgtgaagaggaatgatccagatggacctcattcagacagaatctattaccttgccatgtctggtgagaacagagaaaatacactgttttattctgaaattcccaaaactatcaatagagcagcagtcttaatgctctcttggaagcctcttttggatctttttcaggcaacactggactatggaatgtattctcgagaagaagaactattaagagaaagaaaacgcattggaacagtcggaattgcttcttacgattatcaccaaggaagtggaacatttctgtttcaagccggtagtggaatttatcacgtaaaagatggagggccacaaggatttacgcaacaacctttaaggcccaatctagtggaaactagttgtcccaacatacggatggatccaaaattatgccctgctgatccagactggattgcttttatacatagcaacgatatttggatatctaacatcgtaaccagagaagaaaggagactcacttatgtgcacaatgagctagccaacatggaagaagatgccagatcagctggagtcgctacctttgttctccaagaagaatttgatagatattctggctattggtggtgtccaaaagctgaaacaactcccagtggtggtaaaattcttagaattctatatgaagaaaatgatgaatctgaggtggaaattattcatgttacatcccctatgttggaaacaaggagggcagattcattccgttatcctaaaacaggtacagcaaatcctaaagtcacttttaagatgtcagaaataatgattgatgctgaaggaaggatcatagatgtcatagataaggaactaattcaaccttttgagattctatttgaaggagttgaatatattgccagagctggatggactcctgagggaaaatatgcttggtccatcctactagatcgctcccagactcgcctacagatagtgttgatctcacctgaattatttatcccagtagaagatgatgttatggaaaggcagagactcattgagtcagtgcctgattctgtgacgccactaattatctatgaagaaacaacagacatctggataaatatccatgacatctttcatgtttttccccaaagtcacgaagaggaaattgagtttatttttgcctctgaatgcaaaacaggtttccgtcatttatacaaaattacatctattttaaaggaaagcaaatataaacgatccagtggtgggctgcctgctccaagtgatttcaagtgtcctatcaaagaggagatagcaattaccagtggtgaatgggaagttcttggccggcatggatctaatatccaagttgatgaagtcagaaggctggtatattttgaaggcaccaaagactcccctttagagcatcacctgtacgtagtcagttacgtaaatcctggagaggtgacaaggctgactgaccgtggctactcacattcttgctgcatcagtcagcactgtgacttctttataagtaagtatagtaaccagaagaatccacactgtgtgtccctttacaagctatcaagtcctgaagatgacccaacttgcaaaacaaaggaattttgggccaccattttggattcagcaggtcctcttcctgactatactcctccagaaattttctcttttgaaagtactactggatttacattgtatgggatgctctacaagcctcatgatctacagcctggaaagaaatatcctactgtgctgttcatatatggtggtcctcagggtcaaatagaaattgacgatcaggtggaaggactccaatatctagcttctcgatatgatttcattgacttagatcgtgtgggcatccacggctggtcctatggaggatacctctccctgatggcattaatgcagaggtcagatatcttcagggttgctattgctggggccccagtcactctgtggatcttctatgatacaggatacacggaacgttatatgggtcaccctgaccagaatgaacagggctattacttaggatctgtggccatgcaagcagaaaagttcccctctgaaccaaatcgtttactgctcttacatggtttcctggatgagaatgtccattttgcacataccagtatattactgagttttttagtgagggctggaaagccatatgatttacagatctatcctcaggagagacacagcataagagttcctgaatcgggagaacattatgaactgcatcttttgcactaccttcaagaaaaccttggatcacgtattgctgctctaaaagtgatataattttgacctgtgtagaactctctggtatacactggctatttaaccaaatgaggaggtttaatcaacagaaaacacagaattgatcatcacattttgatacctgccatgtaacatctactcctgaaaataaatgtggtgccatgcaggggtctacggtttgtggtagtaatctaataccttaaccccacatgctcaaaatcaaatgatacatattcctgagagacccag

SEQ ID NO: 350784 - DNA, 2800 bp, Homo sapiens
agcggatcgcaacgaaccggaagtgctaaaagcctccgaggccaaggccgctgctactgccgccgctgcttcttagtgccgcgttcgccgcctgggttgtcaccggcgccgccgccgaggaagccactgcaaccaggaccggagtggaggcggcgcagcatgaagcggcgcaggcccgctccatagcgcacgtcgggacggtccgggcggggccggggggaaggaaaatgcaacatggcagcagcaatggaaacagaacagctgggtgttgagatatttgaaactgcggactgtgaggagaatattgaatcacaggatcggcctaaattggagcctttttatgttgagcggtattcctggagtcagcttaaaaagctgcttgccgataccagaaaatatcatggctacatgatggctaaggcaccacatgatttcatgtttgtgaagaggaatgatccagatggacctcattcagacagaatctattaccttgccatgtctggtgagaacagagaaaatacactgttttattctgaaattcccaaaactatcaatagagcagcagtcttaatgctctcttggaagcctcttttggatctttttcaggcaacactggactatggaatgtattctcgagaagaagaactattaagagaaagaaaacgcattggaacagtcggaattgcttcttacgattatcaccaaggaagtggaacatttctgtttcaagccggtagtggaatttatcacgtaaaagatggagggccacaaggatttacgcaacaacctttaaggcccaatctagtggaaactagttgtcccaacatacggatggatccaaaattatgccctgctgatccagactggattgcttttatacatagcaacgatatttggatatctaacatcgtaaccagagaagaaaggagactcacttatgtgcacaatgagctagccaacatggaagaagatgccagatcagctggagtcgctacctttgttctccaagaagaatttgatagatattctggctattggtggtgtccaaaagctgaaacaactcccagtggtggtaaaattcttagaattctatatgaagaaaatgatgaatctgaggtggaaattattcatgttacatcccctatgttggaaacaaggagggcagattcattccgttatcctaaaacaggtacagcaaatcctaaagtcacttttaagatgtcagaaataatgattgatgctgaaggaaggatcatagatgtcatagataaggaactaattcaaccttttgagattctatttgaaggagttgaatatattgccagagctggatggactcctgagggaaaatatgcttggtccatcctactagatcgctcccagactcgcctacagatagtgttgatctcacctgaattatttatcccagtagaagatgatgttatggaaaggcagagactcattgagtcagtgcctgattctgtgacgccactaattatctatgaagaaacaacagacatctggataaatatccatgacatctttcatgtttttccccaaagtcacgaagaggaaattgagtttatttttgcctctgaatgcaaaacaggtttccgtcatttatacaaaattacatctattttaaaggaaagcaaatataaacgatccagtggtgggctgcctgctccaagtgatttcaagtgtcctatcaaagaggagatagcaattaccagtggtgaatgggaagttcttggccggcatggatctaatatccaagttgatgaagtcagaaggctggtatattttgaaggcaccaaagactcccctttagagcatcacctgtacgtagtcagttacgtaaatcctggagaggtgacaaggctgactgaccgtggctactcacattcttgctgcatcagtcagcactgtgacttctttataagtaagtatagtaaccagaagaatccacactgtgtgtccctttacaagctatcaagtcctgaagatgacccaacttgcaaaacaaaggaattttgggccaccattttggattcagcaggtcctcttcctgactatactcctccagaaattttctcttttgaaagtactactggatttacattgtatgggatgctctacaagcctcatgatctacagcctggaaagaaatatcctactgtgctgttcatatatggtggtcctcaggtgcagttggtgaataatcggtttaaaggagtcaagtatttccgcttgaataccctagcctctctaggttatgtggttgtagtgatagacaacaggggatcctgtcaccgagggcttaaatttgaaggcgcctttaaatataaaatggaagctttaaatgctaccttttagagatgccccatgtcctttctgctgctttgggaaatgatgagaatccgatgttccttttgcacagtaaggcagttactgtgtttgccagtgttattggacatgctgagtaagacatggggattttctcccacagccagttctttgaccttatgttgtattctcatgtaagtttttttgtttttatttttgtttttggctcagtgaagtgagattgcgtgcactggcaggcctagtaatatagacaaggtggtggtggtaggaattaggactttaaagaagtagtatgttcagttcctagaggtagtataatagggaaataagaagacagggcctcaagagcaattccttctgctttactgcactaaaaattaaaaaggagaagtaggccaggtgcagtggctcacgcgtgtaatcccagcacttt

SEQ ID NO: 350785 - DNA, 480 bp, Homo sapiens
tgatctagaggatccctcgacggacgcatcacagtcgcatcatatctctctaccaaaacagaagcagtataggaccgacaagtgtacctctgcactcaatgctggaatcaaatccaaagcttttaattctctcaacaagatgtaaacaggaaagaaatctagttgagcatgaagataggatctaacagcttttccagttgttagatgactttgtggccatcttgttattgagtaagaaaataaagcatggacatcatgaaaataacagatgttacccaaactcatcttctaaaatctgtgcatttccatggtggctgacacacttgtcatgtggtctgttagtgtttgccaagaaccattgcaaataaattgaacatcaaagatccaagtttgtactatccctaaagactggagataagcattggaggctcttttaaaaaatgctagttactgaatgcgtcccgtcgaagttgggtaccg

SEQ ID NO: 350786 - DNA, 250 bp, Homo sapiens
tttgcctaaggggataaggaaaaataatgtgaaagttgcagtccttatcagaagtaattgattagaattcagcaatgaatatgccaaatcgtacttatttcagagtaagtttttcatttttttaggttgtagggagtttttttcctactgagtgttattagattattttaatgttactattgttattaggcaattaaaatgtttttaagcaagctttaaggcattaacctcccccttctgtcgtcttctc

SEQ ID NO: 350787 - DNA, 593 bp, Homo sapiens
gaggtgttctagaggatcccgtctacatagtgtagtctgaactgcatagtgatggccgtagagtcgctgagagggctcgaggggtgggctggtatctcagaaagtgcctgacacactaaccaagctgagtttcctatgggaacaattgaagtaaactttttgttctggtcctttttggtcgaggagtaacaatacaaatggattttgggagtgactcaagaagtgaagaatgcacaagaatggatcacaagatggaatttatcaaaccctagccttgcttgtttaatttcatttctttttctttattttgtccctttttttgtttttgtttttgtttttgttttgttaaatctctttcactttaacttgtgagctggttttcccagttctttgtaaatggtatttcattaagggttcataacgtgttgcaaattatattgggagatgattagtagagctcaaccttaagataaagcaaattttcatgtggtaaattaggatacagtgttgtgaagctcattgtgagtcttaatttgtgtgtatggactcataaggtacattttattcttgaaacattaaaacactgataagta

SEQ ID NO: 350788 - DNA, 4111 bp, Homo sapiens
cagccgcgcgagaaccgccgggttgccggggcgacgcttccggctggcgcgcgcagccccgggagcaggggagttgtgaaatgggcggctagatctgcccggcgctgtgaattcgccagcgggagcgcgctcgcggccgcgcgttctccgctttcccggctccgtcgctgacgcgtcgtagacgttggggagcgggaaggcaacggcagcgggatcgggatgaacagcggcggcggcttcggtttgggcttaggcttcggcctcacccccacgtcggtgattcaggtgacgaatctgtcgtcggcggtgaccagcgagcagatgcggacgcttttttccttcctaggagaaatcgaggagctgcggctctaccccccggacaacgcacctcttgctttttcctccaaagtatgttatgttaagtttcgtgatccatcaagtgttggcgtggcccagcatctaactaacacggtttttattgacagagctctgatagttgttccttgtgcagaaggtaaaatcccagaggaatccaaagccctctctttattggctcctgctccaaccatgacaagtctgatgcctggtgcaggattgcttccaataccgaccccaaatcctttgactactcttggtgtttcacttagcagtttgggagctataccagcagcagcactagaccccaacattgcaacacttggagagataccacagccaccacttatgggaaacgtggatccttccaaaatagatgaaattaggagaacggtttatgttggaaatctgaattcccagacaacgacagctgatcaactacttgaattttttaaacaagttggagaagtgaagtttgtgcggatggcaggtgatgagactcagccaactcggtttgcttttgtggaatttgcagaccaaaattctgtaccaagggcccttgcttttaatggagttatgtttggagacaggccactgaaaataaatcactccaacaatgcaatagtaaaaccccctgagatgacacctcaggctgcagctaaggagttagaagaagtaatgaagcgagtacgagaagctcagtcatttatctcagcagctattgaaccagagtctggaaagagcaatgaaagaaaaggcggtcgatctcgttcccatactcgctcaaaatccaggtctagctcaaaatcccattctagaaggaaaagatcacaatcaaaacacaggagtagatcccataatagatcacgttcaagacagaaagacagacgtagatctaagagcccacataaaaaacgctctaaatcaagggagagacggaagtcaaggagtcgttcgcattcacgggacaagagaaaagacactcgagaaaagatcaaggaaaaggaaagagtgaaagagaaagacagggaaaaggagagagagagggaaaaggaacgtgaaaaagaaaaggaacggggtaaaaacaaagaccgggacaaggaacgggaaaaggaccgggaaaaagacaaggaaaaggacagagagagagaacgggaaaaagagcatgagaaggatcgagacaaagagaaggaaaaggaacaggacaaagaaaaggaacgagaaaaagacagatccaaagagatagatgaaaaaagaaagaaggataaaaaatccagaacaccacccaggagttacaatgcatcgcgaagatctcgtagttccagcagggaaaggcgtaggaggaggagcaggagttcttccagatcgccaagaacatcaaaaaccataaaaaggaaatcttctagatctccgtcccccaggagcagaaataagaaggataaaaagagagaaaaagaaagggaccacatcagtgaaagaagagagagagaacgttcaacgtctatgagaaagagttctaatgatagagatgggaaggagaagttggagaagaacagtacttcacttaaagagaaagagcacaataaagaaccagattcaagtgtgagcaaagaagtagatgacaaggatgcaccaaggactgaggaaaacaaaatacagcacaatgggaattgtcagctgaatgaagaaaacctctctaccaaaacagaagcagtataggaccgacaagtgtacctctgcactcaatgctggaatcaaatccaaagcttttaattctctcaacaagatgtaaacaggaaagaaatctagttgagcatgaagataggatctaacagcttttccagttgttagatgactttgtggccatcttgttattgagtaagaaaataaagcatggacatcatgaaaataacagatgttacccaaactcatcttctaaaatctgtgcatttccatggtggctgacacacttgtcatgtggtctgttagtgtttgccaagaaccattgcaaataaattgaacatcaaagatccaagtttgtactatccctaaagactggagataagcattggaggctcttttaaaaaatgctagttactgaattttgtattgttttacttttttttttatttcaatatatacagtttgatgatgtgcttgaaattggtgcaaatatatacacacccttgtaagtgcaaagtatgtaagaagttttaacatttacttcacaggacttgtgattgtgttaaattctcactattgtgttttcttttgctcactgtttaggacaatttttctttaaaatagttttgcagattaaaattgcttaaataagtggattaaaaaactgacaatgcatgctactgttctctttcaaaaggaagagcaaccgtgttgaatactaataatgatgaattagtattcagtgtttagaatcattgggactacccacaaagtgagcatttctttttaaattttcttgacatttccaagcttattatgaataatattgcagtgtgtcttgtcagctgtaggtggcaaaggtgcccttataaaaaaggaaactggcttttcaaaatgggctatgggagcacaagctgaagctttagtgccttctacaatgtggtatactgttttctagaattttatatgtgctagtcattctcaattcatatggaatctagatggatatttcatgcatacccatagagaagtgtgtaagtgatatgtcagaagagcttcttactgatttcacctaaaatgagaaggaagtcctgttttcaagaatgacattagagtcatgcagctttgggaccatcagttttatactgtgataattgaaaatgaaacatgttcttattttccttaaattgaagaaaaccctttagttgtctacattggatggccttattacctctcaatcatcttttcataaatgatgtgcagaaattgtacttaaggacttaggagtatatgggaggttattggttttatgtttaaggatacgtttacttgagtttaagatacaggtcatccatcattcttaggctcactttttacagaaagtatgcaaatagtaaagtgacagcactgctaatgtttttccccagtactataacttgtggtttctgaactcattattgttgtatttccaaaaaagtaataccttttaattagtgtattaaaagttaagtataattattttaatgcaatctaatacaatcagattactcagttgccttacctcatgggaagagttacttttttagatctaaaaagctgaatagcatgttagttacttggtttcaacttgagttttcttttaatgttaataagattgaaactttagtatttagtggggaatggaaagagttgcccttgttgcaagtaatgaagcctgatttgattatgaagctgcttaatcactcttcatgtgttcagaattactgttttttttgtttgtttttcctttttgtcactgtgtacattaaaattttggaagatgctttactatgtaaagtatagatggtcattttaatcattcagccacatacggttggctggtaaacagcttattctgatacaagaatgcttgggtgcatatggaaagattgtgaaagagtgtgtcttgcatcaacagctgtcttatttatgatatataagtagaaatagagcaaatgttggaatctgttatttttagtaccatgtctttaataaagctaagtattttagagga

SEQ ID NO: 350789 - DNA, 4882 bp, Homo sapiens
cagccgcgcgagaaccgccgggttgccggggcgacgcttccggctggcgcgcgcagccccgggagcaggggagttgtgaaatgggcggctagatctgcccggcgctgtgaattcgccagcgggagcgcgctcgcggccgcgcgttctccgctttcccggctccgtcgctgacgcgtcgtagacgttggggagcgggaaggcaacggcagcgggatcgggatgaacagcggcggcggcttcggtttgggcttaggcttcggcctcacccccacgtcggtgattcaggtgacgaatctgtcgtcggcggtgaccagcgagcagatgcggacgcttttttccttcctaggagaaatcgaggagctgcggctctaccccccggaagtaagtgctggagctcggctgggggaggggcgcgggcgccatagagacctcgggagccgaggcgtggaggagagcgcggacgcgggcgcgcggtgcatgtcacgtgatcgcgccggcttaccttggtgcccatatttgattagggcacccgggttccgccgtcctgctctccttagtcggatttggggggttaactactgcacggagcccttaccaaggatttagaatggttgccctttctgtgcctccgggacttgtgttcgctgctgggtcttcgaattccgtgcccccaccctcttatttccccccgaacttaagatggccgcaggtgggcccggaacagccctcatggcaaacgtctcagagcgtttttccactctgaaaatcgcggagaccgcgcctgagccacagtccagtttttaaggccttggtgtcaggccgttttgctgacgagaaagcctgctgctggtgacaagatggaactggggctgtgtttgtttcccaggacggtcgcacaaacttagcattttggtttatctaaccgagcgcatccatgttcccaaagatcatgtctgttagcccttttgacagcagattaaattttcctcctgaaaggtcacactgtcccaaagctttcagaaaaagtcaacgcacctcttgctttttcctccaaagtatgttatgttaagtttcgtgatccatcaagtgttggcgtggcccagcatctaactaacacggtttttattgacagagctctgatagttgttccttgtgcagaagtgatgcagccaacacgaacggttgtcatgtgtaacacaactttcgatcaccgcgaaaacaccgtcctgggaaagcgtccatgcttgatatcgtttggttcatgaacattaagtttccagtacaggtaaaatcccagaggaatccaaagccctctctttattggctcctgctccaaccatgacaagtctgatgcctggtgcaggattgcttccaataccgaccccaaatcctttgactactcttggtgtttcacttagcagtttgggagctataccagcagcagcactagaccccaacattgcaacacttggagagataccacagccaccacttatgggaaacgtggatccttccaaaatagatgaaattaggagaacggtttatgttggaaatctgaattcccagacaacgacagctgatcaactacttgaattttttaaacaagttggagaagtgaagtttgtgcggatggcaggtgatgagactcagccaactcggtttgcttttgtggaatttgcagaccaaaattctgtaccaagggcccttgcttttaatggagttatgtttggagacaggccactgaaaataaatcactccaacaatgcaatagtaaaaccccctgagatgacacctcaggctgcagctaaggagttagaagaagtaatgaagcgagtacgagaagctcagtcatttatctcagcagctattgaaccagagtctggaaagagcaatgaaagaaaaggcggtcgatctcgttcccatactcgctcaaaatccaggtctagctcaaaatcccattctagaaggaaaagatcacaatcaaaacacaggagtagatcccataatagatcacgttcaagacagaaagacagacgtagatctaagagcccacataaaaaacgctctaaatcaagggagagacggaagtcaaggagtcgttcgcattcacgggacaagagaaaagacactcgagaaaagatcaaggaaaaggaaagagtgaaagagaaagacagggaaaaggagagagagagggaaaaggaacgtgaaaaagaaaaggaacggggtaaaaacaaagaccgggacaaggaacgggaaaaggaccgggaaaaagacaaggaaaaggacagagagagagaacgggaaaaagagcatgagaaggatcgagacaaagagaaggaaaaggaacaggacaaagaaaaggaacgagaaaaagacagatccaaagagatagatgaaaaaagaaagaaggataaaaaatccagaacaccacccaggagttacaatgcatcgcgaagatctcgtagttccagcagggaaaggcgtaggaggaggagcaggagttcttccagatcgccaagaacatcaaaaaccataaaaaggaaatcttctagatctccgtcccccaggagcagaaataagaaggataaaaagagagaaaaagaaagggaccacatcagtgaaagaagagagagagaacgttcaacgtctatgagaaagagttctaatgatagagatgggaaggagaagttggagaagaacagtacttcacttaaagagaaagagcacaataaagaaccagattcaagtgtgagcaaagaagtagatgacaaggatgcaccaaggactgaggaaaacaaaatacagcacaatgggaattgtcagctgaatgaagaaaacctctctaccaaaacagaagcagtataggaccgacaagtgtacctctgcactcaatgctggaatcaaatccaaagcttttaattctctcaacaagatgtaaacaggaaagaaatctagttgagcatgaagataggatctaacagcttttccagttgttagatgactttgtggccatcttgttattgagtaagaaaataaagcatggacatcatgaaaataacagatgttacccaaactcatcttctaaaatctgtgcatttccatggtggctgacacacttgtcatgtggtctgttagtgtttgccaagaaccattgcaaataaattgaacatcaaagatccaagtttgtactatccctaaagactggagataagcattggaggctcttttaaaaaatgctagttactgaattttgtattgttttacttttttttttatttcaatatatacagtttgatgatgtgcttgaaattggtgcaaatatatacacacccttgtaagtgcaaagtatgtaagaagttttaacatttacttcacaggacttgtgattgtgttaaattctcactattgtgttttcttttgctcactgtttaggacaatttttctttaaaatagttttgcagattaaaattgcttaaataagtggattaaaaaactgacaatgcatgctactgttctctttcaaaaggaagagcaaccgtgttgaatactaataatgatgaattagtattcagtgtttagaatcattgggactacccacaaagtgagcatttctttttaaattttcttgacatttccaagcttattatgaataatattgcagtgtgtcttgtcagctgtaggtggcaaaggtgcccttataaaaaaggaaactggcttttcaaaatgggctatgggagcacaagctgaagctttagtgccttctacaatgtggtatactgttttctagaattttatatgtgctagtcattctcaattcatatggaatctagatggatatttcatgcatacccatagagaagtgtgtaagtgatatgtcagaagagcttcttactgatttcacctaaaatgagaaggaagtcctgttttcaagaatgacattagagtcatgcagctttgggaccatcagttttatactgtgataattgaaaatgaaacatgttcttattttccttaaattgaagaaaaccctttagttgtctacattggatggccttattacctctcaatcatcttttcataaatgatgtgcagaaattgtacttaaggacttaggagtatatgggaggttattggttttatgtttaaggatacgtttacttgagtttaagatacaggtcatccatcattcttaggctcactttttacagaaagtatgcaaatagtaaagtgacagcactgctaatgtttttccccagtactataacttgtggtttctgaactcattattgttgtatttccaaaaaagtaataccttttaattagtgtattaaaagttaagtataattattttaatgcaatctaatacaatcagattactcagttgccttacctcatgggaagagttacttttttagatctaaaaagctgaatagcatgttagttacttggtttcaacttgagttttcttttaatgttaataagattgaaactttagtatttagtggggaatggaaagagttgcccttgttgcaagtaatgaagcctgatttgattatgaagctgcttaatcactcttcatgtgttcagaattactgttttttttgtttgtttttcctttttgtcactgtgtacattaaaattttggaagatgctttactatgtaaagtatagatggtcattttaatcattcagccacatacggttggctggtaaacagcttattctgatacaagaatgcttgggtgcatatggaaagattgtgaaagagtgtgtcttgcatcaacagctgtcttatttatgatatataagtagaaatagagcaaatgttggaatctgttatttttagtaccatgtctttaataaagctaagtattttagagga

SEQ ID NO: 350790 - DNA, 4235 bp, Homo sapiens
cagccgcgcgagaaccgccgggttgccggggcgacgcttccggctggcgcgcgcagccccgggagcaggggagttgtgaaatgggcggctagatctgcccggcgctgtgaattcgccagcgggagcgcgctcgcggccgcgcgttctccgctttcccggctccgtcgctgacgcgtcgtagacgttggggagcgggaaggcaacggcagcgggatcgggatgaacagcggcggcggcttcggtttgggcttaggcttcggcctcacccccacgtcggtgattcaggtgacgaatctgtcgtcggcggtgaccagcgagcagatgcggacgcttttttccttcctaggagaaatcgaggagctgcggctctaccccccggacaacgcacctcttgctttttcctccaaagtatgttatgttaagtttcgtgatccatcaagtgttggcgtggcccagcatctaactaacacggtttttattgacagagctctgatagttgttccttgtgcagaagtgatgcagccaacacgaacggttgtcatgtgtaacacaactttcgatcaccgcgaaaacaccgtcctgggaaagcgtccatgcttgatatcgtttggttcatgaacattaagtttccagtacaggtaaaatcccagaggaatccaaagccctctctttattggctcctgctccaaccatgacaagtctgatgcctggtgcaggattgcttccaataccgaccccaaatcctttgactactcttggtgtttcacttagcagtttgggagctataccagcagcagcactagaccccaacattgcaacacttggagagataccacagccaccacttatgggaaacgtggatccttccaaaatagatgaaattaggagaacggtttatgttggaaatctgaattcccagacaacgacagctgatcaactacttgaattttttaaacaagttggagaagtgaagtttgtgcggatggcaggtgatgagactcagccaactcggtttgcttttgtggaatttgcagaccaaaattctgtaccaagggcccttgcttttaatggagttatgtttggagacaggccactgaaaataaatcactccaacaatgcaatagtaaaaccccctgagatgacacctcaggctgcagctaaggagttagaagaagtaatgaagcgagtacgagaagctcagtcatttatctcagcagctattgaaccagagtctggaaagagcaatgaaagaaaaggcggtcgatctcgttcccatactcgctcaaaatccaggtctagctcaaaatcccattctagaaggaaaagatcacaatcaaaacacaggagtagatcccataatagatcacgttcaagacagaaagacagacgtagatctaagagcccacataaaaaacgctctaaatcaagggagagacggaagtcaaggagtcgttcgcattcacgggacaagagaaaagacactcgagaaaagatcaaggaaaaggaaagagtgaaagagaaagacagggaaaaggagagagagagggaaaaggaacgtgaaaaagaaaaggaacggggtaaaaacaaagaccgggacaaggaacgggaaaaggaccgggaaaaagacaaggaaaaggacagagagagagaacgggaaaaagagcatgagaaggatcgagacaaagagaaggaaaaggaacaggacaaagaaaaggaacgagaaaaagacagatccaaagagatagatgaaaaaagaaagaaggataaaaaatccagaacaccacccaggagttacaatgcatcgcgaagatctcgtagttccagcagggaaaggcgtaggaggaggagcaggagttcttccagatcgccaagaacatcaaaaaccataaaaaggaaatcttctagatctccgtcccccaggagcagaaataagaaggataaaaagagagaaaaagaaagggaccacatcagtgaaagaagagagagagaacgttcaacgtctatgagaaagagttctaatgatagagatgggaaggagaagttggagaagaacagtacttcacttaaagagaaagagcacaataaagaaccagattcaagtgtgagcaaagaagtagatgacaaggatgcaccaaggactgaggaaaacaaaatacagcacaatgggaattgtcagctgaatgaagaaaacctctctaccaaaacagaagcagtataggaccgacaagtgtacctctgcactcaatgctggaatcaaatccaaagcttttaattctctcaacaagatgtaaacaggaaagaaatctagttgagcatgaagataggatctaacagcttttccagttgttagatgactttgtggccatcttgttattgagtaagaaaataaagcatggacatcatgaaaataacagatgttacccaaactcatcttctaaaatctgtgcatttccatggtggctgacacacttgtcatgtggtctgttagtgtttgccaagaaccattgcaaataaattgaacatcaaagatccaagtttgtactatccctaaagactggagataagcattggaggctcttttaaaaaatgctagttactgaattttgtattgttttacttttttttttatttcaatatatacagtttgatgatgtgcttgaaattggtgcaaatatatacacacccttgtaagtgcaaagtatgtaagaagttttaacatttacttcacaggacttgtgattgtgttaaattctcactattgtgttttcttttgctcactgtttaggacaatttttctttaaaatagttttgcagattaaaattgcttaaataagtggattaaaaaactgacaatgcatgctactgttctctttcaaaaggaagagcaaccgtgttgaatactaataatgatgaattagtattcagtgtttagaatcattgggactacccacaaagtgagcatttctttttaaattttcttgacatttccaagcttattatgaataatattgcagtgtgtcttgtcagctgtaggtggcaaaggtgcccttataaaaaaggaaactggcttttcaaaatgggctatgggagcacaagctgaagctttagtgccttctacaatgtggtatactgttttctagaattttatatgtgctagtcattctcaattcatatggaatctagatggatatttcatgcatacccatagagaagtgtgtaagtgatatgtcagaagagcttcttactgatttcacctaaaatgagaaggaagtcctgttttcaagaatgacattagagtcatgcagctttgggaccatcagttttatactgtgataattgaaaatgaaacatgttcttattttccttaaattgaagaaaaccctttagttgtctacattggatggccttattacctctcaatcatcttttcataaatgatgtgcagaaattgtacttaaggacttaggagtatatgggaggttattggttttatgtttaaggatacgtttacttgagtttaagatacaggtcatccatcattcttaggctcactttttacagaaagtatgcaaatagtaaagtgacagcactgctaatgtttttccccagtactataacttgtggtttctgaactcattattgttgtatttccaaaaaagtaataccttttaattagtgtattaaaagttaagtataattattttaatgcaatctaatacaatcagattactcagttgccttacctcatgggaagagttacttttttagatctaaaaagctgaatagcatgttagttacttggtttcaacttgagttttcttttaatgttaataagattgaaactttagtatttagtggggaatggaaagagttgcccttgttgcaagtaatgaagcctgatttgattatgaagctgcttaatcactcttcatgtgttcagaattactgttttttttgtttgtttttcctttttgtcactgtgtacattaaaattttggaagatgctttactatgtaaagtatagatggtcattttaatcattcagccacatacggttggctggtaaacagcttattctgatacaagaatgcttgggtgcatatggaaagattgtgaaagagtgtgtcttgcatcaacagctgtcttatttatgatatataagtagaaatagagcaaatgttggaatctgttatttttagtaccatgtctttaataaagctaagtattttagagga

SEQ ID NO: 350791 - DNA, 3825 bp, Homo sapiens
tttgcctaaggggataaggaaaaataatgtgaaagttgcagtccttatcagaagtaattgattagaattcagcaatgaatatgccaaatcgtacttatttcagatgatgcagccaacacgaacggttgtcatgtgtaacacaactttcgatcaccgcgaaaacaccgtcctgggaaagcgtccatgcttgatatcgtttggttcatgaacattaagtttccagtacaggtaaaatcccagaggaatccaaagccctctctttattggctcctgctccaaccatgacaagtctgatgcctggtgcaggattgcttccaataccgaccccaaatcctttgactactcttggtgtttcacttagcagtttgggagctataccagcagcagcactagaccccaacattgcaacacttggagagataccacagccaccacttatgggaaacgtggatccttccaaaatagatgaaattaggagaacggtttatgttggaaatctgaattcccagacaacgacagctgatcaactacttgaattttttaaacaagttggagaagtgaagtttgtgcggatggcaggtgatgagactcagccaactcggtttgcttttgtggaatttgcagaccaaaattctgtaccaagggcccttgcttttaatggagttatgtttggagacaggccactgaaaataaatcactccaacaatgcaatagtaaaaccccctgagatgacacctcaggctgcagctaaggagttagaagaagtaatgaagcgagtacgagaagctcagtcatttatctcagcagctattgaaccagagtctggaaagagcaatgaaagaaaaggcggtcgatctcgttcccatactcgctcaaaatccaggtctagctcaaaatcccattctagaaggaaaagatcacaatcaaaacacaggagtagatcccataatagatcacgttcaagacagaaagacagacgtagatctaagagcccacataaaaaacgctctaaatcaagggagagacggaagtcaaggagtcgttcgcattcacgggacaagagaaaagacactcgagaaaagatcaaggaaaaggaaagagtgaaagagaaagacagggaaaaggagagagagagggaaaaggaacgtgaaaaagaaaaggaacggggtaaaaacaaagaccgggacaaggaacgggaaaaggaccgggaaaaagacaaggaaaaggacagagagagagaacgggaaaaagagcatgagaaggatcgagacaaagagaaggaaaaggaacaggacaaagaaaaggaacgagaaaaagacagatccaaagagatagatgaaaaaagaaagaaggataaaaaatccagaacaccacccaggagttacaatgcatcgcgaagatctcgtagttccagcagggaaaggcgtaggaggaggagcaggagttcttccagatcgccaagaacatcaaaaaccataaaaaggaaatcttctagatctccgtcccccaggagcagaaataagaaggataaaaagagagaaaaagaaagggaccacatcagtgaaagaagagagagagaacgttcaacgtctatgagaaagagttctaatgatagagatgggaaggagaagttggagaagaacagtacttcacttaaagagaaagagcacaataaagaaccagattcaagtgtgagcaaagaagtagatgacaaggatgcaccaaggactgaggaaaacaaaatacagcacaatgggaattgtcagctgaatgaagaaaacctctctaccaaaacagaagcagtataggaccgacaagtgtacctctgcactcaatgctggaatcaaatccaaagcttttaattctctcaacaagatgtaaacaggaaagaaatctagttgagcatgaagataggatctaacagcttttccagttgttagatgactttgtggccatcttgttattgagtaagaaaataaagcatggacatcatgaaaataacagatgttacccaaactcatcttctaaaatctgtgcatttccatggtggctgacacacttgtcatgtggtctgttagtgtttgccaagaaccattgcaaataaattgaacatcaaagatccaagtttgtactatccctaaagactggagataagcattggaggctcttttaaaaaatgctagttactgaattttgtattgttttacttttttttttatttcaatatatacagtttgatgatgtgcttgaaattggtgcaaatatatacacacccttgtaagtgcaaagtatgtaagaagttttaacatttacttcacaggacttgtgattgtgttaaattctcactattgtgttttcttttgctcactgtttaggacaatttttctttaaaatagttttgcagattaaaattgcttaaataagtggattaaaaaactgacaatgcatgctactgttctctttcaaaaggaagagcaaccgtgttgaatactaataatgatgaattagtattcagtgtttagaatcattgggactacccacaaagtgagcatttctttttaaattttcttgacatttccaagcttattatgaataatattgcagtgtgtcttgtcagctgtaggtggcaaaggtgcccttataaaaaaggaaactggcttttcaaaatgggctatgggagcacaagctgaagctttagtgccttctacaatgtggtatactgttttctagaattttatatgtgctagtcattctcaattcatatggaatctagatggatatttcatgcatacccatagagaagtgtgtaagtgatatgtcagaagagcttcttactgatttcacctaaaatgagaaggaagtcctgttttcaagaatgacattagagtcatgcagctttgggaccatcagttttatactgtgataattgaaaatgaaacatgttcttattttccttaaattgaagaaaaccctttagttgtctacattggatggccttattacctctcaatcatcttttcataaatgatgtgcagaaattgtacttaaggacttaggagtatatgggaggttattggttttatgtttaaggatacgtttacttgagtttaagatacaggtcatccatcattcttaggctcactttttacagaaagtatgcaaatagtaaagtgacagcactgctaatgtttttccccagtactataacttgtggtttctgaactcattattgttgtatttccaaaaaagtaataccttttaattagtgtattaaaagttaagtataattattttaatgcaatctaatacaatcagattactcagttgccttacctcatgggaagagttacttttttagatctaaaaagctgaatagcatgttagttacttggtttcaacttgagttttcttttaatgttaataagattgaaactttagtatttagtggggaatggaaagagttgcccttgttgcaagtaatgaagcctgatttgattatgaagctgcttaatcactcttcatgtgttcagaattactgttttttttgtttgtttttcctttttgtcactgtgtacattaaaattttggaagatgctttactatgtaaagtatagatggtcattttaatcattcagccacatacggttggctggtaaacagcttattctgatacaagaatgcttgggtgcatatggaaagattgtgaaagagtgtgtcttgcatcaacagctgtcttatttatgatatataagtagaaatagagcaaatgttggaatctgttatttttagtaccatgtctttaataaagctaagtattttagagga

SEQ ID NO: 350792 - DNA, 4581 bp, Homo sapiens
tttttttttttttttttttagaagagtttgctcttgtcgcccaggctggagtgcaatggcacaagctcggctcactgcaacctccgcctcctgggttcaagtaattctcctgcctcagcctcctgaagtagctgggattacaggtgcccaccaccatgcccaactaatttttttgtatttttagtagagacgggtttcactatgtttggcaaggctgatcttgaaatcctgacctcaaggcaggtggacctcaagtaccacctgcctcggcctcccagagtgctgggattacaggtgtgagccactgtgcccagcccaactatatttcttttactgataattgttctaaatttattaaaacatgactatcaagatgagttttagctgtataaaggatacttatagaagttcattcagcttccttggaatacgtacataaggatataaagtttacatttatgttaacttttaatgatgatgacattgagagttaagatttttaaacatttattttgtgctagagaatactacgcagttttacatacatcatcagttgtaatcctcatgacagccctaagagatgcaggtatgattcctactccactttatagaggaagaaactcaggcttggagaggttaagtgactagccagagttctcacaggtagtgtgtggcagagctgactttcagagccagattgtcagactccaaagctgttgagtctaatcactttgctatttaagttgtgtacatctgttttgttacaatttaataagtagttaggatacctcgttatgaaaaaaatcacattctcaaaaaactttttcagtgagaaagggggcctagtccaaattggaataacagttacttttcctgcaattaaacgtttcctgcagttaacagtttcttttcatacaggttgagactcacaaatttgaaaatctgaaattcaaaaggcttcaaaactttttgagcgctttcgtgatgctcaaaggaaatgctcactggagcattttggatttttcagttgtgtgtttgggatgctcaaccagttttatgcgtgtgtatatatagaatgcaaatattcgaaaatctccaaaaatgtgaaattcaaaacacttttggttccaagcatttcacataagggatactcaactggtagctatgattatagttacagctataaaatcaaggcattgcaaatccaatatttgattatatctagttttaacttatgagtaatgatttttattttcctgtcacagtggcgctgtcattaggactgtgcttccttttatatattctttttgtttgttatgacagacagcacacattcacaggaactactcaaccacgtaaccactactccctgtcatgatgtgttatgaccagattacatgcaagtcaacagggaaaaatcttctatactgatttgaggcataaaatgactagcaaaagccacatctgaaaatatacgaaataactgttaaattctttgtttctgtctctgttctagacaatgaaatatccggtaaagtttccagtaaatgtatttcagattatgtaactaaagtattatttaagagaaatttttaaaatattgttaaatactgttaggatagattttaaattttcttgtttgaaagatcgtaaattaagttttgatattctaacaattttttttctttaggagtagatcccataatagatcacgttcaagacagaaagacagacgtagatctaagagcccacataaaaaacgctctaaatcaagggagagacggaagtcaaggagtcgttcgcattcacgggacaagagaaaagacactcgagaaaagatcaaggaaaaggaaagagtgaaagagaaagacagggaaaaggagagagagagggaaaaggaacgtgaaaaagaaaaggaacggggtaaaaacaaagaccgggacaaggaacgggaaaaggaccgggaaaaagacaaggaaaaggacagagagagagaacgggaaaaagagcatgagaaggatcgagacaaagagaaggaaaaggaacaggacaaagaaaaggaacgagaaaaagacagatccaaagagatagatgaaaaaagaaagaaggataaaaaatccagaacaccacccaggagttacaatgcatcgcgaagatctcgtagttccagcagggaaaggcgtaggaggaggagcaggagttcttccagatcgccaagaacatcaaaaaccataaaaaggaaatcttctagatctccgtcccccaggagcagaaataagaaggataaaaagagagaaaaagaaagggaccacatcagtgaaagaagagagagagaacgttcaacgtctatgagaaagagttctaatgatagagatgggaaggagaagttggagaagaacagtacttcacttaaagagaaagagcacaataaagaaccagattcaagtgtgagcaaagaagtagatgacaaggatgcaccaaggactgaggaaaacaaaatacagcacaatgggaattgtcagctgaatgaagaaaacctctctaccaaaacagaagcagtataggaccgacaagtgtacctctgcactcaatgctggaatcaaatccaaagcttttaattctctcaacaagatgtaaacaggaaagaaatctagttgagcatgaagataggatctaacagcttttccagttgttagatgactttgtggccatcttgttattgagtaagaaaataaagcatggacatcatgaaaataacagatgttacccaaactcatcttctaaaatctgtgcatttccatggtggctgacacacttgtcatgtggtctgttagtgtttgccaagaaccattgcaaataaattgaacatcaaagatccaagtttgtactatccctaaagactggagataagcattggaggctcttttaaaaaatgctagttactgaattttgtattgttttacttttttttttatttcaatatatacagtttgatgatgtgcttgaaattggtgcaaatatatacacacccttgtaagtgcaaagtatgtaagaagttttaacatttacttcacaggacttgtgattgtgttaaattctcactattgtgttttcttttgctcactgtttaggacaatttttctttaaaatagttttgcagattaaaattgcttaaataagtggattaaaaaactgacaatgcatgctactgttctctttcaaaaggaagagcaaccgtgttgaatactaataatgatgaattagtattcagtgtttagaatcattgggactacccacaaagtgagcatttctttttaaattttcttgacatttccaagcttattatgaataatattgcagtgtgtcttgtcagctgtaggtggcaaaggtgcccttataaaaaaggaaactggcttttcaaaatgggctatgggagcacaagctgaagctttagtgccttctacaatgtggtatactgttttctagaattttatatgtgctagtcattctcaattcatatggaatctagatggatatttcatgcatacccatagagaagtgtgtaagtgatatgtcagaagagcttcttactgatttcacctaaaatgagaaggaagtcctgttttcaagaatgacattagagtcatgcagctttgggaccatcagttttatactgtgataattgaaaatgaaacatgttcttattttccttaaattgaagaaaaccctttagttgtctacattggatggccttattacctctcaatcatcttttcataaatgatgtgcagaaattgtacttaaggacttaggagtatatgggaggttattggttttatgtttaaggatacgtttacttgagtttaagatacaggtcatccatcattcttaggctcactttttacagaaagtatgcaaatagtaaagtgacagcactgctaatgtttttccccagtactataacttgtggtttctgaactcattattgttgtatttccaaaaaagtaataccttttaattagtgtattaaaagttaagtataattattttaatgcaatctaatacaatcagattactcagttgccttacctcatgggaagagttacttttttagatctaaaaagctgaatagcatgttagttacttggtttcaacttgagttttcttttaatgttaataagattgaaactttagtatttagtggggaatggaaagagttgcccttgttgcaagtaatgaagcctgatttgattatgaagctgcttaatcactcttcatgtgttcagaattactgttttttttgtttgtttttcctttttgtcactgtgtacattaaaattttggaagatgctttactatgtaaagtatagatggtcattttaatcattcagccacatacggttggctggtaaacagcttattctgatacaagaatgcttgggtgcatatggaaagattgtgaaagagtgtgtcttgcatcaacagctgtcttatttatgatatataagtagaaatagagcaaatgttggaatctgttatttttagtaccatgtctttaataaagctaagtattttagagga

SEQ ID NO: 350793 - DNA, 4166 bp, Homo sapiens
cagccgcgcgagaaccgccgggttgccggggcgacgcttccggctggcgcgcgcagccccgggagcaggggagttgtgaaatgggcggctagatctgcccggcgctgtgaattcgccagcgggagcgcgctcgcggccgcgcgttctccgctttcccggctccgtcgctgacgcgtcgtagacgttggggagcgggaaggcaacggcagcgggatcgggatgaacagcggcggcggcttcggtttgggcttaggcttcggcctcacccccacgtcggtgattcaggtgacgaatctgtcgtcggcggtgaccagcgagcagatgcggacgcttttttccttcctaggagaaatcgaggagctgcggctctaccccccggacaacgcacctcttgctttttcctccaaagtatgttatgttaagtttcgtgatccatcaagtgttggcgtggcccagcatctaactaacacggtttttattgacagagctctgatagttgttccttgtgcagaaggtaaaatcccagaggaatccaaagccctctctttattggctcctgctccaaccatgacaagtctgatgcctggtgcaggattgcttccaataccgaccccaaatcctttgactactcttggtgtttcacttagcagtttgggagctataccagcagcagcactagaccccaacattgcaacacttggagagataccacagccaccacttatgggaaacgtggatccttccaaaatagatgaaattaggagaacggtttatgttggaaatctgaattcccagacaacgacagctgatcaactacttgaattttttaaacaagttggagaagtgaagtttgtgcggatggcaggtgatgagactcagccaactcggtttgcttttgtggaatttgcagaccaaaattctgtaccaagggcccttgcttttaatggagttatgtttggagacaggccactgaaaataaatcactccaacaatgcaatagtaaaaccccctgagatgacacctcaggctgcagctaaggagttagaagaagtaatgaagcgagtacgagaagctcagtcatttatctcagcagctattgaaccagagtctggaaagagcaatgaaagaaaaggcggtcgatctcgttcccatactcgctcaaaatccaggtctagctcaaaatcccattctagaaggaaaagatcacaatcaaaacacaggagtagatcccataatagatcacgttcaagacagaaagacagacgtagatctaagagcccacataaaaaacgctctaaatcaagggagagacggaagtcaaggagtcgttcgcattcacgggacaagagaaaagacactcgagaaaagatcaaggaaaaggaaagagtgaaagagaaagacagggaaaaggagagagagagggaaaaggaacgtgaaaaagaaaaggaacggggtaaaaacaaagaccgggacaaggaacgggaaaaggaccgggaaaaagacaaggaaaaggacagagagagagaacgggaaaaagagcatgagaaggatcgagacaaagagaaggaaaaggaacaggacaaagaaaaggaacgagaaaaagacagatccaaagagatagatgaaaaaagaaagaaggataaaaaatccagaacaccacccaggagttacaatgcatcgcgaagatctcgtagttccagcagggaaaggcgtaggaggaggagcaggagttcttccagatcgccaagaacatcaaaaaccataaaaaggaaatcttctagatctccgtcccccaggagcagaaataagaaggataaaaagagagaaaaagaaagggaccacatcagtgaaagaagagagagagaacgttcaacgtctatgagaaagagttctaatgatagagatgggaaggagaagttggagaagaacagtacttcacttaaagagaaagagcacaataaagaaccagattcaagtgtgagcaaagaagtagatgacaaggatgcaccaaggactgaggaaaacaaaatacagcacaatgggaattgtcagctgaatgaagaaaacctctctaccaaaacagaagcagtataggaccgacaagtgtacctctgcactcaatgctggaatcaaatccaaagcttttaattctctcaacaagatgtaaacaggaaagaaatctagttgagcatgaagataggatctaacagcttttccagttgttagatgactttgtggccatcttgttattgagtaagaaaataaagcatggacatcatgaaaataacagatgttacccaaactcatcttctaaaatctgtgcatttccatggtggctgacacacttgtcatgtggtctgttagtgtttgccaagaaccattgcaaataaattgaacatcaaagatccaagtttgtactatccctaaagactggagataagcattggaggctcttttaaaaaatgctagttactgaattttgtattgttttacttttttttttatttcaatatatacagtttgatgatgtgcttgaaattggtgcaaatatatacacacccttgtaagtgcaaagtatgtaagaagttttaacatttacttcacaggacttgtgattgtgttaaattctcactattgtgttttcttttgctcactgtttaggacaatttttctttaaaatagttttgcagattaaaattgcttaaataagtggattaaaaaactgacaatgcatgctactgttctctttcaaaaggaagagcaaccgtgttgaatactaataatgatgaattagtattcagtgtttagaatcattgggactacccacaaagtgagcatttctttttaaattttcttgacatttccaagcttattatgaataatattgcagtgtgtcttgtcagctgtaggtggcaaaggtgcccttataaaaaaggaaactggcttttcaaaatgggctatgggagcacaagctgaagctttagtgccttctacaatgtggtatactgttttctagaattttatatgtgctagtcattctcaattcatatggaatctagatggatatttcatgcatacccatagagaagtgtgtaagtgatatgtcagaagagcttcttactgatttcacctaaaatgagaaggaagtcctgttttcaagaatgacattagagtcatgcagctttgggaccatcagttttatactgtgataattgaaaatgaaacatgttcttattttccttaaattgaagaaaaccctttagttgtctacattggatggccttattacctctcaatcatcttttcataaatgatgtgcagaaattgtacttaaggacttaggagtatatgggaggttattggttttatgtttaaggatacgtttacttgagtttaagatacaggtcatccatcattcttaggctcactttttacagaaagtatgcaaatagtaaagtgacagcactgctaatgtttttccccagtactataacttgtggtttctgaactcattattgttgtatttccaaaaaagtaataccttttaattagtgtattaaaagttaagtataattattttaatgcaatctaatacaatcagattactcagttgccttacctcatgggaagagttacttttttagatctaaaaagctgaatagcatgttagttacttggtttcaacttgagttttcttttaatgttaataagattgaaactttagtatttagtggggaatggaaagagttgcccttgttgcaagtaatgaagcctgatttgattatgaagctgcttaatcactcttcatgtgttcagaattactgttttttttgtttgtttttcctttttgtcactgtgtacattaaaattttggaagatgctttactatgtaaagtatagatggtcattttaatcattcagccacatacggttggctggtaaacagcttattctgatacaagaatgcttgggtgcatatggaaagattgtgaaagagtgtgtcttgcatcaacagctgtcttatttatgatatataagtagaaatagagcaaatgttggaatctgttatttttagtaccatgtctttaataaagctaagtattttagaggaaaatgtttgtttatgcatttcaaaaaagcattttagttttatcctgctcatttta

SEQ ID NO: 350794 - DNA, 4057 bp, Homo sapiens
cagccgcgcgagaaccgccgggttgccggggcgacgcttccggctggcgcgcgcagccccgggagcaggggagttgtgaaatgggcggctagatctgcccggcgctgtgaattcgccagcgggagcgcgctcgcggccgcgcgttctccgctttcccggctccgtcgctgacgcgtcgtagacgttggggagcgggaaggcaacggcagcgggatcgggatgaacagcggcggcggcttcggtttgggcttaggcttcggcctcacccccacgtcggtgattcaggtgacgaatctgtcgtcggcggtgaccagcgagcagatgcggacgcttttttccttcctaggagaaatcgaggagctgcggctctaccccccggacaacgcacctcttgctttttcctccaaagtatgttatgttaagtttcgtgatccatcaagtgttggcgtggcccagcatctaactaacacggtttttattgacagagctctgatagttgttccttgtgcagaaggtaaaatcccagaggaatccaaagccctctctttattggctcctgctccaaccatgacaagtctgatgcctggtgcaggattgcttccaataccgaccccaaatcctttgactactcttggtgtttcacttagcagtttgggagctataccagcagcagcactagaccccaacattgcaacacttggagagataccacagccaccacttatgggaaacgtggatccttccaaaatagatgaaattaggagaacggtttatgttggaaatctgaattcccagacaacgacagctgatcaactacttgaattttttaaacaagttggagaagtgaagtttgtgcggatggcaggtgatgagactcagccaactcggtttgcttttgtggaatttgcagaccaaaattctgtaccaagggcccttgcttttaatggagttatgtttggagacaggccactgaaaataaatcactccaacaatgcaatagtaaaaccccctgagatgacacctcaggctgcagctaaggagttagaagaagtaatgaagcgagtacgagaagctcagtcatttatctcagcagctattgaaccagagtctggaaagagcaatgaaagaaaaggcggtcgatctcgttcccatactcgctcaaaatccaggtctagctcaaaatcccattctagaaggaaaagatcacaatcaaaacacaggagtagatcccataatagatcacgttcaagacagaaagacagacgtagatctaagagcccacataaaaaacgctctaaatcaagggagagacggaagtcaaggagtcgttcgcattcacgggacaagagaaaagacactcgagaaaagatcaaggaaaaggaaagagtgaaagagaaagacagggaaaaggagagagagagggaaaaggaacgtgaaaaagaaaaggaacggggtaaaaacaaagaccgggacaaggaacgggaaaaggaccgggaaaaagacaaggaaaaggacagagagagagaacgggaaaaagagcatgagaaggatcgagacaaagagaaggaaaaggaacaggacaaagaaaaggaacgagaaaaagacagatccaaagagatagatgaaaaaagaaagaaggataaaaaatccagaacaccacccaggagttacaatgcatcgcgaagatctcgtagttccagcagggaaaggcgtaggaggaggagcaggagttcttccagatcgccaagaacatcaaaaaccataaaaaggaaatcttctagatctccgtcccccaggagcagaaataagaaggataaaaagagagaaaaagaaagggaccacatcagtgaaagaagagagagagaacgttcaacgtctatgagaaagagttctaatgatagagatgggaaggagaagttggagaagaacagtacttcacttaaagagaaagagcacaataaagaaccagattcaagtgtgagcaaagaagtagatgacaaggatgcaccaaggactgaggaaaacaaaatacagcacaatgggaattgtcagctgaatgaagaaaacctctctaccaaaacagaagcagtataggaccgacaagtgtacctctgcactcaatgctggaatcaaatccaaagcttttaattctctcaacaagatgtaaacaggaaagaaatctagttgagcatgaagataggatctaacagcttttccagttgttagatgactttgtggccatcttgttattgagtaagaaaataaagcatggacatcatgaaaataacagatgttacccaaactcatcttctaaaatctgtgcatttccatggtggctgacacacttgtcatgtggtctgttagtgtttgccaagaaccattgcaaataaattgaacatcaaagatccaagtttgtactatccctaaagactggagataagcattggaggctcttttaaaaaatgctagttactgaattttgtattgttttacttttttttttatttcaatatatacagtttgatgatgtgcttgaaattggtgcaaatatatacacacccttgtaagtgcaaagtatgtaagaagttttaacatttacttcacaggacttgtgattgtgttaaattctcactattgtgttttcttttgctcactgtttaggacaatttttctttaaaatagttttgcagattaaaattgcttaaataagtggattaaaaaactgacaatgcatgctactgttctctttcaaaaggaagagcaaccgtgttgaatactaataatgatgaattagtattcagtgtttagaatcattgggactacccacaaagtgagcatttctttttaaattttcttgacatttccaagcttattatgaataatattgcagtgtgtcttgtcagctgtaggtggcaaaggtgcccttataaaaaaggaaactggcttttcaaaatgggctatgggagcacaagctgaagctttagtgccttctacaatgtggtatactgttttctagaattttatatgtgctagtcattctcaattcatatggaatctagatggatatttcatgcatacccatagagaagtgtgtaagtgatatgtcagaagagcttcttactgatttcacctaaaatgagaaggaagtcctgttttcaagaatgacattagagtcatgcagctttgggaccatcagttttatactgtgataattgaaaatgaaacatgttcttattttccttaaattgaagcataaatgatgtgcagaaattgtacttaaggacttaggagtatatgggaggttattggttttatgtttaaggatacgtttacttgagtttaagatacaggtcatccatcattcttaggctcactttttacagaaagtatgcaaatagtaaagtgacagcactgctaatgtttttccccagtactataacttgtggtttctgaactcattattgttgtatttccaaaaaagtaataccttttaattagtgtattaaaagttaagtataattattttaatgcaatctaatacaatcagattactcagttgccttacctcatgggaagagttacttttttagatctaaaaagctgaatagcatgttagttacttggtttcaacttgagttttcttttaatgttaataagattgaaactttagtatttagtggggaatggaaagagttgcccttgttgcaagtaatgaagcctgatttgattatgaagctgcttaatcactcttcatgtgttcagaattactgttttttttgtttgtttttcctttttgtcactgtgtacattaaaattttggaagatgctttactatgtaaagtatagatggtcattttaatcattcagccacatacggttggctggtaaacagcttattctgatacaagaatgcttgggtgcatatggaaagattgtgaaagagtgtgtcttgcatcaacagctgtcttatttatgatatataagtagaaatagagcaaatgttggaatctgttatttttagtaccatgtctttaataaagctaagtattttagagga

SEQ ID NO: 350795 - DNA, 3077 bp, Homo sapiens
tcacaccgggaacacctatggccaaggttacggaattggggtcgggaccccgatttttaaaaatactggaaaaaaaaaaaaaaaaaaaaaaaaagaaagaaggataaaaaatccagaacaccacccaggagttacaatgcatcgcgaagatctcgtagttccagcagggaaaggcgtaggaggaggagcaggagttcttccagatcgccaagaacatcaaaaaccataaaaaggaaatcttctagatctccgtcccccaggagcagaaataagaaggataaaaagagagaaaaagaaagggaccacatcagtgaaagaagagagagagaacgttcaacgtctatgagaaagagtgaaagagaaagacagggaaaaggagagagagagggaaaaggaacgtgaaaaagaaaaggaacggggtaaaaacaaagaccgggacaaggaacgggaaaaggaccgggaaaaagacaaggaaaaggacagagagagagaacgggaaaaagagcatgagaaggatcgagacaaagagaaggaaaaggaacaggacaaagaaaaggaacgagaaaaagacagatccaaagagatagatgaaaaaagaaagaaggataaaaaatccagaacaccacccaggagttacaatgcatcgcgaagatctcgtagttccagcagggaaaggcgtaggaggaggagcaggagttcttccagatcgccaagaacatcaaaaaccataaaaaggaaatcttctagatctccgtcccccaggagcagaaataagaaggataaaaagagagaaaaagaaagggaccacatcagtgaaagaagagagagagaacgttcaacgtctatgagaaagagttctaatgatagagatgggaaggagaagttggagaagaacagtacttcacttaaagagaaagagcacaataaagaaccagattcaagtgtgagcaaagaagtagatgacaaggatgcaccaaggactgaggaaaacaaaatacagcacaatgggaattgtcagctgaatgaagaaaacctctctaccaaaacagaagcagtataggaccgacaagtgtacctctgcactcaatgctggaatcaaatccaaagcttttaattctctcaacaagatgtaaacaggaaagaaatctagttgagcatgaagataggatctaacagcttttccagttgttagatgactttgtggccatcttgttattgagtaagaaaataaagcatggacatcatgaaaataacagatgttacccaaactcatcttctaaaatctgtgcatttccatggtggctgacacacttgtcatgtggtctgttagtgtttgccaagaaccattgcaaataaattgaacatcaaagatccaagtttgtactatccctaaagactggagataagcattggaggctcttttaaaaaatgctagttactgaattttgtattgttttacttttttttttatttcaatatatacagtttgatgatgtgcttgaaattggtgcaaatatatacacacccttgtaagtgcaaagtatgtaagaagttttaacatttacttcacaggacttgtgattgtgttaaattctcactattgtgttttcttttgctcactgtttaggacaatttttctttaaaatagttttgcagattaaaattgcttaaataagtggattaaaaaactgacaatgcatgctactgttctctttcaaaaggaagagcaaccgtgttgaatactaataatgatgaattagtattcagtgtttagaatcattgggactacccacaaagtgagcatttctttttaaattttcttgacatttccaagcttattatgaataatattgcagtgtgtcttgtcagctgtaggtggcaaaggtgcccttataaaaaaggaaactggcttttcaaaatgggctatgggagcacaagctgaagctttagtgccttctacaatgtggtatactgttttctagaattttatatgtgctagtcattctcaattcatatggaatctagatggatatttcatgcatacccatagagaagtgtgtaagtgatatgtcagaagagcttcttactgatttcacctaaaatgagaaggaagtcctgttttcaagaatgacattagagtcatgcagctttgggaccatcagttttatactgtgataattgaaaatgaaacatgttcttattttccttaaattgaagaaaaccctttagttgtctacattggatggccttattacctctcaatcatcttttcataaatgatgtgcagaaattgtacttaaggacttaggagtatatgggaggttattggttttatgtttaaggatacgtttacttgagtttaagatacaggtcatccatcattcttaggctcactttttacagaaagtatgcaaatagtaaagtgacagcactgctaatgtttttccccagtactataacttgtggtttctgaactcattattgttgtatttccaaaaaagtaataccttttaattagtgtattaaaagttaagtataattattttaatgcaatctaatacaatcagattactcagttgccttacctcatgggaagagttacttttttagatctaaaaagctgaatagcatgttagttacttggtttcaacttgagttttcttttaatgttaataagattgaaactttagtatttagtggggaatggaaagagttgcccttgttgcaagtaatgaagcctgatttgattatgaagctgcttaatcactcttcatgtgttcagaattactgttttttttgtttgtttttcctttttgtcactgtgtacattaaaattttggaagatgctttactatgtaaagtatagatggtcattttaatcattcagccacatacggttggctggtaaacagcttattctgatacaagaatgcttgggtgcatatggaaagattgtgaaagagtgtgtcttgcatcaacagctgtcttatttatgatatataagtagaaatagagcaaatgttggaatctgttatttttagtaccatgtctttaataaagctaagtattttagagga

SEQ ID NO: 350796 - DNA, 2914 bp, Homo sapiens
tcacaccgggaacacctatggccaaggttacggaattggggtcgggaccccgatttttaaaaatactggaaaaaaaaaaaaaaaaaaaaaaaaagaaagaaggataaaaaatccagaacaccacccaggagttacaatgcatcgcgaagatctcgtagttccagcagggaaaggcgtaggaggaggagcaggagttcttccagatcgccaagaacatcaaaaaccataaaaaggaaatcttctagatctccgtcccccaggagcagaaataagaaggataaaaagagagaaaaagaaagggaccacatcagtgaaagaagagagagagaacgggaaaaagagcatgagaaggatcgagacaaagagaaggaaaaggaacaggacaaagaaaaggaacgagaaaaagacagatccaaagagatagatgaaaaaagaaagaaggataaaaaatccagaacaccacccaggagttacaatgcatcgcgaagatctcgtagttccagcagggaaaggcgtaggaggaggagcaggagttcttccagatcgccaagaacatcaaaaaccataaaaaggaaatcttctagatctccgtcccccaggagcagaaataagaaggataaaaagagagaaaaagaaagggaccacatcagtgaaagaagagagagagaacgttcaacgtctatgagaaagagttctaatgatagagatgggaaggagaagttggagaagaacagtacttcacttaaagagaaagagcacaataaagaaccagattcaagtgtgagcaaagaagtagatgacaaggatgcaccaaggactgaggaaaacaaaatacagcacaatgggaattgtcagctgaatgaagaaaacctctctaccaaaacagaagcagtataggaccgacaagtgtacctctgcactcaatgctggaatcaaatccaaagcttttaattctctcaacaagatgtaaacaggaaagaaatctagttgagcatgaagataggatctaacagcttttccagttgttagatgactttgtggccatcttgttattgagtaagaaaataaagcatggacatcatgaaaataacagatgttacccaaactcatcttctaaaatctgtgcatttccatggtggctgacacacttgtcatgtggtctgttagtgtttgccaagaaccattgcaaataaattgaacatcaaagatccaagtttgtactatccctaaagactggagataagcattggaggctcttttaaaaaatgctagttactgaattttgtattgttttacttttttttttatttcaatatatacagtttgatgatgtgcttgaaattggtgcaaatatatacacacccttgtaagtgcaaagtatgtaagaagttttaacatttacttcacaggacttgtgattgtgttaaattctcactattgtgttttcttttgctcactgtttaggacaatttttctttaaaatagttttgcagattaaaattgcttaaataagtggattaaaaaactgacaatgcatgctactgttctctttcaaaaggaagagcaaccgtgttgaatactaataatgatgaattagtattcagtgtttagaatcattgggactacccacaaagtgagcatttctttttaaattttcttgacatttccaagcttattatgaataatattgcagtgtgtcttgtcagctgtaggtggcaaaggtgcccttataaaaaaggaaactggcttttcaaaatgggctatgggagcacaagctgaagctttagtgccttctacaatgtggtatactgttttctagaattttatatgtgctagtcattctcaattcatatggaatctagatggatatttcatgcatacccatagagaagtgtgtaagtgatatgtcagaagagcttcttactgatttcacctaaaatgagaaggaagtcctgttttcaagaatgacattagagtcatgcagctttgggaccatcagttttatactgtgataattgaaaatgaaacatgttcttattttccttaaattgaagaaaaccctttagttgtctacattggatggccttattacctctcaatcatcttttcataaatgatgtgcagaaattgtacttaaggacttaggagtatatgggaggttattggttttatgtttaaggatacgtttacttgagtttaagatacaggtcatccatcattcttaggctcactttttacagaaagtatgcaaatagtaaagtgacagcactgctaatgtttttccccagtactataacttgtggtttctgaactcattattgttgtatttccaaaaaagtaataccttttaattagtgtattaaaagttaagtataattattttaatgcaatctaatacaatcagattactcagttgccttacctcatgggaagagttacttttttagatctaaaaagctgaatagcatgttagttacttggtttcaacttgagttttcttttaatgttaataagattgaaactttagtatttagtggggaatggaaagagttgcccttgttgcaagtaatgaagcctgatttgattatgaagctgcttaatcactcttcatgtgttcagaattactgttttttttgtttgtttttcctttttgtcactgtgtacattaaaattttggaagatgctttactatgtaaagtatagatggtcattttaatcattcagccacatacggttggctggtaaacagcttattctgatacaagaatgcttgggtgcatatggaaagattgtgaaagagtgtgtcttgcatcaacagctgtcttatttatgatatataagtagaaatagagcaaatgttggaatctgttatttttagtaccatgtctttaataaagctaagtattttagagga

SEQ ID NO: 350797 - DNA, 2531 bp, Homo sapiens
acagtctgtggttaatctacaaataaagggaaattagatagatgaaaaaagaaagaaggataaaaaatccagaacaccacccaggagttacaatgcatcgcgaagatctcgtagttccagcagggaaaggcgtaggaggaggagcaggagttcttccagatcgccaagaacatcaaaaaccataaaaaggaaatcttctagatctccgtcccccaggagcagaaataagaaggataaaaagagagaaaaagaaagggaccacatcagtgaaagaagagagagagaacgttcaacgtctatgagaaagagttctaatgatagagatgggaaggagaagttggagaagaacagtacttcacttaaagagaaagagcacaataaagaaccagattcaagtgtgagcaaagaagtagatgacaaggatgcaccaaggactgaggaaaacaaaatacagcacaatgggaattgtcagctgaatgaagaaaacctctctaccaaaacagaagcagtataggaccgacaagtgtacctctgcactcaatgctggaatcaaatccaaagcttttaattctctcaacaagatgtaaacaggaaagaaatctagttgagcatgaagataggatctaacagcttttccagttgttagatgactttgtggccatcttgttattgagtaagaaaataaagcatggacatcatgaaaataacagatgttacccaaactcatcttctaaaatctgtgcatttccatggtggctgacacacttgtcatgtggtctgttagtgtttgccaagaaccattgcaaataaattgaacatcaaagatccaagtttgtactatccctaaagactggagataagcattggaggctcttttaaaaaatgctagttactgaattttgtattgttttacttttttttttatttcaatatatacagtttgatgatgtgcttgaaattggtgcaaatatatacacacccttgtaagtgcaaagtatgtaagaagttttaacatttacttcacaggacttgtgattgtgttaaattctcactattgtgttttcttttgctcactgtttaggacaatttttctttaaaatagttttgcagattaaaattgcttaaataagtggattaaaaaactgacaatgcatgctactgttctctttcaaaaggaagagcaaccgtgttgaatactaataatgatgaattagtattcagtgtttagaatcattgggactacccacaaagtgagcatttctttttaaattttcttgacatttccaagcttattatgaataatattgcagtgtgtcttgtcagctgtaggtggcaaaggtgcccttataaaaaaggaaactggcttttcaaaatgggctatgggagcacaagctgaagctttagtgccttctacaatgtggtatactgttttctagaattttatatgtgctagtcattctcaattcatatggaatctagatggatatttcatgcatacccatagagaagtgtgtaagtgatatgtcagaagagcttcttactgatttcacctaaaatgagaaggaagtcctgttttcaagaatgacattagagtcatgcagctttgggaccatcagttttatactgtgataattgaaaatgaaacatgttcttattttccttaaattgaagaaaaccctttagttgtctacattggatggccttattacctctcaatcatcttttcataaatgatgtgcagaaattgtacttaaggacttaggagtatatgggaggttattggttttatgtttaaggatacgtttacttgagtttaagatacaggtcatccatcattcttaggctcactttttacagaaagtatgcaaatagtaaagtgacagcactgctaatgtttttccccagtactataacttgtggtttctgaactcattattgttgtatttccaaaaaagtaataccttttaattagtgtattaaaagttaagtataattattttaatgcaatctaatacaatcagattactcagttgccttacctcatgggaagagttacttttttagatctaaaaagctgaatagcatgttagttacttggtttcaacttgagttttcttttaatgttaataagattgaaactttagtatttagtggggaatggaaagagttgcccttgttgcaagtaatgaagcctgatttgattatgaagctgcttaatcactcttcatgtgttcagaattactgttttttttgtttgtttttcctttttgtcactgtgtacattaaaattttggaagatgctttactatgtaaagtatagatggtcattttaatcattcagccacatacggttggctggtaaacagcttattctgatacaagaatgcttgggtgcatatggaaagattgtgaaagagtgtgtcttgcatcaacagctgtcttatttatgatatataagtagaaatagagcaaatgttggaatctgttatttttagtaccatgtctttaataaagctaagtattttagagga

SEQ ID NO: 350798 - DNA, 2730 bp, Homo sapiens
gagaagcagaaacgccacgccattaatattttttctactgaagaaattgttcaaataaacgaggtgaaaaggaggaggtcttctactcttcctaatatgaagtcttagatgatgttttcatcagtctgtaaaatttatggttcataatttgacccactctaaagttaggtaattgaacatgctcataaaggacataagtttaaactggcctctaaagaatactgttcatatgagaatatcaaggacccttttgcttttgtatatttgaattgccgtttatttcaattgctgtttttaaaaatgatgtgtttttgattttcagggaaaggcgtaggaggaggagcaggagttcttccagatcgccaagaacatcaaaaaccataaaaaggaaatcttctagatctccgtcccccaggagcagaaataagaaggataaaaagagagaaaaagaaagggaccacatcagtgaaagaagagagagagaacgttcaacgtctatgagaaagagttctaatgatagagatgggaaggagaagttggagaagaacagtacttcacttaaagagaaagagcacaataaagaaccagattcaagtgtgagcaaagaagtagatgacaaggatgcaccaaggactgaggaaaacaaaatacagcacaatgggaattgtcagctgaatgaagaaaacctctctaccaaaacagaagcagtataggaccgacaagtgtacctctgcactcaatgctggaatcaaatccaaagcttttaattctctcaacaagatgtaaacaggaaagaaatctagttgagcatgaagataggatctaacagcttttccagttgttagatgactttgtggccatcttgttattgagtaagaaaataaagcatggacatcatgaaaataacagatgttacccaaactcatcttctaaaatctgtgcatttccatggtggctgacacacttgtcatgtggtctgttagtgtttgccaagaaccattgcaaataaattgaacatcaaagatccaagtttgtactatccctaaagactggagataagcattggaggctcttttaaaaaatgctagttactgaattttgtattgttttacttttttttttatttcaatatatacagtttgatgatgtgcttgaaattggtgcaaatatatacacacccttgtaagtgcaaagtatgtaagaagttttaacatttacttcacaggacttgtgattgtgttaaattctcactattgtgttttcttttgctcactgtttaggacaatttttctttaaaatagttttgcagattaaaattgcttaaataagtggattaaaaaactgacaatgcatgctactgttctctttcaaaaggaagagcaaccgtgttgaatactaataatgatgaattagtattcagtgtttagaatcattgggactacccacaaagtgagcatttctttttaaattttcttgacatttccaagcttattatgaataatattgcagtgtgtcttgtcagctgtaggtggcaaaggtgcccttataaaaaaggaaactggcttttcaaaatgggctatgggagcacaagctgaagctttagtgccttctacaatgtggtatactgttttctagaattttatatgtgctagtcattctcaattcatatggaatctagatggatatttcatgcatacccatagagaagtgtgtaagtgatatgtcagaagagcttcttactgatttcacctaaaatgagaaggaagtcctgttttcaagaatgacattagagtcatgcagctttgggaccatcagttttatactgtgataattgaaaatgaaacatgttcttattttccttaaattgaagaaaaccctttagttgtctacattggatggccttattacctctcaatcatcttttcataaatgatgtgcagaaattgtacttaaggacttaggagtatatgggaggttattggttttatgtttaaggatacgtttacttgagtttaagatacaggtcatccatcattcttaggctcactttttacagaaagtatgcaaatagtaaagtgacagcactgctaatgtttttccccagtactataacttgtggtttctgaactcattattgttgtatttccaaaaaagtaataccttttaattagtgtattaaaagttaagtataattattttaatgcaatctaatacaatcagattactcagttgccttacctcatgggaagagttacttttttagatctaaaaagctgaatagcatgttagttacttggtttcaacttgagttttcttttaatgttaataagattgaaactttagtatttagtggggaatggaaagagttgcccttgttgcaagtaatgaagcctgatttgattatgaagctgcttaatcactcttcatgtgttcagaattactgttttttttgtttgtttttcctttttgtcactgtgtacattaaaattttggaagatgctttactatgtaaagtatagatggtcattttaatcattcagccacatacggttggctggtaaacagcttattctgatacaagaatgcttgggtgcatatggaaagattgtgaaagagtgtgtcttgcatcaacagctgtcttatttatgatatataagtagaaatagagcaaatgttggaatctgttatttttagtaccatgtctttaataaagctaagtattttagagga

SEQ ID NO: 350799 - DNA, 3798 bp, Homo sapiens
cagccgcgcgagaaccgccgggttgccggggcgacgcttccggctggcgcgcgcagccccgggagcaggggagttgtgaaatgggcggctagatctgcccggcgctgtgaattcgccagcgggagcgcgctcgcggccgcgcgttctccgctttcccggctccgtcgctgacgcgtcgtagacgttggggagcgggaaggcaacggcagcgggatcgggatgaacagcggcggcggcttcggtttgggcttaggcttcggcctcacccccacgtcggtgattcaggtgacgaatctgtcgtcggcggtgaccagcgagcagatgcggacgcttttttccttcctaggagaaatcgaggagctgcggctctaccccccggacaacgcacctcttgctttttcctccaaagtatgttatgttaagtttcgtgatccatcaagtgttggcgtggcccagcatctaactaacacggtttttattgacagagctctgatagttgttccttgtgcagaaggtaaaatcccagaggaatccaaagccctctctttattggctcctgctccaaccatgacaagtctgatgcctggtgcaggattgcttccaataccgaccccaaatcctttgactactcttggtgtttcacttagcagtttgggagctataccagcagcagcactagaccccaacattgcaacacttggagagataccacagccaccacttatgggaaacgtggatccttccaaaatagatgaaattaggagaacggtttatgttggaaatctgaattcccagacaacgacagctgatcaactacttgaattttttaaacaagttggagaagtgaagtttgtgcggatggcaggtgatgagactcagccaactcggtttgcttttgtggaatttgcagaccaaaattctgtaccaagggcccttgcttttaatggagttatgtttggagacaggccactgaaaataaatcactccaacaatgcaatagtaaaaccccctgagatgacacctcaggctgcagctaaggagttagaagaagtaatgaagcgagtacgagaagctcagtcatttatctcagcagctattgaaccagagtctggaaagagcaatgaaagaaaaggcggtcgatctcgttcccatactcgctcaaaatccaggtctagctcaaaatcccattctagaaggaaaagatcacaatcaaaacacaggagtagatcccataatagatcacgttcaagacagaaagacagacgtagatctaagagcccacataaaaaacgctctaaatcaagggagagacggaagtcaaggagtcgttcgcattcacgggacaagagaaaagacactcgagaaaagatcaaggaaaaggaaagagtgaaagagaaagacagggaaaaggagagagagagggaaaaggaacgtgaaaaagaaaaggaacggggtaaaaacaaagaccgggacaaggaacgggaaaaggaccgggaaaaagacaaggaaaaggacagagagagagaacgggaaaaagagcatgagaaggatcgagacaaagagaaggaaaaggaacaggacaaagaaaaggaacgagaaaaagacagatccaaagagatagatgaaaaaagaaagaaggataaaaaatccagaacaccacccaggagttacaatgcatcgcgaagatctcgtagttccagcagggaaaggcgtaggaggaggagcaggagttcttccagatcgccaagaacatcaaaaaccataaaaaggaaatcttctagatctccgtcccccaggagcagaaataagaaggataaaaagagagaaaaagaaagggaccacatcagtgaaagaagagagagagaacgttcaacgtctatgagaaagagttctaatgatagagatgggaaggagaagttggagaagaacagtacttcacttaaagagaaagagcacaataaagaaccagattcaagtgtgagcaaagaagtagatgacaaggatgcaccaaggactgaggaaaacaaaatacagcacaatgggaattgtcagctgaatgaagaaaacctctctaccaaaacagaagcagtataggaccgacaagtgtacctctgcactcaatgctggaatcaaatccaaagcttttaattctctcaacaagatgtaaacaggaaagaaatctagttgagcatgaagataggatctaacagcttttccagttgttagatgactttgtggccatcttgttattgagtaagaaaataaagcatggacatcatgaaaataacagatgttacccaaactcatcttctaaaatctgtgcatttccatggtggctgacacacttgtcatgtggtctgttagtgtttgccaagaaccattgcaaataaattgaacatcaaagatccaagtttgtactatccctaaagactggagataagcattggaggctcttttaaaaaatgctagttactgaattttgtattgttttacttttttttttatttcaatatatacagtttgatgatgtgcttgaaattggtgcaaatatatacacaccctttgatgcagccaacacgaacggttgtcatgtgtaacacaactttcgatcaccgcgaaaacaccgtcctgggaaagcgtccatgcttgatatcgttgggttcatgaacattaagtttccagtacaggtaaaatcccagaggaatccaaagccctctctttatgggtcctgctccaaccatgacagtctgatgcctgtgcaggattgcttccaatacgacccaatctttgactactcctgggggttcaccttagcaagtttgggaggtattccaggcgcgactttgacccacatttggaacgttggggagataccccaggcccctttggagccggggtcttcccatatatagacatggacacgttcttggactcgctcccgaaagcagggtgccctctgatcttaccgcacagctgcgggggggagaccaccccttcggtggacacacagcgtgattgggtacaacatcacctcgggcatagtagaaatcagattctgtctatacacacaagccataccaccaagacacggacacaaccacaacaacactccaacaacaccacacagaccaagcaacaacgaaccacaatcagcatcacagaaagaaagaccacacacaacacgaccactcgcacacgccaaccagcacacacaacacaacaacagtaaccacaccacgaccaaaccacccaacaaacagcacacaacaccaaacacacacagacgcacagaggtagagcgaggcaggacgcaagcgcacaggaccgagcgacacgaacacagacccaggcgacgcccgaagcgacgcacacacgagaccaacacagagccacaggacagagacgagaaaagcagaggaaggccagccagagaatcgaaagaaccgcagaagaagacaacaaaacacgcagaacccacacgaaacacagacacgaagaggacggcaacaagcacacaagccacaaacgagcgtcagcaggagtagacggcaagaacaacgcacaacagacaggccgcaaccacaggcagcgcaacagcggagtaagaaaaccagacaaacgcaagcaagccaccgacggagaaacagcagaagcagagggacaaagagcagagaagacgacgtacgcccagacacgacacgcggaacgacgtgaaagaggcaggagctaaagcgagacaggcacgagcccgacagacgagagaaaaacgcgaaaaacgacaacgaaacccaaacagac

SEQ ID NO: 350800 - DNA, 854 bp, Homo sapiens
taacctgaaccttctcatagacgttgaacgttctctcaatcatcttttcataaatgatgtgcagaaattgtacttaaggacttaggagtatatgggaggttattggttttatgtttaaggatacgtttacttgagtttaagatacaggtcatccatcattcttaggctcactttttacagaaagtatgcaaatagtaaagtgacagcactgctaatgtttttccccagtactataacttgtggtttctgaactcattattgttgtatttccaaaaaagtaataccttttaattagtgtattaaaagttaagtataattattttaatgcaatctaatacaatcagattactcagttgccttacctcatgggaagagttacttttttagatctaaaaagctgaatagcatgttagttacttggtttcaacttgagttttcttttaatgttaataagattgaaactttagtatttagtggggaatggaaagagttgcccttgttgcaagtaatgaagcctgatttgattatgaagctgcttaatcactcttcatgtgttcagaattactgttttttttgtttgtttttcctttttgtcactgtgtacattaaaattttggaagatgctttactatgtaaagtatagatggtcattttaatcattcagccacatacggttggctggtaaacagcttattctgatacaagaatgcttgggtgcatatggaaagattgtgaaagagtgtgtcttgcatcaacagctgtcttatttatgatatataagtagaaatagagcaaatgttggaatctgttatttttagtaccatgtctttaataaagctaagtattttagagga

SEQ ID NO: 350801 - DNA, 1517 bp, Homo sapiens
cagccgcgcgagaaccgccgggttgccggggcgacgcttccggctggcgcgcgcagccccgggagcaggggagttgtgaaatgggcggctagatctgcccggcgctgtgaattcgccagcgggagcgcgctcgcggccgcgcgttctccgctttcccggctccgtcgctgacgcgtcgtagacgttggggagcgggaaggcaacggcagcgggatcgggatgaacagcggcggcggcttcggtttgggcttaggcttcggcctcacccccacgtcggtgattcaggtgacgaatctgtcgtcggcggtgaccagcgagcagatgcggacgcttttttccttcctaggagaaatcgaggagctgcggctctaccccccggacaacgcacctcttgctttttcctccaaagtatgttatgttaagtttcgtgatccatcaagtgttggcgtggcccagcatctaactaacacggtttttattgacagagctctgatagttgttccttgtgcagaaggtaaaatcccagaggaatccaaagccctctctttattggctcctgctccaaccatgacaagtctgatgcctggtgcaggattgcttccaataccgaccccaaatcctttgactactcttggtgtttcacttagcagtttgggagctataccagcagcagcactagaccccaacattgcaacacttggagagataccacagccaccacttatgggaaacgtggatccttccaaaatagatgaaattaggagaacggtttatgttggaaatctgaattcccagacaacgacagctgatcaactacttgaattttttaaacaagttggagaagtgaagtttgtgcggatggcaggtgatgagactcagccaactcggtttgcttttgtggaatttgcagaccaaaattctgtaccaagggcccttgcttttaatggagttatgtttggagacaggccactgaaaataaatcactccaacaatgcaatagtaaaaccccctgagatgacacctcaggctgcagctaaggagttagaagaagtaatgaagcgagtacgagaagctcagtcatttatctcagcagctattgaaccagggtggctgcactcaacgagtttatgcaatgactttcttggatgtttctgaaggaggaggatgtacagagagtaggccccttgcactatatgtggtacattccacttgtgcctgattattaactgggatctttaattgttctgagcttacactgcaaagtgattttttcctcccagagtctggaaagagcaatgaaagaaaaggcggtcgatctcgttcccatactcgctcaaaatccaggtctagctcaaaatcccattctagaaggaaaagatcacaatcaaaacacaggagtagatcccataatagatcacgttcaagacagaaagacagacgtagatctaagagcccacataaacgtctaatcaggagagcgatccaagatcgtcatcacggacagagaagcctgagac

SEQ ID NO: 350802 - DNA, 987 bp, Homo sapiens
cagccgcgcgagaaccgccgggttgccggggcgacgcttccggctggcgcgcgcagccccgggagcaggggagttgtgaaatgggcggctagatctgcccggcgctgtgaattcgccagcgggagcgcgctcgcggccgcgcgttctccgctttcccggctccgtcgctgacgcgtcgtagacgttggggagcgggaaggcaacggcagcgggatcgggatgaacagcggcggcggcttcggtttgggcttaggcttcggcctcacccccacgtcggtgattcaggtgacgaatctgtcgtcggcggtgaccagcgagcagatgcggacgcttttttccttcctaggagaaatcgaggagctgcggctctaccccccggacaacgcacctcttgctttttcctccaaagtatgttatgttaagtttcgtgatccatcaagtgttggcgtggcccagcatctaactaacacggtttttattgacagagctctgatagttgttccttgtgcagaagatgactagactggccaaggcagacctgttacacttgcctgagttaggcattgtttgccatgccactaaacctgccgtcaagtgaaaccttcattggggaaatgagatcggagtctgaaccgcagaagatggacgccctgtctctgttttttattgttttactttaatttcatttctttttctttattttgtccctttttttgtttttgtttttgtttttgttttgttaaatctctttcactttaacttgtgagctggttttcccagttctttgtaaatggtatttcattaagggttcataacgtgttgcaaattatattgggagatgattagtagagctcaaccttaagataaagcaaattttcatgtggtaaattaggatacagtgttgtgaagctcattgtgagtcttaatttgtgtgtatggactcataaggtacattttattcttgaaacattaaaacactgataagta

SEQ ID NO: 350803 - DNA, 482 bp, Homo sapiens
cagccgcgcgagaaccgccgggttgccggggcgacgcttccggctggcgcgcgcagccccgggagcaggggagttgtgaaatgggcggctagatctgcccggcgctgtgaattcgccagcgggagcgcgctcgcggccgcgcgttctccgctttcccggctccgtcgctgacgcgtcgtagacgttggggagcgggaaggcaacggcagcgggatcgggatgaacagcggcggcggcttcggtttgggcttaggcttcggcctcacccccacgtcggtgattcaggtgacgaatctgtcgtcggcggtgaccagcgagcagatgcggacgcttttttccttcctaggagaaatcgaggagctgcggctctaccccccggaccaacgcacactcttgcatttttcctaccaatattgtatatgataagctgtcgtcgatgccattcaacgcaggtgtaggtcgtagcgcccatatctaatata

SEQ ID NO: 350804 - DNA, 724 bp, Homo sapiens
agcaaaatcagtgctcacaagtgatttgctgaaagcaaaaatgttattgcaaggctaaaaagagtacatatatttaaaacgttacgactcagcaggtttacttttcctcaacattttaattttagaagtagagaagagagcccgtgatttagaaaaaaatacagatactgtattttagtaaggtaaaagaacatctatttaaacttttgtgttgctaatgaaaataattaaaaaacccattctaaaaacatctaggtggtttacatttgagcagattttctaaatcaacacttagaatttaagcttcaaattctagcagaataagtggagaaaggacttaaaatcactgtcacaggaattacagacatgttgtaatcgtacgttacggcagcaacaaaatattacgaacagctgtttataatcatctggtttatatgtactgctgcagggtggctgcactcaacgagtttatgcaatgactttcttggatgtttctgaaggaggaggatgtacagagagtaggccccttgcactatatgtggtacattccacttgtgcctgattattaactgggatctttaattgttctgagcttacactgcaaagtgattttttcctcccagagtctggaaagagcaatgaaagaaaaggcggtcgatctcgttcccatactcgctcaaaatccaggtctagctcaaaatcccattctagaaggaaaagatca

SEQ ID NO: 350805 - DNA, 708 bp, Homo sapiens
cagccgcgcgagaaccgccgggttgccggggcgacgcttccggctggcgcgcgcagccccgggagcaggggagttgtgaaatgggcggctagatctgcccggcgctgtgaattcgccagcgggagcgcgctcgcggccgcgcgttctccgctttcccggctccgtcgctgacgcgtcgtagacgttggggagcgggaaggcaacggcagcgggatcgggatgaacagcggcggcggcttcggtttgggcttaggcttcggcctcacccccacgtcggtgattcaggtgacgaatctgtcgtcggcggtgaccagcgagcagatgcggacgcttttttccttcctaggagaaatcgaggagctgcggctctaccccccggacaacgcacctcttgctttttcctccaaagtatgttatgttaagtttcgtgatccatcaagtgttggcgtggcccagcatctaactaacacggtttttattgacagagctctgatagttgttccttgtgcagaaggttggtatctcgctttttttcctcttatttgaatttctgtcctgtctgttattgcctttagctttcctagagattggcaagtagacagtactcttggtgtgtgtgtgaaagtaagaatgaaatttggaggaggtaaacctttttacctaatagtaatattaaaatggttaatttatgacatgtacatttgaggt

SEQ ID NO: 350806 - DNA, 4057 bp, Homo sapiens
cagccgcgcgagaaccgccgggttgccggggcgacgcttccggctggcgcgcgcagccccgggagcaggggagttgtgaaatgggcggctagatctgcccggcgctgtgaattcgccagcgggagcgcgctcgcggccgcgcgttctccgctttcccggctccgtcgctgacgcgtcgtagacgttggggagcgggaaggcaacggcagcgggatcgggatgaacagcggcggcggcttcggtttgggcttaggcttcggcctcacccccacgtcggtgattcaggtgacgaatctgtcgtcggcggtgaccagcgagcagatgcggacgcttttttccttcctaggagaaatcgaggagctgcggctctaccccccggacaacgcacctcttgctttttcctccaaagtatgttatgttaagtttcgtgatccatcaagtgttggcgtggcccagcatctaactaacacggtttttattgacagagctctgatagttgttccttgtgcagaaggtaaaatcccagaggaatccaaagccctctctttattggctcctgctccaaccatgacaagtctgatgcctggtgcaggattgcttccaataccgaccccaaatcctttgactactcttggtgtttcacttagcagtttgggagctataccagcagcagcactagaccccaacattgcaacacttggagagataccacagccaccacttatgggaaacgtggatccttccaaaatagatgaaattaggagaacggtttatgttggaaatctgaattcccagacaacgacagctgatcaactacttgaattttttaaacaagttggagaagtgaagtttgtgcggatggcaggtgatgagactcagccaactcggtttgcttttgtggaatttgcagaccaaaattctgtaccaagggcccttgcttttaatggagttatgtttggagacaggccactgaaaataaatcactccaacaatgcaatagtaaaaccccctgagatgacacctcaggctgcagctaaggagttagaagaagtaatgaagcgagtacgagaagctcagtcatttatctcagcagctattgaaccagagtctggaaagagcaatgaaagaaaaggcggtcgatctcgttcccatactcgctcaaaatccaggtctagctcaaaatcccattctagaaggaaaagatcacaatcaaaacacaggagtagatcccataatagatcacgttcaagacagaaagacagacgtagatctaagagcccacataaaaaacgctctaaatcaagggagagacggaagtcaaggagtcgttcgcattcacgggacaagagaaaagacactcgagaaaagatcaaggaaaaggaaagagtgaaagagaaagacagggaaaaggagagagagagggaaaaggaacgtgaaaaagaaaaggaacggggtaaaaacaaagaccgggacaaggaacgggaaaaggaccgggaaaaagacaaggaaaaggacagagagagagaacgggaaaaagagcatgagaaggatcgagacaaagagaaggaaaaggaacaggacaaagaaaaggaacgagaaaaagacagatccaaagagatagatgaaaaaagaaagaaggataaaaaatccagaacaccacccaggagttacaatgcatcgcgaagatctcgtagttccagcagggaaaggcgtaggaggaggagcaggagttcttccagatcgccaagaacatcaaaaaccataaaaaggaaatcttctagatctccgtcccccaggagcagaaataagaaggataaaaagagagaaaaagaaagggaccacatcagtgaaagaagagagagagaacgttcaacgtctatgagaaagagttctaatgatagagatgggaaggagaagttggagaagaacagtacttcacttaaagagaaagagcacaataaagaaccagattcaagtgtgagcaaagaagtagatgacaaggatgcaccaaggactgaggaaaacaaaatacagcacaatgggaattgtcagctgaatgaagaaaacctctctaccaaaacagaagcagtataggaccgacaagtgtacctctgcactcaatgctggaatcaaatccaaagcttttaattctctcaacaagatgtaaacaggaaagaaatctagttgagcatgaagataggatctaacagcttttccagttgttagatgactttgtggccatcttgttattgagtaagaaaataaagcatggacatcatgaaaataacagatgttacccaaactcatcttctaaaatctgtgcatttccatggtggctgacacacttgtcatgtggtctgttagtgtttgccaagaaccattgcaaataaattgaacatcaaagatccaagtttgtactatccctaaagactggagataagcattggaggctcttttaaaaaatgctagttactgaattttgtattgttttacttttttttttatttcaatatatacagtttgatgatgtggttttaacatttacttcacaggacttgtgattgtgttaaattctcactattgtgttttcttttgctcactgtttaggacaatttttctttaaaatagttttgcagattaaaattgcttaaataagtggattaaaaaactgacaatgcatgctactgttctctttcaaaaggaagagcaaccgtgttgaatactaataatgatgaattagtattcagtgtttagaatcattgggactacccacaaagtgagcatttctttttaaattttcttgacatttccaagcttattatgaataatattgcagtgtgtcttgtcagctgtaggtggcaaaggtgcccttataaaaaaggaaactggcttttcaaaatgggctatgggagcacaagctgaagctttagtgccttctacaatgtggtatactgttttctagaattttatatgtgctagtcattctcaattcatatggaatctagatggatatttcatgcatacccatagagaagtgtgtaagtgatatgtcagaagagcttcttactgatttcacctaaaatgagaaggaagtcctgttttcaagaatgacattagagtcatgcagctttgggaccatcagttttatactgtgataattgaaaatgaaacatgttcttattttccttaaattgaagaaaaccctttagttgtctacattggatggccttattacctctcaatcatcttttcataaatgatgtgcagaaattgtacttaaggacttaggagtatatgggaggttattggttttatgtttaaggatacgtttacttgagtttaagatacaggtcatccatcattcttaggctcactttttacagaaagtatgcaaatagtaaagtgacagcactgctaatgtttttccccagtactataacttgtggtttctgaactcattattgttgtatttccaaaaaagtaataccttttaattagtgtattaaaagttaagtataattattttaatgcaatctaatacaatcagattactcagttgccttacctcatgggaagagttacttttttagatctaaaaagctgaatagcatgttagttacttggtttcaacttgagttttcttttaatgttaataagattgaaactttagtatttagtggggaatggaaagagttgcccttgttgcaagtaatgaagcctgatttgattatgaagctgcttaatcactcttcatgtgttcagaattactgttttttttgtttgtttttcctttttgtcactgtgtacattaaaattttggaagatgctttactatgtaaagtatagatggtcattttaatcattcagccacatacggttggctggtaaacagcttattctgatacaagaatgcttgggtgcatatggaaagattgtgaaagagtgtgtcttgcatcaacagctgtcttatttatgatatataagtagaaatagagcaaatgttggaatctgttatttttagtaccatgtctttaataaagctaagtattttagagga

SEQ ID NO: 350807 - DNA, 3778 bp, Homo sapiens
ttttcctagtagagcaggataaaaggaaagacttaagttcttatttatttctttatacagatctgatagatagattcatttattattattattttttaactgcaagggtaattgtaaaatcatagtgtaaagtttgtgtggtgtttctgctttttgtaatgtttggaacttgcctctgcaggtaaaatcccagaggaatccaaagccctctctttattggctcctgctccaaccatgacaagtctgatgcctggtgcaggattgcttccaataccgaccccaaatcctttgactactcttggtgtttcacttagcagtttgggagctataccagcagcagcactagaccccaacattgcaacacttggagagataccacagccaccacttatgggaaacgtggatccttccaaaatagatgaaattaggagaacggtttatgttggaaatctgaattcccagacaacgacagctgatcaactacttgaattttttaaacaagttggagaagtgaagtttgtgcggatggcaggtgatgagactcagccaactcggtttgcttttgtggaatttgcagaccaaaattctgtaccaagggcccttgcttttaatggagttatgtttggagacaggccactgaaaataaatcactccaacaatgcaatagtaaaaccccctgagatgacacctcaggctgcagctaaggagttagaagaagtaatgaagcgagtacgagaagctcagtcatttatctcagcagctattgaaccagagtctggaaagagcaatgaaagaaaaggcggtcgatctcgttcccatactcgctcaaaatccaggtctagctcaaaatcccattctagaaggaaaagatcacaatcaaaacacaggagtagatcccataatagatcacgttcaagacagaaagacagacgtagatctaagagcccacataaaaaacgctctaaatcaagggagagacggaagtcaaggagtcgttcgcattcacgggacaagagaaaagacactcgagaaaagatcaaggaaaaggaaagagtgaaagagaaagacagggaaaaggagagagagagggaaaaggaacgtgaaaaagaaaaggaacggggtaaaaacaaagaccgggacaaggaacgggaaaaggaccgggaaaaagacaaggaaaaggacagagagagagaacgggaaaaagagcatgagaaggatcgagacaaagagaaggaaaaggaacaggacaaagaaaaggaacgagaaaaagacagatccaaagagatagatgaaaaaagaaagaaggataaaaaatccagaacaccacccaggagttacaatgcatcgcgaagatctcgtagttccagcagggaaaggcgtaggaggaggagcaggagttcttccagatcgccaagaacatcaaaaaccataaaaaggaaatcttctagatctccgtcccccaggagcagaaataagaaggataaaaagagagaaaaagaaagggaccacatcagtgaaagaagagagagagaacgttcaacgtctatgagaaagagttctaatgatagagatgggaaggagaagttggagaagaacagtacttcacttaaagagaaagagcacaataaagaaccagattcaagtgtgagcaaagaagtagatgacaaggatgcaccaaggactgaggaaaacaaaatacagcacaatgggaattgtcagctgaatgaagaaaacctctctaccaaaacagaagcagtataggaccgacaagtgtacctctgcactcaatgctggaatcaaatccaaagcttttaattctctcaacaagatgtaaacaggaaagaaatctagttgagcatgaagataggatctaacagcttttccagttgttagatgactttgtggccatcttgttattgagtaagaaaataaagcatggacatcatgaaaataacagatgttacccaaactcatcttctaaaatctgtgcatttccatggtggctgacacacttgtcatgtggtctgttagtgtttgccaagaaccattgcaaataaattgaacatcaaagatccaagtttgtactatccctaaagactggagataagcattggaggctcttttaaaaaatgctagttactgaattttgtattgttttacttttttttttatttcaatatatacagtttgatgatgtgcttgaaattggtgcaaatatatacacacccttgtaagtgcaaagtatgtaagaagttttaacatttacttcacaggacttgtgattgtgttaaattctcactattgtgttttcttttgctcactgtttaggacaatttttctttaaaatagttttgcagattaaaattgcttaaataagtggattaaaaaactgacaatgcatgctactgttctctttcaaaaggaagagcaaccgtgttgaatactaataatgatgaattagtattcagtgtttagaatcattgggactacccacaaagtgagcatttctttttaaattttcttgacatttccaagcttattatgaataatattgcagtgtgtcttgtcagctgtaggtggcaaaggtgcccttataaaaaaggaaactggcttttcaaaatgggctatgggagcacaagctgaagctttagtgccttctacaatgtggtatactgttttctagaattttatatgtgctagtcattctcaattcatatggaatctagatggatatttcatgcatacccatagagaagtgtgtaagtgatatgtcagaagagcttcttactgatttcacctaaaatgagaaggaagtcctgttttcaagaatgacattagagtcatgcagctttgggaccatcagttttatactgtgataattgaaaatgaaacatgttcttattttccttaaattgaagaaaaccctttagttgtctacattggatggccttattacctctcaatcatcttttcataaatgatgtgcagaaattgtacttaaggacttaggagtatatgggaggttattggttttatgtttaaggatacgtttacttgagtttaagatacaggtcatccatcattcttaggctcactttttacagaaagtatgcaaatagtaaagtgacagcactgctaatgtttttccccagtactataacttgtggtttctgaactcattattgttgtatttccaaaaaagtaataccttttaattagtgtattaaaagttaagtataattattttaatgcaatctaatacaatcagattactcagttgccttacctcatgggaagagttacttttttagatctaaaaagctgaatagcatgttagttacttggtttcaacttgagttttcttttaatgttaataagattgaaactttagtatttagtggggaatggaaagagttgcccttgttgcaagtaatgaagcctgatttgattatgaagctgcttaatcactcttcatgtgttcagaattactgttttttttgtttgtttttcctttttgtcactgtgtacattaaaattttggaagatgctttactatgtaaagtatagatggtcattttaatcattcagccacatacggttggctggtaaacagcttattctgatacaagaatgcttgggtgcatatggaaagattgtgaaagagtgtgtcttgcatcaacagctgtcttatttatgatatataagtagaaatagagcaaatgttggaatctgttatttttagtaccatgtctttaataaagctaagtattttagagga

SEQ ID NO: 350808 - DNA, 4286 bp, Homo sapiens
cagccgcgcgagaaccgccgggttgccggggcgacgcttccggctggcgcgcgcagccccgggagcaggggagttgtgaaatgggcggctagatctgcccggcgctgtgaattcgccagcgggagcgcgctcgcggccgcgcgttctccgctttcccggctccgtcgctgacgcgtcgtagacgttggggagcgggaaggcaacggcagcgggatcgggatgaacagcggcggcggcttcggtttgggcttaggcttcggcctcacccccacgtcggtgattcaggtgacgaatctgtcgtcggcggtgaccagcgagcagatgcggacgcttttttccttcctaggagaaatcgaggagctgcggctctaccccccggacaacgcacctcttgctttttcctccaaagtatgttatgttaagtttcgtgatccatcaagtgttggcgtggcccagcatctaactaacacggtttttattgacagagctctgatagttgttccttgtgcagaaggtaaaatcccagaggaatccaaagccctctctttattggctcctgctccaaccatgacaagtctgatgcctggtgcaggattgcttccaataccgaccccaaatcctttgactactcttggtgtttcacttagcagtttgggagctataccagcagcagcactagaccccaacattgcaacacttggagagataccacagccaccacttatgggaaacgtggatccttccaaaatagatgaaattaggagaacggtttatgttggaaatctgaattcccagacaacgacagctgatcaactacttgaattttttaaacaagttggagaagtgaagtttgtgcggatggcaggtgatgagactcagccaactcggtttgcttttgtggaatttgcagaccaaaattctgtaccaagggcccttgcttttaatggagttatgtttggagacaggccactgaaaataaatcactccaacaatgcaatagtaaaaccccctgagatgacacctcaggctgcagctaaggagttagaagaagtaatgaagcgagtacgagaagctcagtcatttatctcagcagctattgaaccagggtggctgcactcaacgagtttatgcaatgactttcttggatgtttctgaaggaggaggatgtacagagagtaggccccttgcactatatgtggtacattccacttgtgcctgattattaactgggatctttaattgttctgagcttacactgcaaagtgattttttcctcccagagtctggaaagagcaatgaaagaaaaggcggtcgatctcgttcccatactcgctcaaaatccaggtctagctcaaaatcccattctagaaggaaaagatcacaatcaaaacacaggagtagatcccataatagatcacgttcaagacagaaagacagacgtagatctaagagcccacataaaaaacgctctaaatcaagggagagacggaagtcaaggagtcgttcgcattcacgggacaagagaaaagacactcgagaaaagatcaaggaaaaggaaagagtgaaagagaaagacagggaaaaggagagagagagggaaaaggaacgtgaaaaagaaaaggaacggggtaaaaacaaagaccgggacaaggaacgggaaaaggaccgggaaaaagacaaggaaaaggacagagagagagaacgggaaaaagagcatgagaaggatcgagacaaagagaaggaaaaggaacaggacaaagaaaaggaacgagaaaaagacagatccaaagagatagatgaaaaaagaaagaaggataaaaaatccagaacaccacccaggagttacaatgcatcgcgaagatctcgtagttccagcagggaaaggcgtaggaggaggagcaggagttcttccagatcgccaagaacatcaaaaaccataaaaaggaaatcttctagatctccgtcccccaggagcagaaataagaaggataaaaagagagaaaaagaaagggaccacatcagtgaaagaagagagagagaacgttcaacgtctatgagaaagagttctaatgatagagatgggaaggagaagttggagaagaacagtacttcacttaaagagaaagagcacaataaagaaccagattcaagtgtgagcaaagaagtagatgacaaggatgcaccaaggactgaggaaaacaaaatacagcacaatgggaattgtcagctgaatgaagaaaacctctctaccaaaacagaagcagtataggaccgacaagtgtacctctgcactcaatgctggaatcaaatccaaagcttttaattctctcaacaagatgtaaacaggaaagaaatctagttgagcatgaagataggatctaacagcttttccagttgttagatgactttgtggccatcttgttattgagtaagaaaataaagcatggacatcatgaaaataacagatgttacccaaactcatcttctaaaatctgtgcatttccatggtggctgacacacttgtcatgtggtctgttagtgtttgccaagaaccattgcaaataaattgaacatcaaagatccaagtttgtactatccctaaagactggagataagcattggaggctcttttaaaaaatgctagttactgaattttgtattgttttacttttttttttatttcaatatatacagtttgatgatgtgcttgaaattggtgcaaatatatacacacccttgtaagtgcaaagtatgtaagaagttttaacatttacttcacaggacttgtgattgtgttaaattctcactattgtgttttcttttgctcactgtttaggacaatttttctttaaaatagttttgcagattaaaattgcttaaataagtggattaaaaaactgacaatgcatgctactgttctctttcaaaaggaagagcaaccgtgttgaatactaataatgatgaattagtattcagtgtttagaatcattgggactacccacaaagtgagcatttctttttaaattttcttgacatttccaagcttattatgaataatattgcagtgtgtcttgtcagctgtaggtggcaaaggtgcccttataaaaaaggaaactggcttttcaaaatgggctatgggagcacaagctgaagctttagtgccttctacaatgtggtatactgttttctagaattttatatgtgctagtcattctcaattcatatggaatctagatggatatttcatgcatacccatagagaagtgtgtaagtgatatgtcagaagagcttcttactgatttcacctaaaatgagaaggaagtcctgttttcaagaatgacattagagtcatgcagctttgggaccatcagttttatactgtgataattgaaaatgaaacatgttcttattttccttaaattgaagaaaaccctttagttgtctacattggatggccttattacctctcaatcatcttttcataaatgatgtgcagaaattgtacttaaggacttaggagtatatgggaggttattggttttatgtttaaggatacgtttacttgagtttaagatacaggtcatccatcattcttaggctcactttttacagaaagtatgcaaatagtaaagtgacagcactgctaatgtttttccccagtactataacttgtggtttctgaactcattattgttgtatttccaaaaaagtaataccttttaattagtgtattaaaagttaagtataattattttaatgcaatctaatacaatcagattactcagttgccttacctcatgggaagagttacttttttagatctaaaaagctgaatagcatgttagttacttggtttcaacttgagttttcttttaatgttaataagattgaaactttagtatttagtggggaatggaaagagttgcccttgttgcaagtaatgaagcctgatttgattatgaagctgcttaatcactcttcatgtgttcagaattactgttttttttgtttgtttttcctttttgtcactgtgtacattaaaattttggaagatgctttactatgtaaagtatagatggtcattttaatcattcagccacatacggttggctggtaaacagcttattctgatacaagaatgcttgggtgcatatggaaagattgtgaaagagtgtgtcttgcatcaacagctgtcttatttatgatatataagtagaaatagagcaaatgttggaatctgttatttttagtaccatgtctttaataaagctaagtattttagagga

SEQ ID NO: 350809 - DNA, 4773 bp, Homo sapiens
cagccgcgcgagaaccgccgggttgccggggcgacgcttccggctggcgcgcgcagccccgggagcaggggagttgtgaaatgggcggctagatctgcccggcgctgtgaattcgccagcgggagcgcgctcgcggccgcgcgttctccgctttcccggctccgtcgctgacgcgtcgtagacgttggggagcgggaaggcaacggcagcgggatcgggatgaacagcggcggcggcttcggtttgggcttaggcttcggcctcacccccacgtcggtgattcaggtgacgaatctgtcgtcggcggtgaccagcgagcagatgcggacgcttttttccttcctaggagaaatcgaggagctgcggctctaccccccggaagtaagtgctggagctcggctgggggaggggcgcgggcgccatagagacctcgggagccgaggcgtggaggagagcgcggacgcgggcgcgcggtgcatgtcacgtgatcgcgccggcttaccttggtgcccatatttgattagggcacccgggttccgccgtcctgctctccttagtcggatttggggggttaactactgcacggagcccttaccaaggatttagaatggttgccctttctgtgcctccgggacttgtgttcgctgctgggtcttcgaattccgtgcccccaccctcttatttccccccgaacttaagatggccgcaggtgggcccggaacagccctcatggcaaacgtctcagagcgtttttccactctgaaaatcgcggagaccgcgcctgagccacagtccagtttttaaggccttggtgtcaggccgttttgctgacgagaaagcctgctgctggtgacaagatggaactggggctgtgtttgtttcccaggacggtcgcacaaacttagcattttggtttatctaaccgagcgcatccatgttcccaaagatcatgtctgttagcccttttgacagcagattaaattttcctcctgaaaggtcacactgtcccaaagctttcagaaaaagtcaacgcacctcttgctttttcctccaaagtatgttatgttaagtttcgtgatccatcaagtgttggcgtggcccagcatctaactaacacggtttttattgacagagctctgatagttgttccttgtgcagaagtgatgcagccaacacgaacggttgtcatgtgtaacacaactttcgatcaccgcgaaaacaccgtcctgggaaagcgtccatgcttgatatcgtttggttcatgaacattaagtttccagtacaggtaaaatcccagaggaatccaaagccctctctttattggctcctgctccaaccatgacaagtctgatgcctggtgcaggattgcttccaataccgaccccaaatcctttgactactcttggtgtttcacttagcagtttgggagctataccagcagcagcactagaccccaacattgcaacacttggagagataccacagccaccacttatgggaaacgtggatccttccaaaatagatgaaattaggagaacggtttatgttggaaatctgaattcccagacaacgacagctgatcaactacttgaattttttaaacaagttggagaagtgaagtttgtgcggatggcagaataaatcactccaacaatgcaatagtaaaaccccctgagatgacacctcaggctgcagctaaggagttagaagaagtaatgaagcgagtacgagaagctcagtcatttatctcagcagctattgaaccagagtctggaaagagcaatgaaagaaaaggcggtcgatctcgttcccatactcgctcaaaatccaggtctagctcaaaatcccattctagaaggaaaagatcacaatcaaaacacaggagtagatcccataatagatcacgttcaagacagaaagacagacgtagatctaagagcccacataaaaaacgctctaaatcaagggagagacggaagtcaaggagtcgttcgcattcacgggacaagagaaaagacactcgagaaaagatcaaggaaaaggaaagagtgaaagagaaagacagggaaaaggagagagagagggaaaaggaacgtgaaaaagaaaaggaacggggtaaaaacaaagaccgggacaaggaacgggaaaaggaccgggaaaaagacaaggaaaaggacagagagagagaacgggaaaaagagcatgagaaggatcgagacaaagagaaggaaaaggaacaggacaaagaaaaggaacgagaaaaagacagatccaaagagatagatgaaaaaagaaagaaggataaaaaatccagaacaccacccaggagttacaatgcatcgcgaagatctcgtagttccagcagggaaaggcgtaggaggaggagcaggagttcttccagatcgccaagaacatcaaaaaccataaaaaggaaatcttctagatctccgtcccccaggagcagaaataagaaggataaaaagagagaaaaagaaagggaccacatcagtgaaagaagagagagagaacgttcaacgtctatgagaaagagttctaatgatagagatgggaaggagaagttggagaagaacagtacttcacttaaagagaaagagcacaataaagaaccagattcaagtgtgagcaaagaagtagatgacaaggatgcaccaaggactgaggaaaacaaaatacagcacaatgggaattgtcagctgaatgaagaaaacctctctaccaaaacagaagcagtataggaccgacaagtgtacctctgcactcaatgctggaatcaaatccaaagcttttaattctctcaacaagatgtaaacaggaaagaaatctagttgagcatgaagataggatctaacagcttttccagttgttagatgactttgtggccatcttgttattgagtaagaaaataaagcatggacatcatgaaaataacagatgttacccaaactcatcttctaaaatctgtgcatttccatggtggctgacacacttgtcatgtggtctgttagtgtttgccaagaaccattgcaaataaattgaacatcaaagatccaagtttgtactatccctaaagactggagataagcattggaggctcttttaaaaaatgctagttactgaattttgtattgttttacttttttttttatttcaatatatacagtttgatgatgtgcttgaaattggtgcaaatatatacacacccttgtaagtgcaaagtatgtaagaagttttaacatttacttcacaggacttgtgattgtgttaaattctcactattgtgttttcttttgctcactgtttaggacaatttttctttaaaatagttttgcagattaaaattgcttaaataagtggattaaaaaactgacaatgcatgctactgttctctttcaaaaggaagagcaaccgtgttgaatactaataatgatgaattagtattcagtgtttagaatcattgggactacccacaaagtgagcatttctttttaaattttcttgacatttccaagcttattatgaataatattgcagtgtgtcttgtcagctgtaggtggcaaaggtgcccttataaaaaaggaaactggcttttcaaaatgggctatgggagcacaagctgaagctttagtgccttctacaatgtggtatactgttttctagaattttatatgtgctagtcattctcaattcatatggaatctagatggatatttcatgcatacccatagagaagtgtgtaagtgatatgtcagaagagcttcttactgatttcacctaaaatgagaaggaagtcctgttttcaagaatgacattagagtcatgcagctttgggaccatcagttttatactgtgataattgaaaatgaaacatgttcttattttccttaaattgaagaaaaccctttagttgtctacattggatggccttattacctctcaatcatcttttcataaatgatgtgcagaaattgtacttaaggacttaggagtatatgggaggttattggttttatgtttaaggatacgtttacttgagtttaagatacaggtcatccatcattcttaggctcactttttacagaaagtatgcaaatagtaaagtgacagcactgctaatgtttttccccagtactataacttgtggtttctgaactcattattgttgtatttccaaaaaagtaataccttttaattagtgtattaaaagttaagtataattattttaatgcaatctaatacaatcagattactcagttgccttacctcatgggaagagttacttttttagatctaaaaagctgaatagcatgttagttacttggtttcaacttgagttttcttttaatgttaataagattgaaactttagtatttagtggggaatggaaagagttgcccttgttgcaagtaatgaagcctgatttgattatgaagctgcttaatcactcttcatgtgttcagaattactgttttttttgtttgtttttcctttttgtcactgtgtacattaaaattttggaagatgctttactatgtaaagtatagatggtcattttaatcattcagccacatacggttggctggtaaacagcttattctgatacaagaatgcttgggtgcatatggaaagattgtgaaagagtgtgtcttgcatcaacagctgtcttatttatgatatataagtagaaatagagcaaatgttggaatctgttatttttagtaccatgtctttaataaagctaagtattttagagga

SEQ ID NO: 350810 - DNA, 2550 bp, Homo sapiens
gggacctcactccgatccgctgatcagcagcttctcctagttagaggaggagaaccagtctgtgtgcagcagaatggaggccgcagagcaggcgagaaatgctttgcaggtcgacctggcggaggcagagaagaggagggaagccctgtgggaaaagaacactcacctggaggctcagctgcagaaagctgaggaggctggggctgagctgcaggcagatctcagggacatccaagaacagaaataagaaggataaaaagagagaaaaagaaagggaccacatcagtgaaagaagagagagagaacgttcaacgtctatgagaaagagttctaatgatagagatgggaaggagaagttggagaagaacagtacttcacttaaagagaaagagcacaataaagaaccagattcaagtgtgagcaaagaagtagatgacaaggatgcaccaaggactgaggaaaacaaaatacagcacaatgggaattgtcagctgaatgaagaaaacctctctaccaaaacagaagcagtataggaccgacaagtgtacctctgcactcaatgctggaatcaaatccaaagcttttaattctctcaacaagatgtaaacaggaaagaaatctagttgagcatgaagataggatctaacagcttttccagttgttagatgactttgtggccatcttgttattgagtaagaaaataaagcatggacatcatgaaaataacagatgttacccaaactcatcttctaaaatctgtgcatttccatggtggctgacacacttgtcatgtggtctgttagtgtttgccaagaaccattgcaaataaattgaacatcaaagatccaagtttgtactatccctaaagactggagataagcattggaggctcttttaaaaaatgctagttactgaattttgtattgttttacttttttttttatttcaatatatacagtttgatgatgtgcttgaaattggtgcaaatatatacacacccttgtaagtgcaaagtatgtaagaagttttaacatttacttcacaggacttgtgattgtgttaaattctcactattgtgttttcttttgctcactgtttaggacaatttttctttaaaatagttttgcagattaaaattgcttaaataagtggattaaaaaactgacaatgcatgctactgttctctttcaaaaggaagagcaaccgtgttgaatactaataatgatgaattagtattcagtgtttagaatcattgggactacccacaaagtgagcatttctttttaaattttcttgacatttccaagcttattatgaataatattgcagtgtgtcttgtcagctgtaggtggcaaaggtgcccttataaaaaaggaaactggcttttcaaaatgggctatgggagcacaagctgaagctttagtgccttctacaatgtggtatactgttttctagaattttatatgtgctagtcattctcaattcatatggaatctagatggatatttcatgcatacccatagagaagtgtgtaagtgatatgtcagaagagcttcttactgatttcacctaaaatgagaaggaagtcctgttttcaagaatgacattagagtcatgcagctttgggaccatcagttttatactgtgataattgaaaatgaaacatgttcttattttccttaaattgaagaaaaccctttagttgtctacattggatggccttattacctctcaatcatcttttcataaatgatgtgcagaaattgtacttaaggacttaggagtatatgggaggttattggttttatgtttaaggatacgtttacttgagtttaagatacaggtcatccatcattcttaggctcactttttacagaaagtatgcaaatagtaaagtgacagcactgctaatgtttttccccagtactataacttgtggtttctgaactcattattgttgtatttccaaaaaagtaataccttttaattagtgtattaaaagttaagtataattattttaatgcaatctaatacaatcagattactcagttgccttacctcatgggaagagttacttttttagatctaaaaagctgaatagcatgttagttacttggtttcaacttgagttttcttttaatgttaataagattgaaactttagtatttagtggggaatggaaagagttgcccttgttgcaagtaatgaagcctgatttgattatgaagctgcttaatcactcttcatgtgttcagaattactgttttttttgtttgtttttcctttttgtcactgtgtacattaaaattttggaagatgctttactatgtaaagtatagatggtcattttaatcattcagccacatacggttggctggtaaacagcttattctgatacaagaatgcttgggtgcatatggaaagattgtgaaagagtgtgtcttgcatcaacagctgtcttatttatgatatataagtagaaatagagcaaatgttggaatctgttatttttagtaccatgtctttaataaagctaagtattttagagga

SEQ ID NO: 350811 - DNA, 1568 bp, Homo sapiens
  misc_feature (1533)..(1533): n is a, c, g, or t
cagccgcgcgagaaccgccgggttgccggggcgacgcttccggctggcgcgcgcagccccgggagcaggggagttgtgaaatgggcggctagatctgcccggcgctgtgaattcgccagcgggagcgcgctcgcggccgcgcgttctccgctttcccggctccgtcgctgacgcgtcgtagacgttggggagcgggaaggcaacggcagcgggatcgggatgaacagcggcggcggcttcggtttgggcttaggcttcggcctcacccccacgtcggtgattcaggtgacgaatctgtcgtcggcggtgaccagcgagcagatgcggacgcttttttccttcctaggagaaatcgaggagctgcggctctaccccccggacaacgcacctcttgctttttcctccaaagtatgttatgttaagtttcgtgatccatcaagtgttggcgtggcccagcatctaactaacacggtttttattgacagagctctgatagttgttccttgtgcagaaggtaaaatcccagaggaatccaaagccctctctttattggctcctgctccaaccatgacaagtctgatgcctggtgcaggattgcttccaataccgaccccaaatcctttgactactcttggtgtttcacttagcagtttgggagctataccagcagcagcactagaccccaacattgcaacacttggagagataccacagccaccacttatgggaaacgtggatccttccaaaatagatgaaattaggagaacggtttatgttggaaatctgaattcccagacaacgacagctgatcaactacttgaattttttaaacaagttggagaagtgaagtttgtgcggatggcaggtgatgagactcagccaactcggtttgcttttgtggaatttgcagaccaaaattctgtaccaagggcccttgcttttaatggagttatgtttggagacaggccactgaaaataaatcactccaacaatgcaatagtaaaaccccctgagatgacacctcaggctgcagctaaggagttagaagaagtaatgaagcgagtacgagaagctcagtcatttatctcagcagctattgaaccagggtggctgcactcaacgagtttatgcaatgactttcttggatgtttctgaaggaggaggatgtacagagagtaggccccttgcactatatgtggtacattccacttgtgcctgattattaactgggatctttaattgttctgagcttacactgcaaagtgattttttcctcccagagtctggaaagagcaatgaaagaaaaggcggtcgatctcgttcccatactcgctcaaaatccaggtctagctcaaaatcccattctagaaggaaaagatcacaatcaaaacacaggagtagatcccataatagatcacgttcaagacagaaagacagacgtagatctaagagcccacataaaaaacgctctaaatcaagggagagacggaagtcaaggagtcgttcgcattcacggacagagaaaagacactngagaaaccgtcgattcgagggatcctctgagtcac

SEQ ID NO: 350812 - DNA, 1634 bp, Homo sapiens
cagccgcgcgagaaccgccgggttgccggggcgacgcttccggctggcgcgcgcagccccgggagcaggggagttgtgaaatgggcggctagatctgcccggcgctgtgaattcgccagcgggagcgcgctcgcggccgcgcgttctccgctttcccggctccgtcgctgacgcgtcgtagacgttggggagcgggaaggcaacggcagcgggatcgggatgaacagcggcggcggcttcggtttgggcttaggcttcggcctcacccccacgtcggtgattcaggtgacgaatctgtcgtcggcggtgaccagcgagcagatgcggacgcttttttccttcctaggagaaatcgaggagctgcggctctaccccccggaagtaagtgctggagctcggctgggggaggggcgcgggcgccatagagacctcgggagccgaggcgtggaggagagcgcggacgcgggcgcgcggtgcatgtcacgtgatcgcgccggcttaccttggtgcccatatttgattagggcacccgggttccgccgtcctgctctccttagtcggatttggggggttaactactgcacggagcccttaccaaggatttagaatggttgccctttctgtgcctccgggacttgtgttcgctgctgggtcttcgaattccgtgcccccaccctcttatttccccccgaacttaagatggccgcaggtgggcccggaacagccctcatggcaaacgtctcagagcgtttttccactctgaaaatcgcggagaccgcgcctgagccacagtccagtttttaaggccttggtgtcaggccgttttgctgacgagaaagcctgctgctggtgacaagatggaactggggctgtgtttgtttcccaggacggtcgcacaaacttagcattttggtttatctaaccgagcgcatccatgttcccaaagatcatgtctgttagcccttttgacagcagattaaattttcctcctgaaaggtcacactgtcccaaagctttcagaaaaagtcaacgcacctcttgctttttcctccaaagtatgttatgttaagtttcgtgatccatcaagtgttggcgtggcccagcatctaactaacacggtttttattgacagagctctgatagttgttccttgtgcagaagatgactagactggccaaggcagacctgttacacttgcctgagttaggcattgtttgccatgccactaaacctgccgtcaagtgaaaccttcattggggaaatgagatcggagtctgaaccgcagaagatggacgccctgtctctgttttttattgttttactttaatttcatttctttttctttattttgtccctttttttgtttttgtttttgtttttgttttgttaaatctctttcactttaacttgtgagctggttttcccagttctttgtaaatggtatttcattaagggttcataacgtgttgcaaattatattgggagatgattagtagagctcaaccttaagataaagcaaattttcatgtggtaaattaggatacagtgttgtgaagctcattgtgagtcttaatttgtgtgtatggactcataaggtacattttattcttgaaacattaaaacactgataagta

SEQ ID NO: 350813 - DNA, 2951 bp, Homo sapiens
aaaagttatgcatactcataaaaattcaaacaatgctgaattgaaaaaggaaaagttagtggctctttatccactttatgtcccactgcccagagatcatcaccatgagcagtttggtgtatgacattccagatacgcacacatatcttcatacatacacacatacaaatatgtatacatataacaaaagactgtaaaatataataatatgatcatggacaacttgccatttggacttactccattctttttttttaattttattttcttggactcaggtcacaaatttattcttttaaaacactgcatagtactctacagaatgggagcactttgatttatttaaccaattccttattggattgtgttcaatgcttcaaatcaaaactttcaaaataaaatttacagggtgtcttggttgtgtttctatgtcaatacatagattgacgttatcttttatctttttttaaacagatgcagtgtacttcataatatgaatggaacacaatttctttaaacatgtgtctatcaaaaatcttccaatttttttttactcttatcagtaatgaacatcgttgcacataatctgtgtacaaaagtacgactgtttctcaaggttaaattcctagaaggaggataactggatcaaagggtatttacatgtaaaattggaaacatgttgccaaatgccccaggaggttaaactggtttattctttcactaagggcatatgttcccaacaccctcaccagttttactctccttttcaagtcttgcctgttggcaaatgaatggtataccattagtgttttgatctgcatttctctgatgatagtgatattgaccatctcttccaacttcttgtctgtttgaatactctcctttccaaatgtgtgagtggaaagagctttggttagcagtgagctctaggctttgttgaacttggagccagaacaatctgagtttcaggccagggtctacagaatgggagcacttcaatttatttaaccaattccttattgaattgtgtccaatgctgcaaataaaaactttaaaaatacaatttacagggtatcttggttgtatttgtatgtcagtttaacaaaatgacttgctcagggtctgcccttgaacaagttgtttctgctctttgaccctctgattctccacctgaaatggaaagtgcctgccccgagggcttaatgtgcgcaaaactcccctaaaggacacattgtggatgcttgaaacgtgacagttaggttttgaggggccaagaggctgggtcaatctgggttccactggtgtgagtgggctgtatctcaatgcagtgagctgcccatcccaggagggattcaagcacaagctgaacaaagacagggctcttacaggagtcccggtgagggtgatttataggggttccaaggactccaatattctgcggccctcggattctcccctctttggtcaagtccctcttcgtagggtccttgagttgggaagataagcatttgcttgagcccaagcagcatctaaatgcccccagggagctgtgaatgaagagctttgcaccatgctgagcgcactgaaggacagaatccagtggcccagcctccaacaatggccccttcacagcaggcctaattcccttccacaaatcctcctttacaattctgccaaacctcggcccgctgagatgcccatggtcacgtgatttggggccttctcattgtaggtttctttctgatgctgtcaccggcgtggctattgtcaccatcttgttcttcttcccgtcccaaaggccctctctcaagtggtggtttgacttcaaaggtaaggtggtcaaggctggggtctcggtgggctcagtgaggactgcggcatggagtgtggtcatcaagggcctggagccccccactgcactaaccacgtggtccttcctgcttctcctttcactgtctgagccattgccttgtctggggactgagggctgccccaggtggtagtccaggacaggggttagcaactacagtcttcagaccaaatccagcctgctatctgtttttgaacagcctgtgagctaagcacagttttcagatttttaaatggttgaaaaaaaaaccaaaagaaaaacattttactacatgtgaaagttacatgaaatctaaatttcagtgtccatgtatcaaattttgctttcccctaaggaatttgtggaaatttattttctttagttatataagtacctacacaatagcctcaattttgcctcttggcccacaaaagcaaaaaatgtttatttttcttgtcctttgcagaaaaatgaccccttggcccaaagcaggagttgcaccttggttgcccagggagccacacatggaaaacacaagctgggtttcaaccgtataggaagtgttggggactgaggaaaaactgcctaaaggcattcagattccatttttaaaaaatcactgagtacctctaaccaaaatgttgtagactgtggccttcagattgccagcttgcgactccctccggtgtccagcagatgtctaccagaaggtgacgccaacacctgaggctgccacctgggtcagttggatgagctcctccggagtcaggaaatagggactataatcaaactattttctattgttgagaaaaatagtgtcactcaggatagccccagccatggaagagtcagggtttgagtgtggggagtatagtgtatgtgtcctgtaggaagatgaggattttgcaagctccataaacagttctttctttcttcttcttcttttttttttaatggggtctcactctgtcacccaggctggggtgcagtagcaccatcacagctcagcgcagtctcgaactcttgggctccagtgaacctcccacctcagactcccaggaagctgggattacaggtgtgagccacctcgcttggctaattt

SEQ ID NO: 350814 - DNA, 4057 bp, Homo sapiens
gcagtcccgggccggcccgtaccgccaggcgatcgcgctgatggcggcgctggcagcagcggccaagaaggtgtggagcgcgcggcggctgctggtgctgctgttcacgccgctcgcgctgctgccggtggtcttcgccctcccgcccaaggaaggccgctgcttgtttgtcatcctgctcatggcggtgtactggtgcacggaggccctgccgctctcagtgacggcgctgctgcccatcgtcctcttccccttcatgggcatcttgccctccaacaaggtctgcccccagtacttcctcgacaccaacttcctcttcctcagtgggctgatcatggccagcgccattgaggagtggaacctgcaccggcgaatcgccctcaagatcctgatgcttgttggagtccagccggccaggctcatcctggggatgatggtgaccacctcgttcttgtccatgtggctgagcaacaccgcctccactgccatgatgcttcccattgccaatgccatcctgaaaagtctctttggccagaaggaggttcgaaaggaccccagccaggagagtgaagagaacacagctgctgtgcggagaaacggcctacacactgtgcccacggagatgcagtttctcgccagcacagaagccaaagaccaccctggggagacagaggttccactggatctgccggctgactccaggaaggaggatgaatatcgtcggaacatctggaagggcttcctcatctccatcccctactcagccagtattgggggcacagccacactcacgggcacagcccctaacctcatcctgcttggccagctcaagagtttctttccgcagtgtgacgtggtgaatttcggctcctggttcattttcgccttccctcttatgctgttgttcctgttggcaggctggctctggatctccttcctgtacgggggactgagcttcaggggctggaggaagaataaatctgagataagaaccaatgcagaagatagggctcgagctgtaattcgggaagaataccagaacctggggcccatcaagtttgccgaacaggctgttttcatccttttctgcatgtttgccatcctcctcttcacccgggacccgaagttcatccctggctgggccagcctcttcaatcctgggtttctttctgatgctgtcaccggcgtggctattgtcaccatcttgttcttcttcccgtcccaaaggccctctctcaagtggtggtttgacttcaaagctcccaacacagagacagagcccttgctgacctggaagaaggcccaggagacagtgccctggaacatcatccttctcctgggagggggcttcgccatggccaaaggctgtgaggaatcggggctgtctgtatggattggtgggcagctgcaccccctggagaatgtgccccccgccctggctgtgctgctcatcactgtggtcatcgccttcttcactgagtttgccagcaacacggcgaccatcatcatcttcctgccggtcctggcagagctggccatccgcctgagagtgcaccccctgtatctgatgattccgggcacagtcggctgctcctttgccttcatgctcccggtctcaacgccccccaactccatcgccttcgcctctggacacttgctggtcaaagacatggtgcggacaggcctcctgatgaacctgatgggtgtcctgctgctcagtttggctatgaatacctgggcacagaccatcttccagctgggcaccttcccggactgggctgatatgtactcggtcaatgtcacagcattgccacccaccttggccaatgacacatttcggaccctctgagtccccctggaggactcccttgaggctgaaccctctcaaagggctgtcaccatcacctgctgctaggacactacaaaacaatcaaataattcttttctgtaatccaatatgcagcaagcaagggtgacctccagtggcccactcaagtccatgagccattatctaggatactttctctctctttcatgcagttcaaagcccaggtatctctcagatctgctgcctgagaaataagctcctttatcagttagctgttttatcattaggatacaagacagcccagtgtcatcaacagtgagcaaatctggcatggtgtttgtctcgtacagttgggataggaggccattcattcccatgggcacagctaacattatcccccagtgattactttcgattacactgaagagaccaccttgtctttaaagatcactttcctgggctgcaatgttccaacccagttgttccagctgttcacaaccagtgtgtgattttgcttagttggtgcccattctgcaccagttgttttacccctgccgataaccagcagtcagagattcttttttaatccttggagacagggaaagggacagatagctttccaaggacatgagactgtgcaaagcctctttgctgtttctctgggctcctgagcataccaggggaagttctagaaaccgcagctgacatctcgacccaagagatttaggattctcctgtttcatctgggtcagtttggccataattctggggtcaggccaggcctgggtcctgccctcccatggggtgactcatgacccctccagccaggactctcctacatgtggcccccataggcctctgtggctgcaaggcggtcagttgctgcttgtcccagcaggtggccttgatctctccatgccccaccttaagtggtaagcatgtttaattatcaaaggccccatttgtcaggggtgagagaaaagtcaaaagataaattggggccttgtaaaaggccagggtaaaatgtctcaggcaagcaaaagattgtccccttctgcatatgggtaaaactgagacgtccccgtgagcccgaggctggaagtggtgtctgccttcaagggttaatccctctttgttccaagcagaagcattctggcatcccagtgaagagctcaggccctcaggaagtgtctgctgaatggaatggcccagcattagcccagtattggaaaagacaccagcccaggggccctgactcgtcacacttccctttcctaagcctctgagggtggagattcccctaggagcgcttggccagctgggaaggcagcgcccagctgcacttgttgttgatacagcataagtgaatcatgggcatttccctgagagcagtgggagaggccctctgagttggaagttgagctccacctcctttccaagtgagcactcagtgttgaatcacagttacaacccactggggctggtgggagatgcgttgtatgggactggaagcaagaggttcattcaaagagaaactcatgggatttgtaaccagatgaatcatgatttctaagacttctgatcaaaaatactgtgaaataaagaatgttaatcaactttggacctggagatgatttgcctttctgaacataagagagcttcaaagccccaaattcctgggctggggattccacagagttgacctctctgattttctactgctcttccctcccctctccagctacatactctgcctcagggccttcgcatgtgctgttccctctgcctagaacactctctcccaagtatatgtctggttccccgactcactttattcaagtccctgctcaggtgtcaccttccctgagaggcttccctgacctcctgtctaaaatgtcaccctcattactctccacccccttactctgctataatttctccttaatagttaggacactgtataacttattttcttattatcttcttctccctctagaatataaatttatgaaaatacaaatgttattttttttactgctgtaactccagttcctagaacaatttccagcacatagcaagtgttcagtaaatatttgctgcttgaatctgctccagaattaacaagaaagccatctcttcctctgatctggggtctgttttgttcattactttgttcactccttcttccatttattcattcaataaacatttattgggaaaaaaacatgt

SEQ ID NO: 350815 - DNA, 4628 bp, Homo sapiens
aaaagttatgcatactcataaaaattcaaacaatgctgaattgaaaaaggaaaagttagtggctctttatccactttatgtcccactgcccagagatcatcaccatgagcagtttggtgtatgacattccagatacgcacacatatcttcatacatacacacatacaaatatgtatacatataacaaaagactgtaaaatataataatatgatcatggacaacttgccatttggacttactccattctttttttttaattttattttcttggactcaggtcacaaatttattcttttaaaacactgcatagtactctacagaatgggagcactttgatttatttaaccaattccttattggattgtgttcaatgcttcaaatcaaaactttcaaaataaaatttacagggtgtcttggttgtgtttctatgtcaatacatagattgacgttatcttttatctttttttaaacagatgcagtgtacttcataatatgaatggaacacaatttctttaaacatgtgtctatcaaaaatcttccaatttttttttactcttatcagtaatgaacatcgttgcacataatctgtgtacaaaagtacgactgtttctcaaggttaaattcctagaaggaggataactggatcaaagggtatttacatgtaaaattggaaacatgttgccaaatgccccaggaggttaaactggtttattctttcactaagggcatatgttcccaacaccctcaccagttttactctccttttcaagtcttgcctgttggcaaatgaatggtataccattagtgttttgatctgcatttctctgatgatagtgatattgaccatctcttccaacttcttgtctgtttgaatactctcctttccaaatgtgtgagtggaaagagctttggttagcagtgagctctaggctttgttgaacttggagccagaacaatctgagtttcaggccagggtctacagaatgggagcacttcaatttatttaaccaattccttattgaattgtgtccaatgctgcaaataaaaactttaaaaatacaatttacagggtatcttggttgtatttgtatgtcagtttaacaaaatgacttgctcagggtctgcccttgaacaagttgtttctgctctttgaccctctgattctccacctgaaatggaaagtgcctgccccgagggcttaatgtgcgcaaaactcccctaaaggacacattgtggatgcttgaaacgtgacagttaggttttgaggggccaagaggctgggtcaatctgggttccactggtgtgagtgggctgtatctcaatgcagtgagctgcccatcccaggagggattcaagcacaagctgaacaaagacagggctcttacaggagtcccggtgagggtgatttataggggttccaaggactccaatattctgcggccctcggattctcccctctttggtcaagtccctcttcgtagggtccttgagttgggaagataagcatttgcttgagcccaagcagcatctaaatgcccccagggagctgtgaatgaagagctttgcaccatgctgagcgcactgaaggacagaatccagtggcccagcctccaacaatggccccttcacagcaggcctaattcccttccacaaatcctcctttacaattctgccaaacctcggcccgctgagatgcccatggtcacgtgatttggggccttctcattgtaggtttctttctgatgctgtcaccggcgtggctattgtcaccatcttgttcttcttcccgtcccaaaggccctctctcaagtggtggtttgacttcaaagctcccaacacagagacagagcccttgctgacctggaagaaggcccaggagacagtgccctggaacatcatccttctcctgggagggggcttcgccatggccaaaggctgtgaggaatcggggctgtctgtatggattggtgggcagctgcaccccctggagaatgtgccccccgccctggctgtgctgctcatcactgtggtcatcgccttcttcactgagtttgccagcaacacggcgaccatcatcatcttcctgccggtcctggcagagctggccatccgcctgagagtgcaccccctgtatctgatgattccgggcacagtcggctgctcctttgccttcatgctcccggtctcaacgccccccaactccatcgccttcgcctctggacacttgctggtcaaagacatggtgcggacaggcctcctgatgaacctgatgggtgtcctgctgctcagtttggctatgaatacctgggcacagaccatcttccagctgggcaccttcccggactgggctgatatgtactcggtcaatgtcacagcattgccacccaccttggccaatgacacatttcggaccctctgagtccccctggaggactcccttgaggctgaaccctctcaaagggctgtcaccatcacctgctgctaggacactacaaaacaatcaaataattcttttctgtaatccaatatgcagcaagcaagggtgacctccagtggcccactcaagtccatgagccattatctaggatactttctctctctttcatgcagttcaaagcccaggtatctctcagatctgctgcctgagaaataagctcctttatcagttagctgttttatcattaggatacaagacagcccagtgtcatcaacagtgagcaaatctggcatggtgtttgtctcgtacagttgggataggaggccattcattcccatgggcacagctaacattatcccccagtgattactttcgattacactgaagagaccaccttgtctttaaagatcactttcctgggctgcaatgttccaacccagttgttccagctgttcacaaccagtgtgtgattttgcttagttggtgcccattctgcaccagttgttttacccctgccgataaccagcagtcagagattcttttttaatccttggagacagggaaagggacagatagctttccaaggacatgagactgtgcaaagcctctttgctgtttctctgggctcctgagcataccaggggaagttctagaaaccgcagctgacatctcgacccaagagatttaggattctcctgtttcatctgggtcagtttggccataattctggggtcaggccaggcctgggtcctgccctcccatggggtgactcatgacccctccagccaggactctcctacatgtggcccccataggcctctgtggctgcaaggcggtcagttgctgcttgtcccagcaggtggccttgatctctccatgccccaccttaagtggtaagcatgtttaattatcaaaggccccatttgtcaggggtgagagaaaagtcaaaagataaattggggccttgtaaaaggccagggtaaaatgtctcaggcaagcaaaagattgtccccttctgcatatgggtaaaactgagacgtccccgtgagcccgaggctggaagtggtgtctgccttcaagggttaatccctctttgttccaagcagaagcattctggcatcccagtgaagagctcaggccctcaggaagtgtctgctgaatggaatggcccagcattagcccagtattggaaaagacaccagcccaggggccctgactcgtcacacttccctttcctaagcctctgagggtggagattcccctaggagcgcttggccagctgggaaggcagcgcccagctgcacttgttgttgatacagcataagtgaatcatgggcatttccctgagagcagtgggagaggccctctgagttggaagttgagctccacctcctttccaagtgagcactcagtgttgaatcacagttacaacccactggggctggtgggagatgcgttgtatgggactggaagcaagaggttcattcaaagagaaactcatgggatttgtaaccagatgaatcatgatttctaagacttctgatcaaaaatactgtgaaataaagaatgttaatcaactttggacctggagatgatttgcctttctgaacataagagagcttcaaagccccaaattcctgggctggggattccacagagttgacctctctgattttctactgctcttccctcccctctccagctacatactctgcctcagggccttcgcatgtgctgttccctctgcctagaacactctctcccaagtatatgtctggttccccgactcactttattcaagtccctgctcaggtgtcaccttccctgagaggcttccctgacctcctgtctaaaatgtcaccctcattactctccacccccttactctgctataatttctccttaatagttaggacactgtataacttattttcttattatcttcttctccctctagaatataaatttatgaaaatacaaatgttattttttttactgctgtaactccagttcctagaacaatttccagcacatagcaagtgttcagtaaatatttgctgcttgaatctgctccagaattaacaagaaagccatctcttcctctgatctggggtctgttttgttcattactttgttcactccttcttccatttattcattcaataaacatttattgggaaaaaaacatgt

SEQ ID NO: 350816 - DNA, 4062 bp, Homo sapiens
ttgtttccccatctgccatgattataagttttctgaggcatccccagccatgctgaactggaagtggcactaaggtccaaaggaagctacatatgggtggtccctgctacaccagcctcccaagcctcccagtgcaccttctaggagacaagcaaggaaggccgctgcttgtttgtcatcctgctcatggcggtgtactggtgcacggaggccctgccgctctcagtgacggcgctgctgcccatcgtcctcttccccttcatgggcatcttgccctccaacaaggtctgcccccagtacttcctcgacaccaacttcctcttcctcagtgggctgatcatggccagcgccattgaggagtggaacctgcaccggcgaatcgccctcaagatcctgatgcttgttggagtccagccggccaggctcatcctggggatgatggtgaccacctcgttcttgtccatgtggctgagcaacaccgcctccactgccatgatgcttcccattgccaatgccatcctgaaaagtctctttggccagaaggaggttcgaaaggaccccagccaggagagtgaagagaacacagctgctgtgcggagaaacggcctacacactgtgcccacggagatgcagtttctcgccagcacagaagccaaagaccaccctggggagacagaggttccactggatctgccggctgactccaggaaggaggatgaatatcgtcggaacatctggaagggcttcctcatctccatcccctactcagccagtattgggggcacagccacactcacgggcacagcccctaacctcatcctgcttggccagctcaagagtttctttccgcagtgtgacgtggtgaatttcggctcctggttcattttcgccttccctcttatgctgttgttcctgttggcaggctggctctggatctccttcctgtacgggggactgagcttcaggggctggaggaagaataaatctgagataagaaccaatgcagaagatagggctcgagctgtaattcgggaagaataccagaacctggggcccatcaagtttgccgaacaggctgttttcatccttttctgcatgtttgccatcctcctcttcacccgggacccgaagttcatccctggctgggccagcctcttcaatcctgggtttctttctgatgctgtcaccggcgtggctattgtcaccatcttgttcttcttcccgtcccaaaggccctctctcaagtggtggtttgacttcaaagctcccaacacagagacagagcccttgctgacctggaagaaggcccaggagacagtgccctggaacatcatccttctcctgggagggggcttcgccatggccaaaggctgtgaggaatcggggctgtctgtatggattggtgggcagctgcaccccctggagaatgtgccccccgccctggctgtgctgctcatcactgtggtcatcgccttcttcactgagtttgccagcaacacggcgaccatcatcatcttcctgccggtcctggcagagctggccatccgcctgagagtgcaccccctgtatctgatgattccgggcacagtcggctgctcctttgccttcatgctcccggtctcaacgccccccaactccatcgccttcgcctctggacacttgctggtcaaagacatggtgcggacaggcctcctgatgaacctgatgggtgtcctgctgctcagtttggctatgaatacctgggcacagaccatcttccagctgggcaccttcccggactgggctgatatgtactcggtcaatgtcacagcattgccacccaccttggccaatgacacatttcggaccctctgagtccccctggaggactcccttgaggctgaaccctctcaaagggctgtcaccatcacctgctgctaggacactacaaaacaatcaaataattcttttctgtaatccaatatgcagcaagcaagggtgacctccagtggcccactcaagtccatgagccattatctaggatactttctctctctttcatgcagttcaaagcccaggtatctctcagatctgctgcctgagaaataagctcctttatcagttagctgttttatcattaggatacaagacagcccagtgtcatcaacagtgagcaaatctggcatggtgtttgtctcgtacagttgggataggaggccattcattcccatgggcacagctaacattatcccccagtgattactttcgattacactgaagagaccaccttgtctttaaagatcactttcctgggctgcaatgttccaacccagttgttccagctgttcacaaccagtgtgtgattttgcttagttggtgcccattctgcaccagttgttttacccctgccgataaccagcagtcagagattcttttttaatccttggagacagggaaagggacagatagctttccaaggacatgagactgtgcaaagcctctttgctgtttctctgggctcctgagcataccaggggaagttctagaaaccgcagctgacatctcgacccaagagatttaggattctcctgtttcatctgggtcagtttggccataattctggggtcaggccaggcctgggtcctgccctcccatggggtgactcatgacccctccagccaggactctcctacatgtggcccccataggcctctgtggctgcaaggcggtcagttgctgcttgtcccagcaggtggccttgatctctccatgccccaccttaagtggtaagcatgtttaattatcaaaggccccatttgtcaggggtgagagaaaagtcaaaagataaattggggccttgtaaaaggccagggtaaaatgtctcaggcaagcaaaagattgtccccttctgcatatgggtaaaactgagacgtccccgtgagcccgaggctggaagtggtgtctgccttcaagggttaatccctctttgttccaagcagaagcattctggcatcccagtgaagagctcaggccctcaggaagtgtctgctgaatggaatggcccagcattagcccagtattggaaaagacaccagcccaggggccctgactcgtcacacttccctttcctaagcctctgagggtggagattcccctaggagcgcttggccagctgggaaggcagcgcccagctgcacttgttgttgatacagcataagtgaatcatgggcatttccctgagagcagtgggagaggccctctgagttggaagttgagctccacctcctttccaagtgagcactcagtgttgaatcacagttacaacccactggggctggtgggagatgcgttgtatgggactggaagcaagaggttcattcaaagagaaactcatgggatttgtaaccagatgaatcatgatttctaagacttctgatcaaaaatactgtgaaataaagaatgttaatcaactttggacctggagatgatttgcctttctgaacataagagagcttcaaagccccaaattcctgggctggggattccacagagttgacctctctgattttctactgctcttccctcccctctccagctacatactctgcctcagggccttcgcatgtgctgttccctctgcctagaacactctctcccaagtatatgtctggttccccgactcactttattcaagtccctgctcaggtgtcaccttccctgagaggcttccctgacctcctgtctaaaatgtcaccctcattactctccacccccttactctgctataatttctccttaatagttaggacactgtataacttattttcttattatcttcttctccctctagaatataaatttatgaaaatacaaatgttattttttttactgctgtaactccagttcctagaacaatttccagcacatagcaagtgttcagtaaatatttgctgcttgaatctgctccagaattaacaagaaagccatctcttcctctgatctggggtctgttttgttcattactttgttcactccttcttccatttattcattcaataaacatttattgggaaaaaaacatgt

SEQ ID NO: 350817 - DNA, 2515 bp, Homo sapiens
atttgtaaccgttcgtacgagaatcgctgtcctctccttgcggccgccagtgtggtggaattcgctcccggtctcaacgccccccaactccatcgccttcgcctctggacacttgctggtcaaagacatggtgcggacaggcctcctgatgaacctgatgggtgtcctgctgctcagtttggctatgaatacctgggcacagaccatcttccagctgggcaccttcccggactgggctgatatgtactcggtcaatgtcacagcattgccacccaccttggccaatgacacatttcggaccctctgagtccccctggaggactcccttgaggctgaaccctctcaaagggctgtcaccatcacctgctgctaggacactacaaaacaatcaaataattcttttctgtaatccaatatgcagcaagcaagggtgacctccagtggcccactcaagtccatgagccattatctaggatactttctctctctttcatgcagttcaaagcccaggtatctctcagatctgctgcctgagaaataagctcctttatcagttagctgttttatcattaggatacaagacagcccagtgtcatcaacagtgagcaaatctggcatggtgtttgtctcgtacagttgggataggaggccattcattcccatgggcacagctaacattatcccccagtgattactttcgattacactgaagagaccaccttgtctttaaagatcactttcctgggctgcaatgttccaacccagttgttccagctgttcacaaccagtgtgtgattttgcttagttggtgcccattctgcaccagttgttttacccctgccgataaccagcagtcagagattcttttttaatccttggagacagggaaagggacagatagctttccaaggacatgagactgtgcaaagcctctttgctgtttctctgggctcctgagcataccaggggaagttctagaaaccgcagctgacatctcgacccaagagatttaggattctcctgtttcatctgggtcagtttggccataattctggggtcaggccaggcctgggtcctgccctcccatggggtgactcatgacccctccagccaggactctcctacatgtggcccccataggcctctgtggctgcaaggcggtcagttgctgcttgtcccagcaggtggccttgatctctccatgccccaccttaagtggtaagcatgtttaattatcaaaggccccatttgtcaggggtgagagaaaagtcaaaagataaattggggccttgtaaaaggccagggtaaaatgtctcaggcaagcaaaagattgtccccttctgcatatgggtaaaactgagacgtccccgtgagcccgaggctggaagtggtgtctgccttcaagggttaatccctctttgttccaagcagaagcattctggcatcccagtgaagagctcaggccctcaggaagtgtctgctgaatggaatggcccagcattagcccagtattggaaaagacaccagcccaggggccctgactcgtcacacttccctttcctaagcctctgagggtggagattcccctaggagcgcttggccagctgggaaggcagcgcccagctgcacttgttgttgatacagcataagtgaatcatgggcatttccctgagagcagtgggagaggccctctgagttggaagttgagctccacctcctttccaagtgagcactcagtgttgaatcacagttacaacccactggggctggtgggagatgcgttgtatgggactggaagcaagaggttcattcaaagagaaactcatgggatttgtaaccagatgaatcatgatttctaagacttctgatcaaaaatactgtgaaataaagaatgttaatcaactttggacctggagatgatttgcctttctgaacataagagagcttcaaagccccaaattcctgggctggggattccacagagttgacctctctgattttctactgctcttccctcccctctccagctacatactctgcctcagggccttcgcatgtgctgttccctctgcctagaacactctctcccaagtatatgtctggttccccgactcactttattcaagtccctgctcaggtgtcaccttccctgagaggcttccctgacctcctgtctaaaatgtcaccctcattactctccacccccttactctgctataatttctccttaatagttaggacactgtataacttattttcttattatcttcttctccctctagaatataaatttatgaaaatacaaatgttattttttttactgctgtaactccagttcctagaacaatttccagcacatagcaagtgttcagtaaatatttgctgcttgaatctgctccagaattaacaagaaagccatctcttcctctgatctggggtctgttttgttcattactttgttcactccttcttccatttattcattcaataaacatttattgggaaaaaaacatgt

SEQ ID NO: 350818 - DNA, 3057 bp, Homo sapiens
gcccccgtcgcgccccctgcgctcccacgtcgcgcacacttgcacgccggccctggccgggtcggggctggaggcgagaacgagcccgacgggtctttcccacgggccgtccgcgcctgcgcgacccgtcctcagctccccaggagcccaggtgaccgctcgtcgctaggctagggatgaatcccctgagacggtgccccgatggtcccttgctaggccgtgtcagtgaatcccgagtggtgctgagagttcagccgcctgcccatcgtcctcttccccttcatgggcatcttgccctccaacaaggtctgcccccagtacttcctcgacaccaacttcctcttcctcagtgggctgatcatggccagcgccattgaggagtggaacctgcaccggcgaatcgccctcaagatcctgatgcttgttggagtccagccggccaggctcatcctggggatgatggtgaccacctcgttcttgtccatgtggctgagcaacaccgcctccactgccatgatgcttcccattgccaatgccatccgcctgagagtgcaccccctgtatctgatgattccgggcacagtcggctgctcctttgccttcatgctcccggtctcaacgccccccaactccatcgccttcgcctctggacacttgctggtcaaagacatggtgcggacaggcctcctgatgaacctgatgggtgtcctgctgctcagtttggctatgaatacctgggcacagaccatcttccagctgggcaccttcccggactgggctgatatgtactcggtcaatgtcacagcattgccacccaccttggccaatgacacatttcggaccctctgagtccccctggaggactcccttgaggctgaaccctctcaaagggctgtcaccatcacctgctgctaggacactacaaaacaatcaaataattcttttctgtaatccaatatgcagcaagcaagggtgacctccagtggcccactcaagtccatgagccattatctaggatactttctctctctttcatgcagttcaaagcccaggtatctctcagatctgctgcctgagaaataagctcctttatcagttagctgttttatcattaggatacaagacagcccagtgtcatcaacagtgagcaaatctggcatggtgtttgtctcgtacagttgggataggaggccattcattcccatgggcacagctaacattatcccccagtgattactttcgattacactgaagagaccaccttgtctttaaagatcactttcctgggctgcaatgttccaacccagttgttccagctgttcacaaccagtgtgtgattttgcttagttggtgcccattctgcaccagttgttttacccctgccgataaccagcagtcagagattcttttttaatccttggagacagggaaagggacagatagctttccaaggacatgagactgtgcaaagcctctttgctgtttctctgggctcctgagcataccaggggaagttctagaaaccgcagctgacatctcgacccaagagatttaggattctcctgtttcatctgggtcagtttggccataattctggggtcaggccaggcctgggtcctgccctcccatggggtgactcatgacccctccagccaggactctcctacatgtggcccccataggcctctgtggctgcaaggcggtcagttgctgcttgtcccagcaggtggccttgatctctccatgccccaccttaagtggtaagcatgtttaattatcaaaggccccatttgtcaggggtgagagaaaagtcaaaagataaattggggccttgtaaaaggccagggtaaaatgtctcaggcaagcaaaagattgtccccttctgcatatgggtaaaactgagacgtccccgtgagcccgaggctggaagtggtgtctgccttcaagggttaatccctctttgttccaagcagaagcattctggcatcccagtgaagagctcaggccctcaggaagtgtctgctgaatggaatggcccagcattagcccagtattggaaaagacaccagcccaggggccctgactcgtcacacttccctttcctaagcctctgagggtggagattcccctaggagcgcttggccagctgggaaggcagcgcccagctgcacttgttgttgatacagcataagtgaatcatgggcatttccctgagagcagtgggagaggccctctgagttggaagttgagctccacctcctttccaagtgagcactcagtgttgaatcacagttacaacccactggggctggtgggagatgcgttgtatgggactggaagcaagaggttcattcaaagagaaactcatgggatttgtaaccagatgaatcatgatttctaagacttctgatcaaaaatactgtgaaataaagaatgttaatcaactttggacctggagatgatttgcctttctgaacataagagagcttcaaagccccaaattcctgggctggggattccacagagttgacctctctgattttctactgctcttccctcccctctccagctacatactctgcctcagggccttcgcatgtgctgttccctctgcctagaacactctctcccaagtatatgtctggttccccgactcactttattcaagtccctgctcaggtgtcaccttccctgagaggcttccctgacctcctgtctaaaatgtcaccctcattactctccacccccttactctgctataatttctccttaatagttaggacactgtataacttattttcttattatcttcttctccctctagaatataaatttatgaaaatacaaatgttattttttttactgctgtaactccagttcctagaacaatttccagcacatagcaagtgttcagtaaatatttgctgcttgaatctgctccagaattaacaagaaagccatctcttcctctgatctggggtctgttttgttcattactttgttcactccttcttccatttattcattcaataaacatttattgggaaaaaaacatgt

SEQ ID NO: 350819 - DNA, 3106 bp, Homo sapiens
gcagtcccgggccggcccgtaccgccaggcgatcgcgctgatggcggcgctggcagcagcggccaagaaggtgtggagcgcgcggcggctgctggtgctgctgttcacgccgctcgcgctgctgccggtggtcttcgccctcccgcccaaggaaggccgctgcttgtttgtcatcctgctcatggcggtgtactggtgcacggaggccctgccgctctcagtgacggcgctgctgcccatcgtcctcttccccttcatgggcatcttgccctccaacaaggtctgcccccagtacttcctcgacaccaacttcctcttcctcagtgggctgatcatggccagcgccattgaggagtggaacctgcaccggcgaatcgccctcaagatcctgatgcttgttggagtccagccggccaggctcatcctggggatgatggtgaccacctcgttcttgtccatgtggctgagcaacaccgcctccactgccatgatgcttcccattgccaatgccatcctgaaaagtctctttggccagaaggaggttcgaaaggaccccagccaggagagtgaagagaacacagctgctgtgcggagaaacggcctacacactgtgcccacggagatgcagtttctcgccagcacagaagccaaagaccaccctggggagacagaggttccactggatctgccggctgactccaggaaggaggatgaatatcgtcggaacatctggaagggcttcctcatctccatcccctactcagccagtattgggggcacagccacactcacgggcacagcccctaacctcatcctgcttggccagctcaagagtttctttccgcagtgtgacgtggtgaatttcggctcctggttcattttcgccttccctcttatgctgttgttcctgttggcaggctggctctggatctccttcctgtacgggggactgagcttcaggggctggaggaagaataaatctgagataagaaccaatgcagaagatagggctcgagctgtaattcgggaagaataccagaacctggggcccatcaagtttgccgaacaggctgttttcatccttttctgcatgtttgccatcctcctcttcacccgggacccgaagttcatccctggctgggccagcctcttcaatcctgggtttctttctgatgctgtcaccggcgtggctattgtcaccatcttgttcttcttcccgtcccaaaggccctctctcaagtggtggtttgacttcaaagctcccaacacagagacagagcccttgctgacctggaagaaggcccaggagacagtgccctggaacatcatccttctcctgggagggggcttcgccatggccaaaggctgtgaggaatcggggctgtctgtatggattggtgggcagctgcaccccctggagaatgtgccccccgccctggctgtgctgctcatcactgtggtcatcgccttcttcactgagtttgccagcaacacggcgaccatcatcatcttcctgccggtcctggcagagctggccatccgcctgagagtgcaccccctgtatctgatgattccgggcacagtcggctgctcctttgccttcatgctcccggtctcaacgccccccaactccatcgccttcgcctctggacacttgctggtcaaagacatggtgcggacaggcctcctgatgaacctgatgggtgtcctgctgctcagtttggctatgaatacctgggcacagaccatcttccagctgggcaccttcccggactgggctgatatgtactcggtcaatgtcacagcattgccacccaccttggccaatgacacatttcggaccctctgagtccccctggaggactcccttgaggctgaaccctctcaaagggctgtcaccatcacctgctgctaggacactacaaaacaatcaaataattcttttctgtaatccaatatgcagcaagcaagggtgacctccagtggcccactcaagtccatgagccattatctaggatactttctctctctttcatgcagttcaaagcccaggtatctctcagatctgctgcctgagaaataagctcctttatcagttagctgttttatcattaggatacaagacagcccagtgtcatcaacagtgagcaaatctggcatggtgtttgtctcgtacagttgggataggaggccattcattcccatgggcacagctaacattatcccccagtgattactttcgattacactgaagagaccaccttgtctttaaagatcactttcctgggctgcaatgttccaacccagttgttccagctgttcacaaccagtgtgtgattttgcttagttggtgcccattctgcaccagttgttttacccctgccgataaccagcagtcagagattcttttttaatccttggagacagggaaagggacagatagctttccaaggacatgagactgtgcaaagcctctttgctgtttctctgggctcctgagcataccaggggaagttctagaaaccgcagctgacatctcgacccaagagatttaggattctcctgtttcatctgggtcagtttggccataattctggggtcaggccaggcctgggtcctgccctcccatggggtgactcatgacccctccagccaggactctcctacatgtggcccccataggcctctgtggctgcaaggcggtcagttgctgcttgtcccagcaggtggccttgatctctccatgccccaccttaagtggtaagcatgtttaattatcaaaggccccatttgtcaggggtgagagaaaagtcaaaagataaattggggccttgtaaaaggccagggtaaaatgtctcaggcaagcaaaagattgtccccttctgcatatgggtaaaactgagacgtccccgtgagcccgaggctggaagtggtgtctgccttcaagggttaatccctctttgttccaagcagaagcattctggcatcccagtgaagagctcaggccctcaggaagtgtctgctgtatcaacaacaagtcgagctggcgctgccttcccagctggccaagctgctcctaggggaatctccaccctcagagtcgatc

SEQ ID NO: 350820 - DNA, 933 bp, Homo sapiens
ttgtttccccatctgccatgattataagttttctgaggcatccccagccatgctgaactggaagtggcactaaggtccaaaggaagctacatatgggtggtccctgctacaccagcctcccaagcctcccagtgcaccttctaggagacaagcaaggaaggccgctgcttgtttgtcatcctgctcatggcggtgtactggtgcacggaggccctgccgctctcagtgacggcgctgctgcccatcgtcctcttccccttcatgggcatcttgccctccaacaaggtctgcccccagtacttcctcgacaccaacttcctcttcctcagtgggctgatcatggccagcgccattgaggagtggaacctgcaccggcgaatcgccctcaagatcctgatgcttgttggagtccagccggccaggctcatcctggggatgatggtgaccacctcgttcttgtccatgtggctgagcaacaccgcctccactgccatgatgcttcccattgccaatgccatcctgaaaagtctctttggccagaaggaggttcgaaaggaccccagccaggagagtgaagagaacacaggaatagaacccaatactttcctctctgaggaaaggctgaaacttcaagctccccttgtgataagacttggtcagataactgagtctggtcaatggaatatgagtggaaatgatgtgtgcaacttccgggttctgtccttcctgccgggtggaatgtgaatatgatggcacctgggacccaaagacaggagccacatcttgagagatagatggcagatctgcccctgtggctttggatcatttacctcagtgaacacaacaagcattatccatgaaaccataggttttgtgtgctagttctagtttttaaaatatgaattaaattaaatacgtatctgttaaaactta

SEQ ID NO: 350821 - DNA, 2380 bp, Homo sapiens
gcagtcccgggccggcccgtaccgccaggcgatcgcgctgatggcggcgctggcagcagcggccaagaaggtgtggagcgcgcggcggctgctggtgctgctgttcacgccgctcgcgctgctgccggtggtcttcgccctcccgcccaaggaaggccgctgcttgtttgtcatcctgctcatggcggtgtactggtgcacggaggccctgccgctctcagtgacggcgctgctgcccatcgtcctcttccccttcatgggcatcttgccctccaacaaggtctgcccccagtacttcctcgacaccaacttcctcttcctcagtgggctgatcatggccagcgccattgaggagtggaacctgcaccggcgaatcgccctcaagatcctgatgcttgttggagtccagccggccaggctcatcctggggatgatggtgaccacctcgttcttgtccatgtggctgagcaacaccgcctccactgccatgatgcttcccattgccaatgccatcctgaaaagtctctttggccagaaggaggttcgaaaggaccccagccaggagagtgaagagaacacagctgctgtgcggagaaacggcctacacactgtgcccacggagatgcagtttctcgccagcacagaagccaaagaccaccctggggagacagaggttccactggatctgccggctgactccaggaaggaggatgaatatcgtcggaacatctggaagggcttcctcatctccatcccctactcagccagtattgggggcacagccacactcacgggcacagcccctaacctcatcctgcttggccagctcaagagtttctttccgcagtgtgacgtggtgaatttcggctcctggttcattttcgccttccctcttatgctgttgttcctgttggcaggctggctctggatctccttcctgtacgggggactgagcttcaggggctggaggaagaataaatctgagataagaaccaatgcagaagatagggctcgagctgtaattcgggaagaataccagaacctggggcccatcaagtttgccgaacaggctgttttcatccttttctgcatgtttgccatcctcctcttcacccgggacccgaagttcatccctggctgggccagcctcttcaatcctgggtttctttctgatgctgtcaccggcgtggctattgtcaccatcttgttcttcttcccgtcccaaaggccctctctcaagtggtggtttgacttcaaaggtaaggtggtcaaggctggggtctcggtgggctcagtgaggactgcggcatggagtgtggtcatcaagggcctggagccccccactgcactaaccacgtggtccttcctgcttctcctttcactgtctgagccattgccttgtctggggactgagggctgccccaggtggtagtccaggacaggggttagcaactacagtcttcagaccaaatccagcctgctatctgtttttgaacagcctgtgagctaagcacagttttcagatttttaaatggttgaaaaaaaaaccaaaagaaaaacattttactacatgtgaaagttacatgaaatctaaatttcagtgtccatgtatcaaattttgctttcccctaaggaatttgtggaaatttattttctttagttatataagtacctacacaatagcctcaattttgcctcttggcccacaaaagcaaaaaatgtttatttttcttgtcctttgcagaaaaatgaccccttggcccaaagcaggagttgcaccttggttgcccagggagccacacatggaaaacacaagctgggtttcaaccgtataggaagtgttggggactgaggaaaaactgcctaaaggcattcagattccatttttaaaaaatcactgagtacctctaaccaaaatgttgtagactgtggccttcagattgccagcttgcgactccctccggtgtccagcagatgtctaccagaaggtgacgccaacacctgaggctgccacctgggtcagttggatgagctcctccggagtcaggaaatagggactataatcaaactattttctattgttgagaaaaatagtgtcactcaggatagccccagccatggaagagtcagggtttgagtgtggggagtatagtgtatgtgtcctgtaggaagatgaggattttgcaagctccataaacagttctttctttcttcttcttcttttttttttaatggggtctcactctgtcacccaggctggggtgcagtagcaccatcacagctcagcgcagtctcgaactcttgggctccagtgaacctcccacctcagactcccaggaagctgggattacaggtgtgagccacctcgcttggctaattt

SEQ ID NO: 350822 - DNA, 1824 bp, Homo sapiens
gcagtcccgggccggcccgtaccgccaggcgatcgcgctgatggcggcgctggcagcagcggccaagaaggtgtggagcgcgcggcggctgctggtgctgctgttcacgccgctcgcgctgctgccggtggtcttcgccctcccgcccaaggaaggccgctgcttgtttgtcatcctgctcatggcggtgtactggtgcacggaggccctgccgctctcagtgacggcgctgctgcccatcgtcctcttccccttcatgggcatcttgccctccaacaaggtctgcccccagtacttcctcgacaccaacttcctcttcctcagtgggctgatcatggccagcgccattgaggagtggaacctgcaccggcgaatcgccctcaagatcctgatgcttgttggagtccagccggccaggctcatcctggggatgatggtgaccacctcgttcttgtccatgtggctgagcaacaccgcctccactgccatgatgcttcccattgccaatgccatcctgaaaagtctctttggccagaaggaggttcgaaaggaccccagccaggagagtgaagagaacacagctgctgtgcggagaaacggcctacacactgtgcccacggagatgcagtttctcgccagcacagaagccaaagaccaccctggggagacagaggttccactggatctgccggctgactccaggaaggaggatgaatatcgtcggaacatctggaagggcttcctcatctccatcccctactcagccagtattgggggcacagccacactcacgggcacagcccctaacctcatcctgcttggccagctcaagagtttctttccgcagtgtgacgtggtgaatttcggctcctggttcattttcgccttccctcttatgctgttgttcctgttggcaggctggctctggatctccttcctgtacgggggactgagcttcaggggctggaggaagaataaatctgagataagaaccaatgcagaagatagggctcgagctgtaattcgggaagaataccagaacctggggcccatcaagtttgccgaacaggctgttttcatccttttctgcatgtttgccatcctcctcttcacccgggacccgaagttcatccctggctgggccagcctcttcaatcctgggtttctttctgatgctgtcaccggcgtggctattgtcaccatcttgttcttcttcccgtcccaaaggccctctctcaagtggtggtttgacttcaaagctcccaacacagagacagagcccttgctgacctggaagaaggcccaggagacagtgccctggaacatcatccttctcctgggagggggcttcgccatggccaaaggctgtgaggaatcggggctgtctgtatggattggtgggcagctgcaccccctggagaatgtgccccccgccctggctgtgctgctcatcactgtggtcatcgccttcttcactgagtttgccagcaacacggcgaccatcatcatcttcctgccggtcctggcagagctggccatccgcctgagagtgcaccccctgtatctgatgattccgggcacagtcggctgctcctttgccttcatgctcccggtctcaacgccccccaattccaagtgagcactcagtgttgaatcacagttacaacccactggggctggtgggagatgcgttgtatgggactggaagcaagaggttcattcaaagagaaactcatgggatttgtaaccagatgaatcatgatttctaagacttctgatcaaaaatactgtgaaataaagaatgttaatcaactttggacctgg

SEQ ID NO: 350823 - DNA, 1107 bp, Homo sapiens
  misc_feature (934)..(934): n is a, c, g, or t
ttgtttccccatctgccatgattataagttttctgaggcatccccagccatgctgaactggaagtggcactaaggtccaaaggaagctacatatgggtggtccctgctacaccagcctcccaagcctcccagtgcaccttctaggagacaagcaaggaaggccgctgcttgtttgtcatcctgctcatggcggtgtactggtgcacggaggccctgccgctctcagtgacggcgctgctgcccatcgtcctcttccccttcatgggcatcttgccctccaacaaggtctgcccccagtacttcctcgacaccaacttcctcttcctcagtgggctgatcatggccagcgccattgaggagtggaacctgcaccggcgaatcgccctcaagatcctgatgcttgttggagtccagccggccaggctcatcctggggatgatggtgaccacctcgttcttgtccatgtggctgagcaacaccgcctccactgccatgatgcttcccattgccaatgccatcctgaaaagtctctttggccagaaggaggttcgaaaggaccccagccaggagagtgaagagaacacaggaatagaacccaatactttcctctctgaggaaaggctgaaacttcaagctccccttgtgataagacttggtcagataactgagtctggtcaatggaatatgagtggaaatgatgtgtgcaacttccgggttctgtccttcctgccgggtggaatgtgaatatgatggcacctgggacccaaagacaggagccacatcttgagagatagatggcagatctgcccctgtggctttggatcatttacctcagtgaacacaacaagcattatccatgaaaccataggttttgtgtgctagttctagtttttaaaatatgaattaaattaaatacgtatctgttaaaacttanactgttagaacacaaaaacgagagtactacagcccacacatgccctgacccagacagaactcaggaactgacagggcggggcgaagcaagagagactgctcacgaagggggccccccagtgtgagcccagcccgaatgtgcacacagaagggcccctgtaataacagcgtcaa

SEQ ID NO: 350824 - DNA, 3456 bp, Homo sapiens
gcagtcccgggccggcccgtaccgccaggcgatcgcgctgatggcggcgctggcagcagcggccaagaaggtgtggagcgcgcggcggctgctggtgctgctgttcacgccgctcgcgctgctgccggtggtcttcgccctcccgcccaaggaaggccgctgcttgtttgtcatcctgctcatggcggtgtactggtgcacggaggccctgccgctctcagtgacggcgctgctgcccatcgtcctcttccccttcatgggcatcttgccctccaacaaggtctgcccccagtacttcctcgacaccaacttcctcttcctcagtgggctgatcatggccagcgccattgaggagtggaacctgcaccggcgaatcgccctcaagatcctgatgcttgttggagtccagccggccaggctcatcctggggatgatggtgaccacctcgttcttgtccatgtggctgagcaacaccgcctccactgccatgatgcttcccattgccaatgccatcctgaaaagtctctttggccagaaggaggttcgaaaggaccccagccaggagagtgaagagaacacagctgctgtgcggagaaacggcctacacactgtgcccacggagatgcagtttctcgccagcacagaagccaaagaccaccctggggagacagaggttccactggatctgccggctgactccaggaaggaggatgaatatcgtcggaacatctggaagggcttcctcatctccatcccctactcagccagtattgggggcacagccacactcacgggcacagcccctaacctcatcctgcttggccagctcaagagtttctttccgcagtgtgacgtggtgaatttcggctcctggttcattttcgccttccctcttatgctgttgttcctgttggcaggctggctctggatctccttcctgtacgggggactgagcttcaggggctggaggaagaataaatctgagataagaaccaatgcagaagatagggctcgagctgtaattcgggaagaataccagaacctggggcccatcaagtttgccgaacaggctgttttcatccttttctgcatgtttgccatcctcctcttcacccgggacccgaagttcatccctggctgggccagcctcttcaatcctgggtttctttctgatgctgtcaccggcgtggctattgtcaccatcttgttcttcttcccgtcccaaaggccctctctcaagtggtggtttgacttcaaagctcccaacacagagacagagcccttgctgacctggaagaaggcccaggagacagtgccctggaacatcatccttctcctgggagggggcttcgccatggccaaaggctgtgaggaatcggggctgtctgtatggattggtgggcagctgcaccccctggagaatgtgccccccgccctggctgtgctgctcatcactgtggtcatcgccttcttcactgagtttgccagcaacacggcgaccatcatcatcttcctgccggtcctggcagagctggccatccgcctgagagtgcaccccctgtatctgatgattccgggcacagtcggctgctcctttgccttcatgctcccggtctcaacgccccccaactccatcgccttcgcctctggacacttgctggtcaaagacatggtgcggacaggcctcctgatgaacctgatgggtgtcctgctgctcagtttggctatgaatacctgggcacagaccatcttccagctgggcaccttcccggactgggctgatatgtactcggtcaatgtcacagcattgccacccaccttggccaatgacacatttcggaccctctgagtccccctggaggactcccttgaggctgaaccctctcaaagggctgtcaccatcacctgctgctaggacactacaaaacaatcaaataattcttttctgtaatccaatatgcagcaagcaagggtgacctccagtggcccactcaagtccatgagccattatctaggatactttctctctctttcatgcagttcaaagcccaggtatctctcagatctgctgcctgagaaataagctcctttatcagttagctgttttatcattaggatacaagacagcccagtgtcatcaacagtgagcaaatctggcatggtgtttgtctcgtacagttgggataggaggccattcattcccatgggcacagctaacattatcccccagtgattactttcgattacactgaagagaccaccttgtctttaaagatcactttcctgggctgcaatgttccaacccagttgttccagctgttcacaaccagtgtgtgattttgcttagttggtgcccattctgcaccagttgttttacccctgccgataaccagcagtcagagattcttttttaatccttggagacagggaaagggacagatagctttccaaggacatgagactgtgcaaagcctctttgctgtttctctgggctcctgagcataccaggggaagttctagaaaccgcagctgacatctcgacccaagagatttaggattctcctgtttcatctgggtcagtttggccataattctggggtcaggccaggcctgggtcctgccctcccatggggtgactcatgacccctccagccaggactctcctacatgtggcccccataggcctctgtggctgcaaggcggtcagttgctgcttgtcccagcaggtggccttgatctctccatgccccaccttaagtggtaagcatgtttaattatcaaaggccccatttgtcaggggtgagagaaaagtcaaaagataaattggggccttgtaaaaggccagggtaaaatgtctcaggcaagcaaaagattgtccccttctgcatatgggtaaaactgagacgtccccgtgagcccgaggctggaagtggtgtctgccttcaagggttaatccctctttgttccaagcagaagcattctggcatcccagtgaagagctcaggccctcaggaagtgtctgctgaatggaatggcccagcattagcccagtattggaaaagacaccagcccaggggccctgactcgtcacacttccctttcctaagcctctgagggtggagattcccctaggagcgcttggccagctgggaaggcagcgcccagctgcacttgttgttgatacagcataagtgaatcatgggcatttccctgagagcagtgggagaggccctctgagttggaagttgagctccacctcctttccaagtgagcactcagtgttgaatcacagttacaacccactggggctggtgggagatgcgttgtatgggactggaagcaagaggttcattcaaagagaaactcatgggatttgtaaccagatgaatcatgatttctaagacttctgatcaaaaatactgtgaaataaagaatgttaatcaactttggacctgg

SEQ ID NO: 350825 - DNA, 3523 bp, Homo sapiens
gggagcttacgatgagccaggcactattctaaggatggagatacagcaaggaaaagacagaaagcccagcccttatgggcttacattctagtggcaagaaatggataagtgaatcaaagaccaccctggggagacagaggttccactggatctgccggctgactccaggaaggaggatgaatatcgtcggaacatctggaagggcttcctcatctccatcccctactcagccagtattgggggcacagccacactcacgggcacagcccctaacctcatcctgcttggccagctcaagagtttctttccgcagtgtgacgtggtgaatttcggctcctggttcattttcgccttccctcttatgctgttgttcctgttggcaggctggctctggatctccttcctgtacgggggactgagcttcaggggctggaggaagaataaatctgagataagaaccaatgcagaagatagggctcgagctgtaattcgggaagaataccagaacctggggcccatcaagtttgccgaacaggctgttttcatccttttctgcatgtttgccatcctcctcttcacccgggacccgaagttcatccctggctgggccagcctcttcaatcctgggtttctttctgatgctgtcaccggcgtggctattgtcaccatcttgttcttcttcccgtcccaaaggccctctctcaagtggtggtttgacttcaaagctcccaacacagagacagagcccttgctgacctggaagaaggcccaggagacagtgccctggaacatcatccttctcctgggagggggcttcgccatggccaaaggctgtgaggaatcggggctgtctgtatggattggtgggcagctgcaccccctggagaatgtgccccccgccctggctgtgctgctcatcactgtggtcatcgccttcttcactgagtttgccagcaacacggcgaccatcatcatcttcctgccggtcctggcagagctggccatccgcctgagagtgcaccccctgtatctgatgattccgggcacagtcggctgctcctttgccttcatgctcccggtctcaacgccccccaactccatcgccttcgcctctggacacttgctggtcaaagacatggtgcggacaggcctcctgatgaacctgatgggtgtcctgctgctcagtttggctatgaatacctgggcacagaccatcttccagctgggcaccttcccggactgggctgatatgtactcggtcaatgtcacagcattgccacccaccttggccaatgacacatttcggaccctctgagtccccctggaggactcccttgaggctgaaccctctcaaagggctgtcaccatcacctgctgctaggacactacaaaacaatcaaataattcttttctgtaatccaatatgcagcaagcaagggtgacctccagtggcccactcaagtccatgagccattatctaggatactttctctctctttcatgcagttcaaagcccaggtatctctcagatctgctgcctgagaaataagctcctttatcagttagctgttttatcattaggatacaagacagcccagtgtcatcaacagtgagcaaatctggcatggtgtttgtctcgtacagttgggataggaggccattcattcccatgggcacagctaacattatcccccagtgattactttcgattacactgaagagaccaccttgtctttaaagatcactttcctgggctgcaatgttccaacccagttgttccagctgttcacaaccagtgtgtgattttgcttagttggtgcccattctgcaccagttgttttacccctgccgataaccagcagtcagagattcttttttaatccttggagacagggaaagggacagatagctttccaaggacatgagactgtgcaaagcctctttgctgtttctctgggctcctgagcataccaggggaagttctagaaaccgcagctgacatctcgacccaagagatttaggattctcctgtttcatctgggtcagtttggccataattctggggtcaggccaggcctgggtcctgccctcccatggggtgactcatgacccctccagccaggactctcctacatgtggcccccataggcctctgtggctgcaaggcggtcagttgctgcttgtcccagcaggtggccttgatctctccatgccccaccttaagtggtaagcatgtttaattatcaaaggccccatttgtcaggggtgagagaaaagtcaaaagataaattggggccttgtaaaaggccagggtaaaatgtctcaggcaagcaaaagattgtccccttctgcatatgggtaaaactgagacgtccccgtgagcccgaggctggaagtggtgtctgccttcaagggttaatccctctttgttccaagcagaagcattctggcatcccagtgaagagctcaggccctcaggaagtgtctgctgaatggaatggcccagcattagcccagtattggaaaagacaccagcccaggggccctgactcgtcacacttccctttcctaagcctctgagggtggagattcccctaggagcgcttggccagctgggaaggcagcgcccagctgcacttgttgttgatacagcataagtgaatcatgggcatttccctgagagcagtgggagaggccctctgagttggaagttgagctccacctcctttccaagtgagcactcagtgttgaatcacagttacaacccactggggctggtgggagatgcgttgtatgggactggaagcaagaggttcattcaaagagaaactcatgggatttgtaaccagatgaatcatgatttctaagacttctgatcaaaaatactgtgaaataaagaatgttaatcaactttggacctggagatgatttgcctttctgaacataagagagcttcaaagccccaaattcctgggctggggattccacagagttgacctctctgattttctactgctcttccctcccctctccagctacatactctgcctcagggccttcgcatgtgctgttccctctgcctagaacactctctcccaagtatatgtctggttccccgactcactttattcaagtccctgctcaggtgtcaccttccctgagaggcttccctgacctcctgtctaaaatgtcaccctcattactctccacccccttactctgctataatttctccttaatagttaggacactgtataacttattttcttattatcttcttctccctctagaatataaatttatgaaaatacaaatgttattttttttactgctgtaactccagttcctagaacaatttccagcacatagcaagtgttcagtaaatatttgctgcttgaatctgctccagaattaacaagaaagccatctcttcctctgatctggggtctgttttgttcattactttgttcactccttcttccatttattcattcaataaacatttattgggaaaaaaacatgt

SEQ ID NO: 350826 - DNA, 3174 bp, Homo sapiens
atttgtaaccgttcgtacgagaatcgctgtcctctccttgcggccgccagtgtggtggaattcgctcagccagtattgggggcacagccacactcacgggcacagcccctaacctcatcctgcttggccagctcaagaggctggctctggatctccttcctgtacgggggactgagcttcaggggctggaggaagaataaatctgagataagaaccaatgcagaagatagggctcgagctgtaattcgggaagaataccagaacctggggcccatcaagtttctttctgatgctgtcaccggcgtggctattgtcaccatcttgttcttcttcccgtcccaaaggccctctctcaagtggtggtttgacttcaaagctcccaacacagagacagagcccttgctgacctggaagaaggcccaggagacagtgccctggaacatcatccttctcctgggagggggcttcgccatggccaaaggctgtgaggaatcggggctgtctgtatggattggtgggcagctgcaccccctggagaatgtgccccccgccctggctgtgctgctcatcactgtggtcatcgccttcttcactgagtttgccagcaacacggcgaccatcatcatcttcctgccggtcctggcagagctggccatccgcctgagagtgcaccccctgtatctgatgattccgggcacagtcggctgctcctttgccttcatgctcccggtctcaacgccccccaactccatcgccttcgcctctggacacttgctggtcaaagacatggtgcggacaggcctcctgatgaacctgatgggtgtcctgctgctcagtttggctatgaatacctgggcacagaccatcttccagctgggcaccttcccggactgggctgatatgtactcggtcaatgtcacagcattgccacccaccttggccaatgacacatttcggaccctctgagtccccctggaggactcccttgaggctgaaccctctcaaagggctgtcaccatcacctgctgctaggacactacaaaacaatcaaataattcttttctgtaatccaatatgcagcaagcaagggtgacctccagtggcccactcaagtccatgagccattatctaggatactttctctctctttcatgcagttcaaagcccaggtatctctcagatctgctgcctgagaaataagctcctttatcagttagctgttttatcattaggatacaagacagcccagtgtcatcaacagtgagcaaatctggcatggtgtttgtctcgtacagttgggataggaggccattcattcccatgggcacagctaacattatcccccagtgattactttcgattacactgaagagaccaccttgtctttaaagatcactttcctgggctgcaatgttccaacccagttgttccagctgttcacaaccagtgtgtgattttgcttagttggtgcccattctgcaccagttgttttacccctgccgataaccagcagtcagagattcttttttaatccttggagacagggaaagggacagatagctttccaaggacatgagactgtgcaaagcctctttgctgtttctctgggctcctgagcataccaggggaagttctagaaaccgcagctgacatctcgacccaagagatttaggattctcctgtttcatctgggtcagtttggccataattctggggtcaggccaggcctgggtcctgccctcccatggggtgactcatgacccctccagccaggactctcctacatgtggcccccataggcctctgtggctgcaaggcggtcagttgctgcttgtcccagcaggtggccttgatctctccatgccccaccttaagtggtaagcatgtttaattatcaaaggccccatttgtcaggggtgagagaaaagtcaaaagataaattggggccttgtaaaaggccagggtaaaatgtctcaggcaagcaaaagattgtccccttctgcatatgggtaaaactgagacgtccccgtgagcccgaggctggaagtggtgtctgccttcaagggttaatccctctttgttccaagcagaagcattctggcatcccagtgaagagctcaggccctcaggaagtgtctgctgaatggaatggcccagcattagcccagtattggaaaagacaccagcccaggggccctgactcgtcacacttccctttcctaagcctctgagggtggagattcccctaggagcgcttggccagctgggaaggcagcgcccagctgcacttgttgttgatacagcataagtgaatcatgggcatttccctgagagcagtgggagaggccctctgagttggaagttgagctccacctcctttccaagtgagcactcagtgttgaatcacagttacaacccactggggctggtgggagatgcgttgtatgggactggaagcaagaggttcattcaaagagaaactcatgggatttgtaaccagatgaatcatgatttctaagacttctgatcaaaaatactgtgaaataaagaatgttaatcaactttggacctggagatgatttgcctttctgaacataagagagcttcaaagccccaaattcctgggctggggattccacagagttgacctctctgattttctactgctcttccctcccctctccagctacatactctgcctcagggccttcgcatgtgctgttccctctgcctagaacactctctcccaagtatatgtctggttccccgactcactttattcaagtccctgctcaggtgtcaccttccctgagaggcttccctgacctcctgtctaaaatgtcaccctcattactctccacccccttactctgctataatttctccttaatagttaggacactgtataacttattttcttattatcttcttctccctctagaatataaatttatgaaaatacaaatgttattttttttactgctgtaactccagttcctagaacaatttccagcacatagcaagtgttcagtaaatatttgctgcttgaatctgctccagaattaacaagaaagccatctcttcctctgatctggggtctgttttgttcattactttgttcactccttcttccatttattcattcaataaacatttattgggaaaaaaacatgt

SEQ ID NO: 350827 - DNA, 2850 bp, Homo sapiens
gcagtcccgggccggcccgtaccgccaggcgatcgcgctgatggcggcgctggcagcagcggccaagaaggtgtggagcgcgcggcggctgctggtgctgctgttcacgccgctcgcgctgctgccggtggtcttcgccctcccgcccaaggaaggccgctgcttgtttgtcatcctgctcatggcggtgtactggtgcacggaggccctgccgctctcagtgacggcgctgctgcccatcgtcctcttccccttcatgggcatcttgccctccaacaaggtctgcccccagtacttcctcgacaccaacttcctcttcctcagtgggctgatcatggccagcgccattgaggagtggaacctgcaccggcgaatcgccctcaagatcctgatgcttgttggagtccagccggccaggctcatcctggggatgatggtgaccacctcgttcttgtccatgtggctgagcaacaccgcctccactgccatgatgcttcccattgccaatgccatcctgaaaagtctctttggccagaaggaggttcgaaaggaccccagccaggagagtgaagagaacacagctgctgtgcggagaaacggcctacacactgtgcccacggagatgcagtttctcgccagcacagaagccaaagaccaccctggggagacagaggttccactggatctgccggctgactccaggaaggaggatgaatatcgtcggaacatctggaagggcttcctcatctccatcccctactcagccagtattgggggcacagccacactcacgggcacagcccctaacctcatcctgcttggccagctcaagagtttctttccgcagtgtgacgtggtgaatttcggctcctggttcattttcgccttccctcttatgctgttgttcctgttggcaggctggctctggatctccttcctgtacgggggactgagcttcaggggctggaggaagaataaatctgagataagaaccaatgcagaagatagggctcgagctgtaattcgggaagaataccagaacctggggcccatcaagtttgccgaacaggctgttttcatccttttctgcatgtttgccatcctcctcttcacccgggacccgaagttcatccctggctgggccagcctcttcaatcctgggtttctttctgatgctgtcaccggcgtggctattgtcaccatcttgttcttcttcccgtcccaaaggccctctctcaagtggtggtttgacttcaaagctcccaacacagagacagagcccttgctgacctggaagaaggcccaggagacagtgccctggaacatcatccttctcctgggagggggcttcgccatggccaaaggctgtgaggaatcggggctgtctgtatggattggtgggcagctgcaccccctggagaatgtgccccccgccctggctgtgctgctcatcactgtggtcatcgccttcttcactgagtttgccagcaacacggcgaccatcatcatcttcctgccggtcctggcagagctggccatccgcctgagagtgcaccccctgtatctgatgattccgggcacagtcggctgctcctttgccttcatgctcccggtctcaacgccccccaactccatcgccttcgcctctggacacttgctggtcaaagacatggtgcggacaggcctcctgatgaacctgatgggtgtcctgctgctcagtttggctatgaatacctgggcacagaccatcttccagctgggcaccttcccggactgggctgatatgtactcggtcaatgtcacagcattgccacccaccttggccaatgacacatttcggaccctctgagtccccctggaggactcccttgaggctgaaccctctcaaagggctgtcaccatcacctgctgctaggacactacaaaacaatcaaataattcttttctgtaatccaatatgcagcaagcaagggtgacctccagtggcccactcaagtccatgagccattatctaggatactttctctctctttcatgcagttcaaagcccaggtatctctcagatctgctgcctgagaaataagctcctttatcagttagctgttttatcattaggatacaagacagcccagtgtcatcaacagtgagcaaatctggcatggtgtttgtctcgtacagttgggataggaggccattcattcccatgggcacagctaacattatcccccagtgattactttcgattacactgaagagaccaccttgtctttaaagatcactttcctgggctgcaatgttccaacccagttgttccagctgttcacaaccagtgtgtgattttgcttagttggtgcccattctgcaccaaagcattctggcatcccagtgaagagctcaggccctcaggaagtgtctgctgaatggaatggcccagcattagcccagtattggaaaagacaccagcccaggggccctgactcgtcacacttccctttcctaagcctctgagggtggagattcccctaggagcgcttggccagctgggaaggcagcgcccagctgcacttgttgttgatacagcataagtgaatcatgggcatttccctgagagcagtgggagaggccctctgagttggaagttgagctccacctcctttccaagtgagcactcagtgttgaatcacagttacaacccactggggctggtgggagatgcgttgtatgggactggaagcaagaggttcattcaaagagaaactcatgggatttgtaaccagatgaatcatgatttctaagacttctgatcaaaaatactgtgaaataaagaatgttaatcaactttggacctgg

SEQ ID NO: 350828 - DNA, 1338 bp, Homo sapiens
gcagtcccgggccggcccgtaccgccaggcgatcgcgctgatggcggcgctggcagcagcggccaagaaggtgtggagcgcgcggcggctgctggtgctgctgttcacgccgctcgcgctgctgccggtggtcttcgccctcccgcccaaggaaggccgctgcttgtttgtcatcctgctcatggcggtgtactggtgcacggaggccctgccgctctcagtgacggcgctgctgcccatcgtcctcttccccttcatgggcatcttgccctccaacaaggtctgcccccagtacttcctcgacaccaacttcctcttcctcagtgggctgatcatggccagcgccattgaggagtggaacctgcaccggcgaatcgccctcaagatcctgatgcttgttggagtccagccggccaggctcatcctggggatgatggtgaccacctcgttcttgtccatgtggctgagcaacaccgcctccactgccatgatgcttcccattgccaatgccatcctgaaaagtctctttggccagaaggaggttcgaaaggaccccagccaggagagtgaagagaacacagctgctgtgcggagaaacggcctacacactgtgcccacggagatgcagtttctcgccagcacagaagccaaagaccaccctggggagacagaggttccactggatctgccggctgactccaggaaggaggatgaatatcgtcggaacatctggaagggcttcctcatctccatcccctactcagccagtattgggggcacagccacactcacgggcacagcccctaacctcatcctgcttggccagctcaagagtttctttccgcagtgtgacgtggtgaatttcggctcctggttcattttcgccttccctcttatgctgttgttcctgttggcaggctggctctggatctccttcctgtacgggggactgagcttcaggggctggaggaagaataaatctgagataagaaccaatgcagaagatagggctcgagctgtaattcgggaagaataccagaacctggggcccatcaagtttgccgaacaggctgttttcatccttttctgcatgtttgccatcctcctcttcacccgggacccgaagttcatccctggctgggccagcctcttcaatcctggatgcaaaatgggcattataagcatttcaacaatacagaaaatgtgaagatcagctaaatctcagtctctaattctgatatacatctttcctgacttttaaacaatgcctatctgagaactgttctacattgtgatcacgctgttatcggactgcatacatttgtcaagacttgttaa

SEQ ID NO: 350829 - DNA, 1059 bp, Homo sapiens
  misc_feature (1019)..(1019): n is a, c, g, or t
  misc_feature (1026)..(1026): n is a, c, g, or t
gcagtcccgggccggcccgtaccgccaggcgatcgcgctgatggcggcgctggcagcagcggccaagaaggtgtggagcgcgcggcggctgctggtgctgctgttcacgccgctcgcgctgctgccggtggtcttcgccctcccgcccaaggaaggccgctgcttgtttgtcatcctgctcatggcggtgtactggtgcacggaggccctgccgctctcagtgacggcgctgctgcccatcgtcctcttccccttcatgggcatcttgccctccaacaaggtctgcccccagtacttcctcgacaccaacttcctcttcctcagtgggctgatcatggccagcgccattgaggagtggaacctgcaccggcgaatcgccctcaagatcctgatgcttgttggagtccagccggccaggctcatcctggggatgatggtgaccacctcgttcttgtccatgtggctgagcaacaccgcctccactgccatgatgcttcccattgccaatgccatcctgaaaagtctctttggccagaaggaggttcgaaaggaccccagccaggagagtgaagagaacacagctgctgtgcggagaaacggcctacacactgtgcccacggagatgcagtttctcgccagcacagaagccaaagaccaccctggggagacagaggttccactggatctgccggctgactccaggaaggaggatgaatatcgtcggaacatctggaagggcttcctcatctccatcccctactcagccagtattgggggcacagccacactcacgggcacagcccctaacctcatcctgcttggccagctcaagagtttctttccgcagtgtgacgtggtgaatttcggctcctggttcattttcgccttccctcttatgctgttgttcctgttggcaggctggctctggatctccttcctgtacgggggactgagcttcaggggctggaggaagaataaatctgagataagaaccaatgcagaagatagggctcgagcanggagagnacagcgattctcgtacgaacggttacgattcga

SEQ ID NO: 350830 - DNA, 313 bp, Homo sapiens
aaaacaaaaaaggatgtgtgtaggctggttaatttcgaagatgaaaaccttttcctccctgccacatcttaaattagctcaagtatactacttaaagagaaaggaaaaataagtgtatcaatgactaattctctcaaattgactggaatctatgtctttttggtctgtgtgcacagacaggatgtgatcttctgggatatcacccttctttgaatcagagatacgctgtcatttaaaaaaaaaacctgacaccatccttttagtgtttaacttttaaaaattattccgaaagaaatgtttttaaaagataaat

SEQ ID NO: 350831 - DNA, 366 bp, Homo sapiens
gaaatggcacaagaggagggaaaatccccagatattgaaactagaaagagcactgaaaaccagagccagaagcttgagctacctctgtaggagatgtgagaacagttgtcaaacctcaaagtaagcactagaggtggattttatacccatagaggagctaaagaatgaagttttgtgtgtgctcaagatggtatgtttgaacttaacatcactgcactaagccatgtcctttaaaggaccccatgattagcaaaccccaggcttctatcatatgtgggtttggagcccaaatgtaactatccacattgctcaggagtccccagtgagaaaatggcaccactaaagatgagctcacagtgagatagt

SEQ ID NO: 350832 - DNA, 428 bp, Homo sapiens
tttttttgtttattttgagacggagtctcactctgtcacccaggctggagtgcagtgtggcatgatcttggctcaccacaacctctgcctcctgggttcaggcaattctcctgcctcagcctctcaagtagctaggactacaggcgcctgccaccacgcctggctaatttttgtatttttagtagagatggggtttcaccatattggtcaggctgatctcaaactctgacctcaggcaatccacctgcctcggcctcccaaagtgctaggattacaggtgcgagccactgtgcacggcgctctgtgcatttcaaaaaatcaggagaaccccacatatattcctccttacaagcttgaaatctgagaagaatgtgacctttgcaatctcatttatccatcttttctgatggctgaccgcctgcttattc

SEQ ID NO: 350833 - DNA, 330 bp, Homo sapiens
aaataatggggtcattgaagcagtcaagctctaatgggaacctgagctcattcagataccaaatctaataattgttctacacctgtatgcccagtcccattgagcaaattcacattaaaggtttagtggaacagtttcaatgctgtggtccaaagggacttgctactgttttcacaagaaagcactgaatattttttggcaatatatatatatattttttgtgatgtgttaactaagctctgtgcatgtatgttggtgccctatccctacctagagaggaagaaaagggagagatgtattttcaggaatgtttttcttaccatttagggt

SEQ ID NO: 350834 - DNA, 419 bp, Homo sapiens
atggctgaagctggaaaaggagctgcagggatgcaggcagtagtgtcctgaggctgcacacagcagtggagccatggggctgagccaggaaactattcttttctcctaaaccccagggccagtgacagcaaggactgctacaaaggtctctgaaatgccttcaaggcctttttcccattgtcttgaattattagcattgggctcctttttatgcaaatatcctaagccttcttgattttccccctgaaaatcagcttttctttttgaccacttgtccagattacaaattttccaaatgttgaagctctgtttctcatttaaatataagttccaacttatggtcatttctttcaccacacataggagcacaggctgttcgatgtaggcagtacaactcttgaactttgctgcttagaagt

SEQ ID NO: 350835 - DNA, 550 bp, Homo sapiens
gcatcactgcaagctctgcctcccaggtccacgccattctcctgcctcagcctcctgagtagctgggactatgggcacccgccaccacgcccagctagtgttttgtatttttagcagagacggggcttcaccgtgttagccaggatgatctcgatctcctgacctcgtgatctgccagagcaacatagcaagaccccttctctacagtgtgctggcatttgcagtgcagccaccattgcccatggtagcgatgaggaagctgtggcttagaccaacttccagaatcactgctctggtcacacagctgctcgcaggtggcatcatgaacacacctagtctgactgttgcttaaccacgacaaactccatctccttccactttgcctggctgaggatcggatgcattacatagaaatatttgaatttggaagctgttgaaatacaggttcaggccaggcatggtggctcatgtgtgtaatcccagcactttgggaagccgaggcaggcgatcacctgaggccaggagttcgagaccagcctggccaacatgg

SEQ ID NO: 350836 - DNA, 554 bp, Homo sapiens
gcatcactgcaagctctgcctcccaggtccacgccattctcctgcctcagcctcctgagtagctgggactatgggcacccgccaccacgcccagctagtgttttgtatttttagcagagacggggcttcaccgtgttagccaggatgatctcgatctcctgacctcgtgatctgccagagcaacatagcaagaccccttctctacagtgtgctggcatttgcagtgcagccaccattgcccatggtagcgatgaggaagctgtggcttagaccaacttccagaatcactgctctggtcacacagctgctcgcaggtggcatcatgaacacacctagtctgactgttgcttaaccacgacaaactccatctccttccactttgcctggctgaggatcggatgcattacatagaaatatttgaatttggaagctgttgaaatacaggttcaggccaggcatggtggctcatgtctgtaatcccagctactcgagaggcaggagaattgcttgaaccctggtggcggaggttgcagtgagctgagatcatgccactg

SEQ ID NO: 350837 - DNA, 440 bp, Homo sapiens
tttttttgagatggagtctcgctctgtcgcccaggctggagtgcagtggcgcaatctcggctcactgccagctctgtctcccaggttcacaccattctcctgtctcagcctccagagtagctgggactacaggcgtccgccaccacgcccggctaattttttgtatttttagtggagacggggtttaactgtgttagcaaggattgtctcgatctccttatctcgtgatctgccggcctcggtctcccaaagtgctgggattacaggcgtgacgagtgtacccagaccctaacttttcaaattttacaatggagagaaaagggaactattttaccaaattcaggtagctaaaattgatagaactatctttcctatggagaatgccctacaaagatacaacactatagcttactgttattacttgctccacaagcaatgtt

SEQ ID NO: 350838 - DNA, 14186 bp, Homo sapiens
  misc_feature (17)..(17): n is a, c, g, or t
  misc_feature (7555)..(7555): n is a, c, g, or t
  misc_feature (10881)..(10881): n is a, c, g, or t
tgcaacggaaacttttngctccacgaacagaaaagcaagagcaaaaactcagttaaatgcgttcttcctccatctttgcctagtccaaaaggaaaaaaaaagaaacagaaaaaagaaaaactgtttggaagagtagcgttgaggtttgctttttacctgtttttcctctagaacagccaggtggattcacatgatccaattttttaattgtcttctatgtcccactccgaataacccggatgccccagcacaatcagagagatcgttttttttaaaaaaaatttcagcctccaaaggtaggaggggagtgttaggggagaaagtactttaattaaaaatcaataactcgaggtttttgggatacggtttgccatttcctaattaagaaatgggtttgacagtccctttgtacacactgctatgcaaaccccaaagggttggcggctgtccgggcgatgacactccggtcccctgcgagaccccgggccagccaggcccgtccgccgccggcctctggggtccgtccccggctcgcgcagacctctcgcttctctcggctctgtctcctgcgctcagctctgctcggggccggccgcctcaggctcgccgccaccaggtcgttgcaaataccttttccctccccggggccccagcgcgcggccacctcccagcctccccccctcccaccctggcagcggggccctttcccggctcaggaacagcagcagcccgggccgcgccggcaggaagcgaggcccatgttgctgctgttccctggcgcgcctccccgccctccgggggccgccacggctcttccgcgctcccgggcacccccctccgcgcctgcgctgtgccccacgggggcggggctcagattcctgtcagcggcggcggcggtggcggcgaccgtcagttttcgctgaggagaaacacgaaacggaccctttggctctcccccttccccttccccgtcctgaacccctctcctggtcaccgagaatcagtccccgtggagttccccctccacctcgccatcgtttcctcggtcctcggcccagtggaagtcactaccctcgaggaggaggcagcggcagccgccctcgcgtcgccgcccccggttcggtgcccgcggtcccggagaggaggtgccgccgccaccgccgctccccccctcccgctgccctcgggccgggctgggtcgagctgcgatgccctcggacttcatctcattgctcagcgcggacctagacctggaatcgcccaagtccctctactcgcgagaatctgtctatgatcttctcccaaaggagttacagttacctccatctagagaaacatctgtagcatcaatgagtcagacaagcggtggtgaggcaggctcgcctcctccagctgttgttgctgctggatttgcctctgaagcagggagtgtctgcattaaaaatgacctgtagttctctgcttcatagatgcttcttcagctccctcctcttcctccatgggcggtgcttgcagctcctttaccacctcttccagccctaccatttattctacctcagtcaccgacagcaaggctatgcaagtggagagctgctcctcagccgtgggggtaagtaacagaggggtaagtgaaaagcagttaaccagtaacacagttcagcagcatccatcaacaccgaagaggcacacagtcttgtacatctcaccaccacctgaggacttgctggataacagtcggatgtcctgccaggatgaggggtgtggattggaatctgagcagagctgcagtatgtggatggaggattccccctccaacttcagtaacatgagcaccagttcctacaatgataacactgaggtacctcgtaaatcacgaaaacgaaatccaaagcagaggccgggggtcaaacgacgagattgtgaagaatctaatatggatatatttgatgccgacagtgccaaagcacctcactatgtgctttctcagcttaccacggacaacaaaggcaactcaaaagcgggaaatggaacattggaaaaccaaaaaggaactggagtaaagaagagccctatgttgtgtggacaatatcctgttaaaagtgagggaaaggagctgaagatagttgtacaacctgagacacagcaccgagctcggtacctgactgagggcagccgtggctcagtgaaagatagaacacagcaaggctttcctacagtaaagctggaaggccataatgaacctgtagtgttgcaagtgtttgtgggcaacgactctggacgagtgaaaccacatggattttatcaggcctgcagagtaactggacgaaatacaactccttgcaaagaagtggacattgaaggcactactgttatagaagtcggccttgatcctagcaacaacatgacactggcggtggactgcgtagggatattgaaattgaggaatgctgatgtcgaagccagaataggaattgctggttccaagaagaaaagcactcgtgccagattggtttttcgagttaatatcatgaggaaagatggctccactttgacactgcaaacaccctcttctccaattttgtgtactcagccagcaggagtgccagaaatcttaaagaaaagcttgcatagctgttcagtgaaaggagaagaagaagtgtttttaatcggcaagaactttctgaaaggaactaaagttattttccaagaaaatgtttctgatgaaaactcttggaagtcagaagctgaaattgatatggaactatttcatcagaatcatcttattgtgaaggttcctccctatcatgaccaacatataactttgcctgtgtcagtgggaatatatgtagtgacaaatgctggaagatctcatgatgttcaaccattcacttacactccagacccagcagcagctggtgctttgaatgtaaatgtgaagaaggaaatatctagtccagcaagaccttgctcttttgaagaggccatgaaagcaatgaaaactactggatgtaatttagataaggtaaatattatccctaatgccctgatgactccactcataccaagcagtatgattaagagtgaagatgttactccaatggaagtaacagcagaaaaaagatcttccactatttttaagactacaaagtctgttggatcaactcagcaaacattagaaaacatctcaaacatagcaggaaatggctctttttcatcaccatcatcttcccacctaccttctgaaaatgaaaaacagcagcagattcagcccaaggcatacaacccagagaccctgacaactattcaaacccaggacatctcacagcctggtacttttccagcagtttctgcttctagtcagctgcccaacagcgatgcactattgcagcaggctacacagtttcagacaagagaaactcagtctagagagatattacagtcagatggtacagtggttaatttgtcacaactgactgaggcatcacaacaacagcagcagtcaccactacaagaacaagcacagactttacagcagcagatttcatcaaatatttttccatcaccaaatagtgtgagtcagcttcagaatactattcagcagctgcaagcagggagtttcacaggcagtactgctagtggcagcagtggaagtgttgacttggtccaacaagttttagaggcacagcagcagttatcttcagttttattttctgctccagatggtaatgagaatgttcaagagcagcttagtgcagatatttttcaacaagtcagtcaaattcagagtggtgtaagccctggaatgttttcctcaacagagccaacagtccataccagaccagataatttattacctggaagagctgaaagtgttcatccacagtctgaaaacacgttatctaatcaacagcagcagcagcagcagcaacagcaagtgatggaatcttcagccgcaatggtgatggagatgcaacagagtatctgccaggcagctgcccagattcagtcagagttattcccttcaactgcttcagcaaatggaaaccttcagcaatcgccagtttaccagcagacttctcacatgatgagtgcattgtctaccaatgaggatatgcaaatgcagtgtgaattgttttcttctcctcctgcagtttctggaaatgaaacttctacaactaccacacagcaggttgcaacccctggcactaccatgtttcagacatcaagttcaggagatggagaagaaactggaacacaagcaaaacagattcagaacagtgtctttcagaccatggtccaaatgcaacatagtggggacaatcaacctcaagttaaccttttttcatccacaaaaagtatgatgagtgttcagaatagtggtacccaacaacaaggtaatggtttattccagcaagggaatgagatgatgtcacttcaatctggaaattttttgcagcagtcttctcattcacaggcccaactttttcatcctcaaaatcctattgccgatgctcagaacctttcccaggaaactcaaggttctctctttcatagtccaaatcctattgtccacagtcagacttctacaacctcctctgaacaaatgcagcctccaatgtttcactctcaaagtaccattgctgtgttacagggctcttcagttcctcaagaccagcagtcaaccaacatatttctttcccagagtcccatgaataatcttcagactaacacagtagcccaagaagcattttttgcagcaccgaactcaatttctccacttcagtcaacatcaaacagtgaacaacaagctgctttccaacagcaagctccaatatcacacatccagactcctatgctttcccaagaacaggcacaacccccgcagcagggtttatttcagcctcaggtggccctgggctcccttccacctaatccaatgcctcaaagccaacaaggaaccatgttccagtcacagcactcaatagttgccatgcagagtaactctccatcccaggaacagcagcagcagcagcaacagcagcagcaacagcagcagcaacaacaacagagcattttattcagtaatcagaataccatggctacaatggcgtctccaaagcaaccaccaccaaacatgatattcaacccaaatcaaaatccaatggctaatcaggagcaacagaaccagtcaatttttcaccaacaaagtaacatggccccaatgaatcaagagcaacagcccatgcaatttcagagtcagtccacagtttcctcacttcagaacccaggtcctacccagtcggaatcatcacagacccccttgttccatagctctcctcagattcagttggtacaagggtcacctagttctcaagagcagcaagtaactctcttcttatctccagcatccatgtctgccttgcagaccagtataaatcaacaagatatgcaacagtctcctctttattcccctcagaacaacatgcctggaattcaaggagccacatcttcgcctcaaccacaggctactttatttcacaacacagcaggaggcacaatgaaccaactgcagaattctcctggctcatctcagcagacatcaggaatgttcttatttggcattcaaaataactgtagtcagcttttaacctctggaccagctacattgcctgatcagttgatggccataagtcagccaggccaaccacaaaacgagggccagccacctgtgacaacacttctttctcagcaaatgccagagaattctccactggcatcctctataaacaccaaccagaacatcgaaaagattgatttgcttgtttcattgcaaaaccaagggaacaacttgactggctccttttaactggatataaattccacgaagaaaatcctgattccaagatgtcctgagatcttgtggttccatgagaattattactttaaaaacaaaacaaaatataaaaaactgtgtttgagtaaactgatagattttactctgactgcaaaagagcacacctatgctgcttgttgcagtaactaaccaccaatgttaacatcttcatattttatattcctaataacagtgatgactgagaatctatttgagtttccagctggcagaattaattgttattattttcctaggcgcaatttccttaaacgtacagtttaaattcaaggctggaccactcagttattattgctattagaaaataatatatcatgtttacttttgttcttcattattttctttcctgcattgttttagtcaagtaatggcttttgaaaaagtaaagttcaataataactaaggctgtgatttttttcaatataaaaggcacagctgttggccaaagtgaaggaatcttttttcagttttattggagaaactgaagggtaacattctaacaagtaaactgtatgtgcagataaaagtactcttgatttaacacaaaggcagatgatacacttataaaactgggaacagctggaatgcttcttgattttattttttcagagagttgttagttctctgggtttctactaaggggtttagccataactgtgcatagaaaaataattatctgtaaaaaatgaaggggataatatatgataaattatgttctgatatcctcctacagtagtttaaattgacagaaaaatttgaatgttttcttcttaacccagtcttaggctggtattccctttttatatatatctatattacttttcacctctttttcactttactttagagaactattaatatactactggcttcatgaccctgtagcatctttggccactttaatctagggtgacctagcaatcctgcagcacagggcagagagtactgtcttaggaattattaggagttgattcctgagaaacaacacatttttccccatgaacggtgctgttctgaagtcttcaaatttttccctctaataggaaacagtataaattttaattaaaaaaaaaaggcaaactaaaatttcttgaaatatcacttctccctgatctgcagtgagtataaattcacttgtcacctcagtgctttacagtttgaagtggtcacttacctgatggttcccacaagccttaggctttacagggttgtatcattgacttaaaatgaagaattaacttgtgttacatctataaagagcaaaataacacactccagaacttggcagttgtagcattagttatacagttttgggtgttcttgccacccgtgggatgcctgcttctcactaccacctgtgtctggacacatgcttatgtctcattttccttttggcatgtggaaagctgtcaatgcagtgtaaggccaacgtgtgtgtggcttctatgtgttgagataatgttttggtatccttgtccgtttcatttattttttaagtgtacaaaaaataacctgttaattgttgaaggctacttttctgttcttttttttttttttttctatcctgtacatttagttgaactgtgcggaattgtggtgttggttttgtttacacagccagatttttccttctttttgttttgngatgatcttcctttgttctttgaatgtgctcttttgtctttttctcttttttctcatgttttcttccctccacctccacccctttctttctttctctctctgattgagaggcattgaattacgttttcagtagtacaggcttcttgccgatatgaagggaacttttcagaaagagacctactctgggtcatttaattttgaatacagttttcaatcgttcaagttttggatggtttatatctaatgtgtgtttcatttttttggaaagctatattttgtatttaggaaatggtatactattttgctatttgtactgagtgagtacattggcataaatatagaaatttatatatatacatatatataaactattcttttttgccacacatttttgtggtaaatttgtgagtttgtctgatgttctaccacaacgtggcgtctgataacagtgagggggggtggggtttgttatgtctttattgagtatttaagtatcttttgaaacaaatgacctgttcatctgtggccattccatcaggcagttagttccttgatgtcagtagtgggctaaaggcagcttactgtgtgtttgctggagctttcactcagccaagtgttagagtcaggaaacccattgaggcaatggcgtcaaatggtgtttcacaagaatgagccattcagtctttgctcactatatatttaatattttattattgttgttattgttattattaattggctttctgtattctatgccttttatttataaagacactaagaaaacccatgtttgtaattttaataacatttttcccatcttgtaatatccagagctactttataaattctctgaaccaaaagtattttcctcagtgtatctcttctcccccagcccctattgggaaaaattacccagtatagttcaggttatgaggaggatcagccacacaatccagtgcttcagtttgaaaatgtaaaattctaaccctaaagtagggttggttgaaatttcagacaaagcaaacccagcaggtataaaaagtagtataaatacaaatctgtaagttatttttgaattttctgaacttttttctaagagattacataggagactaaagaaatctatctgttcaagttctaattaggatgattgttaatactgcactgtggatgaagtggcgactggcttgtgtgctgacttctgtggtttagcaagaggtttattgttatcaaatgctaattggcaatgccaagtcactgggaccaattttctgttttataatatctaagtttagaacagaatatatacctgaactgtagtggtttgatcggatggagacagaaaacccgatttttattctcataaattttgtggttatttatacaagggctgtgctatgctaccatattcttgttcaataataataggtttgttgttttttttacattgttaaatgttccttacccctaaaggtcaatgttaagtacaacattctgaaaatacaatttggctacaaagagtattcatcttctttgaagctcagtggttgatatttgtgctaataatgcaatttcctgattactgttacaagttatagctacatatgggagagactcagtgagccagcaaaggccatagaaacaacaatttattaaatgtatttatggcagaaggacctaaataaactgtgagccaccttttcttctttatattgttacatttaagtgttcttgctttcagcaactcacattaatgcttggagcttatctctttctctctctctctctctctctctgtgtgtgtgtgtgtatgtgtgtgtgtgtgtgtgtgtgtttccttattgtcattccattatatatccacaccaacatgggtgacgataattcaaagtcatattttgcctctaagcttgatcatgttacctttatgattaaagtatcatgttatttagccaatgcaaatctgttttaaaacaaatagtttaaaaaaagaacaagtttttaagggctttattatagaagaagtattaatgaaggactttccttcctccctccctttcctcccctccctgcctcccttcttcccttccatctccccctcctccctgccttctttgtttctccttcccttattcctccctccctcctttctcccttccttcctttcttccattcatccttccttgccttttatttttattttttgtaatatcacatgtgctgtagtttggaattttattctagtgcatttcttgctcatcagaacctcagctaatctacctaggaaaaatagtatcaaaggaaatgagaaagttgtatctgagtccctccagaactaagataattctttttgaccatttaagcctttataaatgcgttttgaccatttaagcctttataaatgcttgttttaggaaagtgaatctgttagatgcatcaacaaataatgaccaggacaaaacgatttaataattaaagtctcaaatcaccatggttatacattttcaccagaaatagtaatcttacaatttttcatttttctgatgaagatttctgttccaatatctgtttcctaatagattttttaaattaattagctttcctctgctttatgaccacaggttttatccctaaccgagacagctgtcttatatctgcatgccttagactgtgtggagggactccatgaagaaagaccataggttagaaaaataactcatagtatataccctagtaagtgggttagtagaatctcataacatgtattaaaaagaggttttcttctctgcttgtttgtgtcactagagcaaaattgtagagataatgctcataatgcagtaaatatcagaataatatctacaatatcatttgtggatggtcccaggtcccagtgctctagttactttacttcttttttttttttgagatggagtcttgctctgtctctcaggctagagcagtgtgcgatctcagctcactgcagcctccacctcccaggttcaagcgattctcctgcctcagcctcccaagtagccaggattacaggcaccctccactaggcccggctaattttttttgtatttttttagtagagatggggttttgccatgttggccaggctggtttcgaactcctaacctccagtgatccacctgcctcggcgtcccaaagtgctaggattacaggcatgagccaccacatccggcctaattacttctttaatccccatttatttttatgccattctagcctcatttattaataaaattatgtttttactttctctttcaggaaattttttaaattaatattttatatctagatcnaatgctatggaaaagtgcctttttatcatttataatttcatttttcactatttccaaaaacacataaacaaatagtttcagtaggtcccagcttttactttttccatttaaaccttcttttctccatttcttccctttggcttaagaataaaagaaaaggtacattgctagaattgtttctttgggagagggtaaaagattacagaattagactgttcagcctttatataaactaaatttgtcttcatctcaaccagctaatggtaggtcttatctgaatactcatgagaattttagcatctgtgaaactccatgcaccagatgtgtgtaaatttcaggaagaaagtgttgaaagcattttctctgatgttaattagatggaaataaatcactaaaacatagtttaggtaaagcctgattatgccacttttttttaactagacagggcaaagttgtttatgttagtgtacttcttgtctatcctcagttaatttacctagacaaaaagtgtcaaaggaaatgagaaaaaggttatatctgactccctccagacctaagataattccttttgatcagatacagtcagatggagtgccttggtttttgttaattttgcctctattccagctccttaccacagcggtggtgcttaaagaaaggatcatcagcaacaggtcaggatagttctacctttgggatagggctgctttccccgtgctagtatttctgtgactgttagtggcactgaggactgcaaacttttatgcaatattcttaataccctattgatattatgcactttaatcattccaaagaagccaagaatgctgtatagtgatgattccttcctaatgaattcatcttaactatttagaatgttatgtcccttttcttttggatagccaacttggtataaatgttatatggatttttctaaaatgactatataggacttaagactttgaaatgtaatttacttataaggggaaataattatgctttagcacatcattttagaaacgtcacattttagaaacattcagcttgctaacctacatgtttgggaattcattaaaaccagttgtctatatattttgtgccatgtatataagaacattacaatatatctttttctacatatgtagtatgtgcaaccagtggttctcagagtatggttctcagcccaccagctagtatcagtatcacctgggaactagttagaaatgtaaattctttggccccatcccagacatactgagtcagaaactctggaatagggcccccgcaatctgttttcacaagccctccaggtgattctgatgcacactttaaagtttaggaaccactgggctaagactctgttgagatatagagtttttctttccactcagactgatatagttatacattgttcttcatgtaaattcagcttaacctggttatctataatcttttattggcaaaagttaattctcagtactgcctatagagatacagtgtattttatgtacatacacaattagtctaattcttgataattcagttaatttagtttggcattttcctaccacttactaaaaggtttacattaaatgactgatttaaatatataggtgcaatgttctatgtttattttaattgttatgacatttaagtagctaatataattgaccggtgctaaagtctcctgtttatccataaaatgggtacattatgggcagtgtaatacaagctttcttttcattgcctagtactttaccagcagaccacagttttgccctggctagaccaaccctcagaacaaaatcatcattccttgtatttatatttgtatctgagatagtaaacaagatggctggccaggtcaacatggcaccttaacttatttttttaataggtaaaacttcttcaaaagtagcttgctttgtataagaactaagctatcagtatagatatagctatccttggagcttatgtttcagacaagaattatttactaaaataaataataaacaagataatgcattatacaatttgggcatttctcgtttctcaagtgtatgcatcatggtaaatataaactaaccacaagataggtagattgattcatttcattttaatctccttgtgtaattcagtacctccataattgttctaatcttcttcccactgtttacaaattaccagttaattaactcgtgaaagaaaaattcacatatcagaataaaaataaatgtatactcactttataaaaatcaccactgctgtctttccttaatactagcagtggaaatgtaagtggcttactctacaaattttggtgctggcaaatacataggcaaactgttgggagctgctctagttacattcctcccttcttattccctttttctcttcctcactttattgcataacatattcctgtacccaaagcattctaccacagttctatttgactcccacttgtaataactcctttaaaaaattccatgtttaaccatatgaccctgcttgcttactcatattctccctccctctccccttcctttctctctcttccagaagtcatttgcctggtttgaaatattttgtagggattgcttattatattattttagctgatgaacctcaggacaacgtctacacacacacacatacatacacgcacacaaaatctcagctgttgaagagtgggcttggaatcagacttctgtgtccagtaaaaaactcctgcactgaagtcattgtgacttgagtagttacagactgattccagtgaacttgatctaatttcttttgatctaatgaatgtgtctgcttaccttgtttccttttaattgataagctccaagtagttgctaattttttgacaactttaaatgagtttcattcacttcttttacttaatgttttaagtatagtaccaataatttcattaacctgttctcaagtggtttagctaccattctgccatttttaatttttatttaattttatttgcttgagcacactgatcaaccactgaactgccttcttccattgtcctgcaatgatataagggttacatttttgtgtatatggctttcatagttgggatttcagagcactgataccagatattttcagtttgttctctgggggaatttcatttgcatctatgtttttagctatctgtgataacttgttaaatattaaaaagatattttgcttctattggaacatttgtatactcgcaactatatttctgtaaacagctgcagtcaaaaataaaacactgaaagttttcattttgcagtggaaaaaag

SEQ ID NO: 350839 - DNA, 14178 bp, Homo sapiens
  misc_feature (17)..(17): n is a, c, g, or t
  misc_feature (7547)..(7547): n is a, c, g, or t
  misc_feature (10873)..(10873): n is a, c, g, or t
tgcaacggaaacttttngctccacgaacagaaaagcaagagcaaaaactcagttaaatgcgttcttcctccatctttgcctagtccaaaaggaaaaaaaaagaaacagaaaaaagaaaaactgtttggaagagtagcgttgaggtttgctttttacctgtttttcctctagaacagccaggtggattcacatgatccaattttttaattgtcttctatgtcccactccgaataacccggatgccccagcacaatcagagagatcgttttttttaaaaaaaatttcagcctccaaaggtaggaggggagtgttaggggagaaagtactttaattaaaaatcaataactcgaggtttttgggatacggtttgccatttcctaattaagaaatgggtttgacagtccctttgtacacactgctatgcaaaccccaaagggttggcggctgtccgggcgatgacactccggtcccctgcgagaccccgggccagccaggcccgtccgccgccggcctctggggtccgtccccggctcgcgcagacctctcgcttctctcggctctgtctcctgcgctcagctctgctcggggccggccgcctcaggctcgccgccaccaggtcgttgcaaataccttttccctccccggggccccagcgcgcggccacctcccagcctccccccctcccaccctggcagcggggccctttcccggctcaggaacagcagcagcccgggccgcgccggcaggaagcgaggcccatgttgctgctgttccctggcgcgcctccccgccctccgggggccgccacggctcttccgcgctcccgggcacccccctccgcgcctgcgctgtgccccacgggggcggggctcagattcctgtcagcggcggcggcggtggcggcgaccgtcagttttcgctgaggagaaacacgaaacggaccctttggctctcccccttccccttccccgtcctgaacccctctcctggtcaccgagaatcagtccccgtggagttccccctccacctcgccatcgtttcctcggtcctcggcccagtggaagtcactaccctcgaggaggaggcagcggcagccgccctcgcgtcgccgcccccggttcggtgcccgcggtcccggagaggaggtgccgccgccaccgccgctccccccctcccgctgccctcgggccgggctgggtcgagctgcgatgccctcggacttcatctcattgctcagcgcggacctagacctggaatcgcccaagtccctctactcgcgagattctctgaagttacacccatcacagaattttcatagagctggactattggaagaatctgtctatgatcttctcccaaaggagttacagttacctccatctagagaaacatctgtagcatcaatgagtcagacaagcggtggtgaggcaggctcgcctcctccagctgttgttgctgctgatgcttcttcagctccctcctcttcctccatgggcggtgcttgcagctcctttaccacctcttccagccctaccatttattctacctcagtcaccgacagcaaggctatgcaagtggagagctgctcctcagccgtgggggtaagtaacagaggggtaagtgaaaagcagttaaccagtaacacagttcagcagcatccatcaacaccgaagaggcacacagtcttgtacatctcaccaccacctgaggacttgctggataacagtcggatgtcctgccaggatgaggggtgtggattggaatctgagcagagctgcagtatgtggatggaggattccccctccaacttcagtaacatgagcaccagttcctacaatgataacactgaggtacctcgtaaatcacgaaaacgaaatccaaagcagaggccgggggtcaaacgacgagattgtgaagaatctaatatggatatatttgatgccgacagtgccaaagcacctcactatgtgctttctcagcttaccacggacaacaaaggcaactcaaaagcgggaaatggaacattggaaaaccaaaaaggaactggagtaaagaagagccctatgttgtgtggacaatatcctgttaaaagtgagggaaaggagctgaagatagttgtacaacctgagacacagcaccgagctcggtacctgactgagggcagccgtggctcagtgaaagatagaacacagcaaggctttcctacagtaaagctggaaggccataatgaacctgtagtgttgcaagtgtttgtgggcaacgactctggacgagtgaaaccacatggattttatcaggcctgcagagtaactggacgaaatacaactccttgcaaagaagtggacattgaaggcactactgttatagaagtcggccttgatcctagcaacaacatgacactggcggtggactgcgtagggatattgaaattgaggaatgctgatgtcgaagccagaataggaattgctggttccaagaagaaaagcactcgtgccagattggtttttcgagttaatatcatgaggaaagatggctccactttgacactgcaaacaccctcttctccaattttgtgtactcagccagcaggagtgccagaaatcttaaagaaaagcttgcatagctgttcagtgaaaggagaagaagaagtgtttttaatcggcaagaactttctgaaaggaactaaagttattttccaagaaaatgtttctgatgaaaactcttggaagtcagaagctgaaattgatatggaactatttcatcagaatcatcttattgtgaaggttcctccctatcatgaccaacatataactttgcctgtgtcagtgggaatatatgtagtgacaaatgctggaagatctcatgatgttcaaccattcacttacactccagacccagcagcagctggtgctttgaatgtaaatgtgaagaaggaaatatctagtccagcaagaccttgctcttttgaagaggccatgaaagcaatgaaaactactggatgtaatttagataaggtaaatattatccctaatgccctgatgactccactcataccaagcagtatgattaagagtgaagatgttactccaatggaagtaacagcagaaaaaagatcttccactatttttaagactacaaagtctgttggatcaactcagcaaacattagaaaacatctcaaacatagcaggaaatggctctttttcatcaccatcatcttcccacctaccttctgaaaatgaaaaacagcagcagattcagcccaaggcatacaacccagagaccctgacaactattcaaacccaggacatctcacagcctggtacttttccagcagtttctgcttctagtcagctgcccaacagcgatgcactattgcagcaggctacacagtttcagacaagagaaactcagtctagagagatattacagtcagatggtacagtggttaatttgtcacaactgactgaggcatcacaacaacagcagcagtcaccactacaagaacaagcacagactttacagcagcagatttcatcaaatatttttccatcaccaaatagtgtgagtcagcttcagaatactattcagcagctgcaagcagggagtttcacaggcagtactgctagtggcagcagtggaagtgttgacttggtccaacaagttttagaggcacagcagcagttatcttcagttttattttctgctccagatggtaatgagaatgttcaagagcagcttagtgcagatatttttcaacaagtcagtcaaattcagagtggtgtaagccctggaatgttttcctcaacagagccaacagtccataccagaccagataatttattacctggaagagctgaaagtgttcatccacagtctgaaaacacgttatctaatcaacagcagcagcagcagcagcaacagcaagtgatggaatcttcagccgcaatggtgatggagatgcaacagagtatctgccaggcagctgcccagattcagtcagagttattcccttcaactgcttcagcaaatggaaaccttcagcaatcgccagtttaccagcagacttctcacatgatgagtgcattgtctaccaatgaggatatgcaaatgcagtgtgaattgttttcttctcctcctgcagtttctggaaatgaaacttctacaactaccacacagcaggttgcaacccctggcactaccatgtttcagacatcaagttcaggagatggagaagaaactggaacacaagcaaaacagattcagaacagtgtctttcagaccatggtccaaatgcaacatagtggggacaatcaacctcaagttaaccttttttcatccacaaaaagtatgatgagtgttcagaatagtggtacccaacaacaaggtaatggtttattccagcaagggaatgagatgatgtcacttcaatctggaaattttttgcagcagtcttctcattcacaggcccaactttttcatcctcaaaatcctattgccgatgctcagaacctttcccaggaaactcaaggttctctctttcatagtccaaatcctattgtccacagtcagacttctacaacctcctctgaacaaatgcagcctccaatgtttcactctcaaagtaccattgctgtgttacagggctcttcagttcctcaagaccagcagtcaaccaacatatttctttcccagagtcccatgaataatcttcagactaacacagtagcccaagaagcattttttgcagcaccgaactcaatttctccacttcagtcaacatcaaacagtgaacaacaagctgctttccaacagcaagctccaatatcacacatccagactcctatgctttcccaagaacaggcacaacccccgcagcagggtttatttcagcctcaggtggccctgggctcccttccacctaatccaatgcctcaaagccaacaaggaaccatgttccagtcacagcactcaatagttgccatgcagagtaactctccatcccaggaacagcagcagcagcagcaacagcagcagcaacagcagcagcaacaacaacagagcattttattcagtaatcagaataccatggctacaatggcgtctccaaagcaaccaccaccaaacatgatattcaacccaaatcaaaatccaatggctaatcaggagcaacagaaccagtcaatttttcaccaacaaagtaacatggccccaatgaatcaagagcaacagcccatgcaatttcagagtcagtccacagtttcctcacttcagaacccaggtcctacccagtcggaatcatcacagacccccttgttccatagctctcctcagattcagttggtacaagggtcacctagttctcaagagcagcaagtaactctcttcttatctccagcatccatgtctgccttgcagaccagtataaatcaacaagatatgcaacagtctcctctttattcccctcagaacaacatgcctggaattcaaggagccacatcttcgcctcaaccacaggctactttatttcacaacacagcaggaggcacaatgaaccaactgcagaattctcctggctcatctcagcagacatcaggaatgttcttatttggcattcaaaataactgtagtcagcttttaacctctggaccagctacattgcctgatcagttgatggccataagtcagccaggccaaccacaaaacgagggccagccacctgtgacaacacttctttctcagcaaatgccagagaattctccactggcatcctctataaacaccaaccagaacatcgaaaagattgatttgcttgtttcattgcaaaaccaagggaacaacttgactggctccttttaactggatataaattccacgaagaaaatcctgattccaagatgtcctgagatcttgtggttccatgagaattattactttaaaaacaaaacaaaatataaaaaactgtgtttgagtaaactgatagattttactctgactgcaaaagagcacacctatgctgcttgttgcagtaactaaccaccaatgttaacatcttcatattttatattcctaataacagtgatgactgagaatctatttgagtttccagctggcagaattaattgttattattttcctaggcgcaatttccttaaacgtacagtttaaattcaaggctggaccactcagttattattgctattagaaaataatatatcatgtttacttttgttcttcattattttctttcctgcattgttttagtcaagtaatggcttttgaaaaagtaaagttcaataataactaaggctgtgatttttttcaatataaaaggcacagctgttggccaaagtgaaggaatcttttttcagttttattggagaaactgaagggtaacattctaacaagtaaactgtatgtgcagataaaagtactcttgatttaacacaaaggcagatgatacacttataaaactgggaacagctggaatgcttcttgattttattttttcagagagttgttagttctctgggtttctactaaggggtttagccataactgtgcatagaaaaataattatctgtaaaaaatgaaggggataatatatgataaattatgttctgatatcctcctacagtagtttaaattgacagaaaaatttgaatgttttcttcttaacccagtcttaggctggtattccctttttatatatatctatattacttttcacctctttttcactttactttagagaactattaatatactactggcttcatgaccctgtagcatctttggccactttaatctagggtgacctagcaatcctgcagcacagggcagagagtactgtcttaggaattattaggagttgattcctgagaaacaacacatttttccccatgaacggtgctgttctgaagtcttcaaatttttccctctaataggaaacagtataaattttaattaaaaaaaaaaggcaaactaaaatttcttgaaatatcacttctccctgatctgcagtgagtataaattcacttgtcacctcagtgctttacagtttgaagtggtcacttacctgatggttcccacaagccttaggctttacagggttgtatcattgacttaaaatgaagaattaacttgtgttacatctataaagagcaaaataacacactccagaacttggcagttgtagcattagttatacagttttgggtgttcttgccacccgtgggatgcctgcttctcactaccacctgtgtctggacacatgcttatgtctcattttccttttggcatgtggaaagctgtcaatgcagtgtaaggccaacgtgtgtgtggcttctatgtgttgagataatgttttggtatccttgtccgtttcatttattttttaagtgtacaaaaaataacctgttaattgttgaaggctacttttctgttcttttttttttttttttctatcctgtacatttagttgaactgtgcggaattgtggtgttggttttgtttacacagccagatttttccttctttttgttttgngatgatcttcctttgttctttgaatgtgctcttttgtctttttctcttttttctcatgttttcttccctccacctccacccctttctttctttctctctctgattgagaggcattgaattacgttttcagtagtacaggcttcttgccgatatgaagggaacttttcagaaagagacctactctgggtcatttaattttgaatacagttttcaatcgttcaagttttggatggtttatatctaatgtgtgtttcatttttttggaaagctatattttgtatttaggaaatggtatactattttgctatttgtactgagtgagtacattggcataaatatagaaatttatatatatacatatatataaactattcttttttgccacacatttttgtggtaaatttgtgagtttgtctgatgttctaccacaacgtggcgtctgataacagtgagggggggtggggtttgttatgtctttattgagtatttaagtatcttttgaaacaaatgacctgttcatctgtggccattccatcaggcagttagttccttgatgtcagtagtgggctaaaggcagcttactgtgtgtttgctggagctttcactcagccaagtgttagagtcaggaaacccattgaggcaatggcgtcaaatggtgtttcacaagaatgagccattcagtctttgctcactatatatttaatattttattattgttgttattgttattattaattggctttctgtattctatgccttttatttataaagacactaagaaaacccatgtttgtaattttaataacatttttcccatcttgtaatatccagagctactttataaattctctgaaccaaaagtattttcctcagtgtatctcttctcccccagcccctattgggaaaaattacccagtatagttcaggttatgaggaggatcagccacacaatccagtgcttcagtttgaaaatgtaaaattctaaccctaaagtagggttggttgaaatttcagacaaagcaaacccagcaggtataaaaagtagtataaatacaaatctgtaagttatttttgaattttctgaacttttttctaagagattacataggagactaaagaaatctatctgttcaagttctaattaggatgattgttaatactgcactgtggatgaagtggcgactggcttgtgtgctgacttctgtggtttagcaagaggtttattgttatcaaatgctaattggcaatgccaagtcactgggaccaattttctgttttataatatctaagtttagaacagaatatatacctgaactgtagtggtttgatcggatggagacagaaaacccgatttttattctcataaattttgtggttatttatacaagggctgtgctatgctaccatattcttgttcaataataataggtttgttgttttttttacattgttaaatgttccttacccctaaaggtcaatgttaagtacaacattctgaaaatacaatttggctacaaagagtattcatcttctttgaagctcagtggttgatatttgtgctaataatgcaatttcctgattactgttacaagttatagctacatatgggagagactcagtgagccagcaaaggccatagaaacaacaatttattaaatgtatttatggcagaaggacctaaataaactgtgagccaccttttcttctttatattgttacatttaagtgttcttgctttcagcaactcacattaatgcttggagcttatctctttctctctctctctctctctctctgtgtgtgtgtgtgtatgtgtgtgtgtgtgtgtgtgtgtttccttattgtcattccattatatatccacaccaacatgggtgacgataattcaaagtcatattttgcctctaagcttgatcatgttacctttatgattaaagtatcatgttatttagccaatgcaaatctgttttaaaacaaatagtttaaaaaaagaacaagtttttaagggctttattatagaagaagtattaatgaaggactttccttcctccctccctttcctcccctccctgcctcccttcttcccttccatctccccctcctccctgccttctttgtttctccttcccttattcctccctccctcctttctcccttccttcctttcttccattcatccttccttgccttttatttttattttttgtaatatcacatgtgctgtagtttggaattttattctagtgcatttcttgctcatcagaacctcagctaatctacctaggaaaaatagtatcaaaggaaatgagaaagttgtatctgagtccctccagaactaagataattctttttgaccatttaagcctttataaatgcgttttgaccatttaagcctttataaatgcttgttttaggaaagtgaatctgttagatgcatcaacaaataatgaccaggacaaaacgatttaataattaaagtctcaaatcaccatggttatacattttcaccagaaatagtaatcttacaatttttcatttttctgatgaagatttctgttccaatatctgtttcctaatagattttttaaattaattagctttcctctgctttatgaccacaggttttatccctaaccgagacagctgtcttatatctgcatgccttagactgtgtggagggactccatgaagaaagaccataggttagaaaaataactcatagtatataccctagtaagtgggttagtagaatctcataacatgtattaaaaagaggttttcttctctgcttgtttgtgtcactagagcaaaattgtagagataatgctcataatgcagtaaatatcagaataatatctacaatatcatttgtggatggtcccaggtcccagtgctctagttactttacttcttttttttttttgagatggagtcttgctctgtctctcaggctagagcagtgtgcgatctcagctcactgcagcctccacctcccaggttcaagcgattctcctgcctcagcctcccaagtagccaggattacaggcaccctccactaggcccggctaattttttttgtatttttttagtagagatggggttttgccatgttggccaggctggtttcgaactcctaacctccagtgatccacctgcctcggcgtcccaaagtgctaggattacaggcatgagccaccacatccggcctaattacttctttaatccccatttatttttatgccattctagcctcatttattaataaaattatgtttttactttctctttcaggaaattttttaaattaatattttatatctagatcnaatgctatggaaaagtgcctttttatcatttataatttcatttttcactatttccaaaaacacataaacaaatagtttcagtaggtcccagcttttactttttccatttaaaccttcttttctccatttcttccctttggcttaagaataaaagaaaaggtacattgctagaattgtttctttgggagagggtaaaagattacagaattagactgttcagcctttatataaactaaatttgtcttcatctcaaccagctaatggtaggtcttatctgaatactcatgagaattttagcatctgtgaaactccatgcaccagatgtgtgtaaatttcaggaagaaagtgttgaaagcattttctctgatgttaattagatggaaataaatcactaaaacatagtttaggtaaagcctgattatgccacttttttttaactagacagggcaaagttgtttatgttagtgtacttcttgtctatcctcagttaatttacctagacaaaaagtgtcaaaggaaatgagaaaaaggttatatctgactccctccagacctaagataattccttttgatcagatacagtcagatggagtgccttggtttttgttaattttgcctctattccagctccttaccacagcggtggtgcttaaagaaaggatcatcagcaacaggtcaggatagttctacctttgggatagggctgctttccccgtgctagtatttctgtgactgttagtggcactgaggactgcaaacttttatgcaatattcttaataccctattgatattatgcactttaatcattccaaagaagccaagaatgctgtatagtgatgattccttcctaatgaattcatcttaactatttagaatgttatgtcccttttcttttggatagccaacttggtataaatgttatatggatttttctaaaatgactatataggacttaagactttgaaatgtaatttacttataaggggaaataattatgctttagcacatcattttagaaacgtcacattttagaaacattcagcttgctaacctacatgtttgggaattcattaaaaccagttgtctatatattttgtgccatgtatataagaacattacaatatatctttttctacatatgtagtatgtgcaaccagtggttctcagagtatggttctcagcccaccagctagtatcagtatcacctgggaactagttagaaatgtaaattctttggccccatcccagacatactgagtcagaaactctggaatagggcccccgcaatctgttttcacaagccctccaggtgattctgatgcacactttaaagtttaggaaccactgggctaagactctgttgagatatagagtttttctttccactcagactgatatagttatacattgttcttcatgtaaattcagcttaacctggttatctataatcttttattggcaaaagttaattctcagtactgcctatagagatacagtgtattttatgtacatacacaattagtctaattcttgataattcagttaatttagtttggcattttcctaccacttactaaaaggtttacattaaatgactgatttaaatatataggtgcaatgttctatgtttattttaattgttatgacatttaagtagctaatataattgaccggtgctaaagtctcctgtttatccataaaatgggtacattatgggcagtgtaatacaagctttcttttcattgcctagtactttaccagcagaccacagttttgccctggctagaccaaccctcagaacaaaatcatcattccttgtatttatatttgtatctgagatagtaaacaagatggctggccaggtcaacatggcaccttaacttatttttttaataggtaaaacttcttcaaaagtagcttgctttgtataagaactaagctatcagtatagatatagctatccttggagcttatgtttcagacaagaattatttactaaaataaataataaacaagataatgcattatacaatttgggcatttctcgtttctcaagtgtatgcatcatggtaaatataaactaaccacaagataggtagattgattcatttcattttaatctccttgtgtaattcagtacctccataattgttctaatcttcttcccactgtttacaaattaccagttaattaactcgtgaaagaaaaattcacatatcagaataaaaataaatgtatactcactttataaaaatcaccactgctgtctttccttaatactagcagtggaaatgtaagtggcttactctacaaattttggtgctggcaaatacataggcaaactgttgggagctgctctagttacattcctcccttcttattccctttttctcttcctcactttattgcataacatattcctgtacccaaagcattctaccacagttctatttgactcccacttgtaataactcctttaaaaaattccatgtttaaccatatgaccctgcttgcttactcatattctccctccctctccccttcctttctctctcttccagaagtcatttgcctggtttgaaatattttgtagggattgcttattatattattttagctgatgaacctcaggacaacgtctacacacacacacatacatacacgcacacaaaatctcagctgttgaagagtgggcttggaatcagacttctgtgtccagtaaaaaactcctgcactgaagtcattgtgacttgagtagttacagactgattccagtgaacttgatctaatttcttttgatctaatgaatgtgtctgcttaccttgtttccttttaattgataagctccaagtagttgctaattttttgacaactttaaatgagtttcattcacttcttttacttaatgttttaagtatagtaccaataatttcattaacctgttctcaagtggtttagctaccattctgccatttttaatttttatttaattttatttgcttgagcacactgatcaaccactgaactgccttcttccattgtcctgcaatgatataagggttacatttttgtgtatatggctttcatagttgggatttcagagcactgataccagatattttcagtttgttctctgggggaatttcatttgcatctatgtttttagctatctgtgataacttgttaaatattaaaaagatattttgcttctattggaacatttgtatactcgcaactatatttctgtaaacagctgcagtcaaaaataaaacactgaaagttttcattttgcagtggaaaaaag

SEQ ID NO: 350840 - DNA, 14092 bp, Homo sapiens
  misc_feature (17)..(17): n is a, c, g, or t
  misc_feature (7555)..(7555): n is a, c, g, or t
  misc_feature (10881)..(10881): n is a, c, g, or t
tgcaacggaaacttttngctccacgaacagaaaagcaagagcaaaaactcagttaaatgcgttcttcctccatctttgcctagtccaaaaggaaaaaaaaagaaacagaaaaaagaaaaactgtttggaagagtagcgttgaggtttgctttttacctgtttttcctctagaacagccaggtggattcacatgatccaattttttaattgtcttctatgtcccactccgaataacccggatgccccagcacaatcagagagatcgttttttttaaaaaaaatttcagcctccaaaggtaggaggggagtgttaggggagaaagtactttaattaaaaatcaataactcgaggtttttgggatacggtttgccatttcctaattaagaaatgggtttgacagtccctttgtacacactgctatgcaaaccccaaagggttggcggctgtccgggcgatgacactccggtcccctgcgagaccccgggccagccaggcccgtccgccgccggcctctggggtccgtccccggctcgcgcagacctctcgcttctctcggctctgtctcctgcgctcagctctgctcggggccggccgcctcaggctcgccgccaccaggtcgttgcaaataccttttccctccccggggccccagcgcgcggccacctcccagcctccccccctcccaccctggcagcggggccctttcccggctcaggaacagcagcagcccgggccgcgccggcaggaagcgaggcccatgttgctgctgttccctggcgcgcctccccgccctccgggggccgccacggctcttccgcgctcccgggcacccccctccgcgcctgcgctgtgccccacgggggcggggctcagattcctgtcagcggcggcggcggtggcggcgaccgtcagttttcgctgaggagaaacacgaaacggaccctttggctctcccccttccccttccccgtcctgaacccctctcctggtcaccgagaatcagtccccgtggagttccccctccacctcgccatcgtttcctcggtcctcggcccagtggaagtcactaccctcgaggaggaggcagcggcagccgccctcgcgtcgccgcccccggttcggtgcccgcggtcccggagaggaggtgccgccgccaccgccgctccccccctcccgctgccctcgggccgggctgggtcgagctgcgatgccctcggacttcatctcattgctcagcgcggacctagacctggaatcgcccaagtccctctactcgcgagaatctgtctatgatcttctcccaaaggagttacagttacctccatctagagaaacatctgtagcatcaatgagtcagacaagcggtggtgaggcaggctcgcctcctccagctgttgttgctgctggatttgcctctgaagcagggagtgtctgcattaaaaatgacctgtagttctctgcttcatagatgcttcttcagctccctcctcttcctccatgggcggtgcttgcagctcctttaccacctcttccagccctaccatttattctacctcagtcaccgacagcaaggctatgcaagtggagagctgctcctcagccgtgggggtaagtaacagaggggtaagtgaaaagcagttaaccagtaacacagttcagcagcatccatcaacaccgaagaggcacacagtcttgtacatctcaccaccacctgaggacttgctggataacagtcggatgtcctgccaggatgaggggtgtggattggaatctgagcagagctgcagtatgtggatggaggattccccctccaacttcagtaacatgagcaccagttcctacaatgataacactgaggtacctcgtaaatcacgaaaacgaaatccaaagcagaggccgggggtcaaacgacgagattgtgaagaatctaatatggatatatttgatgccgacagtgccaaagcacctcactatgtgctttctcagcttaccacggacaacaaaggcaactcaaaagcgggaaatggaacattggaaaaccaaaaaggaactggagtaaagaagagccctatgttgtgtggacaatatcctgttaaaagtgagggaaaggagctgaagatagttgtacaacctgagacacagcaccgagctcggtacctgactgagggcagccgtggctcagtgaaagatagaacacagcaaggctttcctacagtaaagctggaaggccataatgaacctgtagtgttgcaagtgtttgtgggcaacgactctggacgagtgaaaccacatggattttatcaggcctgcagagtaactggacgaaatacaactccttgcaaagaagtggacattgaaggcactactgttatagaagtcggccttgatcctagcaacaacatgacactggcggtggactgcgtagggatattgaaattgaggaatgctgatgtcgaagccagaataggaattgctggttccaagaagaaaagcactcgtgccagattggtttttcgagttaatatcatgaggaaagatggctccactttgacactgcaaacaccctcttctccaattttgtgtactcagccagcaggagtgccagaaatcttaaagaaaagcttgcatagctgttcagtgaaaggagaagaagaagtgtttttaatcggcaagaactttctgaaaggaactaaagttattttccaagaaaatgtttctgatgaaaactcttggaagtcagaagctgaaattgatatggaactatttcatcagaatcatcttattgtgaaggttcctccctatcatgaccaacatataactttgcctgtgtcagtgggaatatatgtagtgacaaatgctggaagatctcatgatgttcaaccattcacttacactccagacccagcagcagctggtgctttgaatgtaaatgtgaagaaggaaatatctagtccagcaagaccttgctcttttgaagaggccatgaaagcaatgaaaactactggatgtaatttagataaggtaaatattatccctaatgccctgatgactccactcataccaagcagtatgattaagagtgaagatgttactccaatggaagtaacagcagaaaaaagatcttccactatttttaagactacaaagtctgttggatcaactcagcaaacattagaaaacatctcaaacatagcaggaaatggctctttttcatcaccatcatcttcccacctaccttctgaaaatgaaaaacagcagcagattcagcccaaggcatacaacccagagaccctgacaactattcaaacccaggacatctcacagcctggtacttttccagcagtttctgcttctagtcagctgcccaacagcgatgcactattgcagcaggctacacagtttcagacaagagaaactcagtctagagagatattacagtcagatggtacagtggttaatttgtcacaactgactgaggcatcacaacaacagcagcagtcaccactacaagaacaagcacagactttacagcagcagatttcatcaaatatttttccatcaccaaatagtgtgagtcagcttcagaatactattcagcagctgcaagcagggagtttcacaggcagtactgctagtggcagcagtggaagtgttgacttggtccaacaagttttagaggcacagcagcagttatcttcagttttattttctgctccagatggtaatgagaatgttcaagagcagcttagtgcagatatttttcaacaagtcagtcaaattcagagtggtgtaagccctggaatgttttcctcaacagagccaacagtccataccagaccagataatttattacctggaagagctgaaagtgttcatccacagtctgaaaacacgttatctaatcaacagcagcagcagcagcagcaacagcaagtgatggaatcttcagccgcaatggtgatggagatgcaacagagtatctgccaggcagctgcccagattcagtcagagttattcccttcaactgcttcagcaaatggaaaccttcagcaatcgccagtttaccagcagacttctcacatgatgagtgcattgtctaccaatgaggatatgcaaatgcagtgtgaattgttttcttctcctcctgcagtttctggaaatgaaacttctacaactaccacacagcaggttgcaacccctggcactaccatgtttcagacatcaagttcaggagatggagaagaaactggaacacaagcaaaacagattcagaacagtgtctttcagaccatggtccaaatgcaacatagtggggacaatcaacctcaagttaaccttttttcatccacaaaaagtatgatgagtgttcagaatagtggtacccaacaacaaggtaatggtttattccagcaagggaatgagatgatgtcacttcaatctggaaattttttgcagcagtcttctcattcacaggcccaactttttcatcctcaaaatcctattgccgatgctcagaacctttcccaggaaactcaaggttctctctttcatagtccaaatcctattgtccacagtcagacttctacaacctcctctgaacaaatgcagcctccaatgtttcactctcaaagtaccattgctgtgttacagggctcttcagttcctcaagaccagcagtcaaccaacatatttctttcccagagtcccatgaataatcttcagactaacacagtagcccaagaagcattttttgcagcaccgaactcaatttctccacttcagtcaacatcaaacagtgaacaacaagctgctttccaacagcaagctccaatatcacacatccagactcctatgctttcccaagaacaggcacaacccccgcagcagggtttatttcagcctcaggtggccctgggctcccttccacctaatccaatgcctcaaagccaacaaggaaccatgttccagtcacagcactcaatagttgccatgcagagtaactctccatcccaggaacagcagcagcagcagcaacagcagcagcaacagcagcagcaacaacaacagagcattttattcagtaatcagaataccatggctacaatggcgtctccaaagcaaccaccaccaaacatgatattcaacccaaatcaaaatccaatggctaatcaggagcaacagaaccagtcaatttttcaccaacaaagtaacatggccccaatgaatcaagagcaacagcccatgcaatttcagagtcagtccacagtttcctcacttcagaacccaggtcctacccagtcggaatcatcacagacccccttgttccatagctctcctcagattcagttggtacaagggtcacctagttctcaagagcagcaagtaactctcttcttatctccagcatccatgtctgccttgcagaccagtataaatcaacaagatatgcaacagtctcctctttattcccctcagaacaacatgcctggaattcaaggagccacatcttcgcctcaaccacaggctactttatttcacaacacagcaggaggcacaatgaaccaactgcagaattctcctggctcatctcagcagacatcaggaatgttcttatttggcattcaaaataactgtagtcagcttttaacctctggaccagctacattgcctgatcagttgatggccataagtcagccaggccaaccacaaaacgagggccagccacctgtgacaacacttctttctcagcaaatgccagagaattctccactggcatcctctataaacaccaaccagaacatcgaaaagattgatttgcttgtttcattgcaaaaccaagggaacaacttgactggctccttttaactggatataaattccacgaagaaaatcctgattccaagatgtcctgagatcttgtggttccatgagaattattactttaaaaacaaaacaaaatataaaaaactgtgtttgagtaaactgatagattttactctgactgcaaaagagcacacctatgctgcttgttgcagtaactaaccaccaatgttaacatcttcatattttatattcctaataacagtgatgactgagaatctatttgagtttccagctggcagaattaattgttattattttcctaggcgcaatttccttaaacgtacagtttaaattcaaggctggaccactcagttattattgctattagaaaataatatatcatgtttacttttgttcttcattattttctttcctgcattgttttagtcaagtaatggcttttgaaaaagtaaagttcaataataactaaggctgtgatttttttcaatataaaaggcacagctgttggccaaagtgaaggaatcttttttcagttttattggagaaactgaagggtaacattctaacaagtaaactgtatgtgcagataaaagtactcttgatttaacacaaaggcagatgatacacttataaaactgggaacagctggaatgcttcttgattttattttttcagagagttgttagttctctgggtttctactaaggggtttagccataactgtgcatagaaaaataattatctgtaaaaaatgaaggggataatatatgataaattatgttctgatatcctcctacagtagtttaaattgacagaaaaatttgaatgttttcttcttaacccagtcttaggctggtattccctttttatatatatctatattacttttcacctctttttcactttactttagagaactattaatatactactggcttcatgaccctgtagcatctttggccactttaatctagggtgacctagcaatcctgcagcacagggcagagagtactgtcttaggaattattaggagttgattcctgagaaacaacacatttttccccatgaacggtgctgttctgaagtcttcaaatttttccctctaataggaaacagtataaattttaattaaaaaaaaaaggcaaactaaaatttcttgaaatatcacttctccctgatctgcagtgagtataaattcacttgtcacctcagtgctttacagtttgaagtggtcacttacctgatggttcccacaagccttaggctttacagggttgtatcattgacttaaaatgaagaattaacttgtgttacatctataaagagcaaaataacacactccagaacttggcagttgtagcattagttatacagttttgggtgttcttgccacccgtgggatgcctgcttctcactaccacctgtgtctggacacatgcttatgtctcattttccttttggcatgtggaaagctgtcaatgcagtgtaaggccaacgtgtgtgtggcttctatgtgttgagataatgttttggtatccttgtccgtttcatttattttttaagtgtacaaaaaataacctgttaattgttgaaggctacttttctgttcttttttttttttttttctatcctgtacatttagttgaactgtgcggaattgtggtgttggttttgtttacacagccagatttttccttctttttgttttgngatgatcttcctttgttctttgaatgtgctcttttgtctttttctcttttttctcatgttttcttccctccacctccacccctttctttctttctctctctgattgagaggcattgaattacgttttcagtagtacaggcttcttgccgatatgaagggaacttttcagaaagagacctactctgggtcatttaattttgaatacagttttcaatcgttcaagttttggatggtttatatctaatgtgtgtttcatttttttggaaagctatattttgtatttaggaaatggtatactattttgctatttgtactgagtgagtacattggcataaatatagaaatttatatatatacatatatataaactattcttttttgccacacatttttgtggtaaatttgtgagtttgtctgatgttctaccacaacgtggcgtctgataacagtgagggggggtggggtttgttatgtctttattgagtatttaagtatcttttgaaacaaatgacctgttcatctgtggccattccatcaggcagttagttccttgatgtcagtagtgggctaaaggcagcttactgtgtgtttgctggagctttcactcagccaagtgttagagtcaggaaacccattgaggcaatggcgtcaaatggtgtttcacaagaatgagccattcagtctttgctcactatatatttaatattttattattgttgttattgttattattaattggctttctgtattctatgccttttatttataaagacactaagaaaacccatgtttgtaattttaataacatttttcccatcttgtaatatccagagctactttataaattctctgaaccaaaagtattttcctcagtgtatctcttctcccccagcccctattgggaaaaattacccagtatagttcaggttatgaggaggatcagccacacaatccagtgcttcagtttgaaaatgtaaaattctaaccctaaagtagggttggttgaaatttcagacaaagcaaacccagcaggtataaaaagtagtataaatacaaatctgtaagttatttttgaattttctgaacttttttctaagagattacataggagactaaagaaatctatctgttcaagttctaattaggatgattgttaatactgcactgtggatgaagtggcgactggcttgtgtgctgacttctgtggtttagcaagaggtttattgttatcaaatgctaattggcaatgccaagtcactgggaccaattttctgttttataatatctaagtttagaacagaatatatacctgaactgtagtggtttgatcggatggagacagaaaacccgatttttattctcataaattttgtggttatttatacaagggctgtgctatgctaccatattcttgttcaataataataggtttgttgttttttttacattgttaaatgttccttacccctaaaggtcaatgttaagtacaacattctgaaaatacaatttggctacaaagagtattcatcttctttgaagctcagtggttgatatttgtgctaataatgcaatttcctgattactgttacaagttatagctacatatgggagagactcagtgagccagcaaaggccatagaaacaacaatttattaaatgtatttatggcagaaggacctaaataaactgtgagccaccttttcttctttatattgttacatttaagtgttcttgctttcagcaactcacattaatgcttggagcttatctctttctctctctctctctctctctctgtgtgtgtgtgtgtatgtgtgtgtgtgtgtgtgtgtgtttccttattgtcattccattatatatccacaccaacatgggtgacgataattcaaagtcatattttgcctctaagcttgatcatgttacctttatgattaaagtatcatgttatttagccaatgcaaatctgttttaaaacaaatagtttaaaaaaagaacaagtttttaagggctttattatagaagaagtattaatgaaggactttccttcctccctccctttcctcccctccctgcctcccttcttcccttccatctccccctcctccctgccttctttgtttctccttcccttattcctccctccctcctttctcccttccttcctttcttccattcatccttccttgccttttatttttattttttgtaatatcacatgtgctgtagtttggaattttattctagtgcatttcttgctcatcagaacctcagctaatctacctaggaaaaatagtatcaaaggaaatgagaaagttgtatctgagtccctccagaactaagataattctttttgaccatttaagcctttataaatgcgttttgaccatttaagcctttataaatgcttgttttaggaaagtgaatctgttagatgcatcaacaaataatgaccaggacaaaacgatttaataattaaagtctcaaatcaccatggttatacattttcaccagaaatagtaatcttacaatttttcatttttctgatgaagatttctgttccaatatctgtttcctaatagattttttaaattaattagctttcctctgctttatgaccacaggttttatccctaaccgagacagctgtcttatatctgcatgccttagactgtgtggagggactccatgaagaaagaccataggttagaaaaataactcatagtatataccctagtaagtgggttagtagaatctcataacatgtattaaaaagaggttttcttctctgcttgtttgtgtcactagagcaaaattgtagagataatgctcataatgcagtaaatatcagaataatatctacaatatcatttgtggatggtcccaggtcccagtgctctagttactttacttcttttttttttttgagatggagtcttgctctgtctctcaggctagagcagtgtgcgatctcagctcactgcagcctccacctcccaggttcaagcgattctcctgcctcagcctcccaagtagccaggattacaggcaccctccactaggcccggctaattttttttgtatttttttagtagagatggggttttgccatgttggccaggctggtttcgaactcctaacctccagtgatccacctgcctcggcgtcccaaagtgctaggattacaggcatgagccaccacatccggcctaattacttctttaatccccatttatttttatgccattctagcctcatttattaataaaattatgtttttactttctctttcaggaaattttttaaattaatattttatatctagatcnaatgctatggaaaagtgcctttttatcatttataatttcatttttcactatttccaaaaacacataaacaaatagtttcagtaggtcccagcttttactttttccatttaaaccttcttttctccatttcttccctttggcttaagaataaaagaaaaggtacattgctagaattgtttctttgggagagggtaaaagattacagaattagactgttcagcctttatataaactaaatttgtcttcatctcaaccagctaatggtaggtcttatctgaatactcatgagaattttagcatctgtgaaactccatgcaccagatgtgtgtaaatttcaggaagaaagtgttgaaagcattttctctgatgttaattagatggaaataaatcactaaaacatagtttaggtaaagcctgattatgccacttttttttaactagacagggcaaagttgtttatgttagtgtacttcttgtctatcctcagttaatttacctagacaaaaagtgtcaaaggaaatgagaaaaaggttatatctgactccctccagacctaagataattccttttgatcagatacagtcagatggagtgccttggtttttgttaattttgcctctattccagctccttaccacagcggtggtgcttaaagaaaggatcatcagcaacaggtcaggatagttctacctttgggatagggctgctttccccgtgctagtatttctgtgactgttagtggcactgaggactgcaaacttttatgcaatattcttaataccctattgatattatgcactttaatcattccaaagaagccaagaatgctgtatagtgatgattccttcctaatgaattcatcttaactatttagaatgttatgtcccttttcttttggatagccaacttggtataaatgttatatggatttttctaaaatgactatataggacttaagactttgaaatgtaatttacttataaggggaaataattatgctttagcacatcattttagaaacgtcacattttagaaacattcagcttgctaacctacatgtttgggaattcattaaaaccagttgtctatatattttgtgccatgtatataagaacattacaatatatctttttctacatatgtagtatgtgcaaccagtggttctcagagtatggttctcagcccaccagctagtatcagtatcacctgggaactagttagaaatgtaaattctttggccccatcccagacatactgagtcagaaactctggaatagggcccccgcaatctgttttcacaagccctccaggtgattctgatgcacactttaaagtttaggaaccactgggctaagactctgttgagatatagagtttttctttccactcagactgatatagttatacattgttcttcatgtaaattcagcttaacctggttatctataatcttttattggcaaaagttaattctcagtactgcctatagagatacagtgtattttatgtacatacacaattagtctaattcttgataattcagttaatttagtttggcattttcctaccacttactaaaaggtttacattaaatgactgatttaaatatataggtgcaatgttctatgtttattttaattgttatgacatttaagtagctaatataattgaccggtgctaaagtctcctgtttatccataaaatgggtacattatgggcagtgtaatacaagctttcttttcattgcctagtactttaccagcagaccacagttttgccctggctagaccaaccctcagaacaaaatcatcattccttgtatttatatttgtatctgagatagtaaacaagatggctggccaggtcaacatggcaccttaacttatttttttaataggtaaaacttcttcaaaagtagcttgctttgtataagaactaagctatcagtatagatatagctatccttggagcttatgtttcagacaagaattatttactaaaataaataataaacaagataatgcattatacaatttgggcatttctcgtttctcaagtgtatgcatcatggtaaatataaactaaccacaagataggtagattgattcatttcattttaatctccttgtgtaattcagtacctccataattgttctaatcttcttcccactgtttacaaattaccagttaattaactcgtgaaagaaaaattcacatatcagaataaaaataaatgtatactcactttataaaaatcaccactgctgtctttccttaatactagcagtggaaatgtaagtggcttactctacaaattttggtgctggcaaatacataggcaaactgttgggagctgctctagttacattcctcccttcttattccctttttctcttcctcactttattgcataacatattcctgtacccaaagcattctaccacagttctatttgactcccacttgtaataactcctttaaaaaattccatgtttaaccatatgaccctgcttgcttactcatattctccctccctctccccttcctttctctctcttccagaagtcatttgcctggtttgaaatattttgtagggattgcttattatattattttagctgatgaacctcaggacaacgtctacacacacacacatacatacacgcacacaaaatctcagctgttgaagagtgggcttggaatcagacttctgtgtccagtaaaaaactcctgcactgaagtcattgtgacttgagtagttacagactgattccagtgaacttgatctaatttcttttgatctaatgaatgtgtctgcttaccttgtttccttttaattgataagctccaagtagttgctaattttttgacaactttaaatgagtttcattcacttcttttacttaatgttttaagtatagtaccaataatttcattaacctgttctcaagtggtttagctaccattctgccatttttaatttttatttaattttatttgcttgagcacactgatcaaccactgaactgccttcttccattgtcctgcaatgatataagggttacatttttgtgtatatggctttcatagttgggatttcagagcactgataccagatattttcagtttgttctctgggggaaagggatggatcgctacagaaagaagatggttcttttgctggagatatttggcgaaagggatgatcggg

SEQ ID NO: 350841 - DNA, 12495 bp, Homo sapiens
  misc_feature (5864)..(5864): n is a, c, g, or t
  misc_feature (9190)..(9190): n is a, c, g, or t
aggacatctcacagcctggtacttttccagcagtttctgcttctagtcagatgcccaacagcgatgcactattgcagcaggctacacagtttcagacaagagaaactcagtctagagagatattacagtcagatggtacagtggttaatttgtcacaactgactgaggcatcacaacaacagcagcagtcaccacacttggcctttcagcagcatattgactgacaacaacaacaaaaatttatgaagggagcgatccaacttatagaccatgtgccattttaaaagcttctttatagccaagatttcttctcgatatcaaattaagaaatttaacagctatgctttctgaagactgtttccatagagcttccaagtggtagtaaacttttaaatcaggatttggctatgtgctcaactcagaagactgtcattagcaatagcagtaggtaccactgagtgccactgcggactcaagtagacaaaaaaagaagaaagaaaagcaatcaagggggaaaggtagatatagtgaagtggtagaatcttgctatatgttgcctctaggtataaatctagaactaactactcctgaaaatggaggtagtaggaggtgggaaataatttttcattttgcttgggaaatttggtttgtaaacctaaaatagcccttatttctggggaaaaaaaaaaagatgtttaaagtccagtctaaaagagaattgtgtccatgtgtcaacttgtcatattcaagttttctaattaatttagttttcttttaatttagaaaagcaaaatttattaatcactgggtggtattttctaatgagaagcttgaacttagtttaagaaagaagtgctctgacaatctcatagtccttaagaagttctgagactatattgtcagatagctaaatgctaagaggagagtgtagtttgtaattgagtagctttatcctcctggagatttttaagctgtatcctataatatactcttggtcaggttgggtagtatgattcaaggcacttggaaccgtcttggggaatatagcttggtaattgaactgcttaagcttattattaatatttaagctatagttccaggcccattccagaggtcccccagccaatgcacttcataaaagggaagatatatcttaatataccaggtttgtatctcatgctaccattgtagcatcaaaaaaatagacatttaaatcatggctaataacaaattttagaatgaaatagttggtaaattttgtgattttaaacttttctttttgtgtgtgtgtatatgcagcaatgaaaactactggatgtaatttagataaggtaaatattatccctaatgccctgatgactccactcataccaagcagtatgattaagagtgaagatgttactccaatggaagtaacagcagaaaaaagatcttccactatttttaagactacaaagtctgttggatcaactcagcaaacattagaaaacatctcaaacatagcaggaaatggctctttttcatcaccatcatcttcccacctaccttctgaaaatgaaaaacagcagcagattcagcccaaggcatacaacccagagaccctgacaactattcaaacccaggacatctcacagcctggtacttttccagcagtttctgcttctagtcagctgcccaacagcgatgcactattgcagcaggctacacagtttcagacaagagaaactcagtctagagagatattacagtcagatggtacagtggttaatttgtcacaactgactgaggcatcacaacaacagcagcagtcaccactacaagaacaagcacagactttacagcagcagatttcatcaaatatttttccatcaccaaatagtgtgagtcagcttcagaatactattcagcagctgcaagcagggagtttcacaggcagtactgctagtggcagcagtggaagtgttgacttggtccaacaagttttagaggcacagcagcagttatcttcagttttattttctgctccagatggtaatgagaatgttcaagagcagcttagtgcagatatttttcaacaagtcagtcaaattcagagtggtgtaagccctggaatgttttcctcaacagagccaacagtccataccagaccagataatttattacctggaagagctgaaagtgttcatccacagtctgaaaacacgttatctaatcaacagcagcagcagcagcagcaacagcaagtgatggaatcttcagccgcaatggtgatggagatgcaacagagtatctgccaggcagctgcccagattcagtcagagttattcccttcaactgcttcagcaaatggaaaccttcagcaatcgccagtttaccagcagacttctcacatgatgagtgcattgtctaccaatgaggatatgcaaatgcagtgtgaattgttttcttctcctcctgcagtttctggaaatgaaacttctacaactaccacacagcaggttgcaacccctggcactaccatgtttcagacatcaagttcaggagatggagaagaaactggaacacaagcaaaacagattcagaacagtgtctttcagaccatggtccaaatgcaacatagtggggacaatcaacctcaagttaaccttttttcatccacaaaaagtatgatgagtgttcagaatagtggtacccaacaacaaggtaatggtttattccagcaagggaatgagatgatgtcacttcaatctggaaattttttgcagcagtcttctcattcacaggcccaactttttcatcctcaaaatcctattgccgatgctcagaacctttcccaggaaactcaaggttctctctttcatagtccaaatcctattgtccacagtcagacttctacaacctcctctgaacaaatgcagcctccaatgtttcactctcaaagtaccattgctgtgttacagggctcttcagttcctcaagaccagcagtcaaccaacatatttctttcccagagtcccatgaataatcttcagactaacacagtagcccaagaagcattttttgcagcaccgaactcaatttctccacttcagtcaacatcaaacagtgaacaacaagctgctttccaacagcaagctccaatatcacacatccagactcctatgctttcccaagaacaggcacaacccccgcagcagggtttatttcagcctcaggtggccctgggctcccttccacctaatccaatgcctcaaagccaacaaggaaccatgttccagtcacagcactcaatagttgccatgcagagtaactctccatcccaggaacagcagcagcagcagcaacagcagcagcaacagcagcagcaacaacaacagagcattttattcagtaatcagaataccatggctacaatggcgtctccaaagcaaccaccaccaaacatgatattcaacccaaatcaaaatccaatggctaatcaggagcaacagaaccagtcaatttttcaccaacaaagtaacatggccccaatgaatcaagagcaacagcccatgcaatttcagagtcagtccacagtttcctcacttcagaacccaggtcctacccagtcggaatcatcacagacccccttgttccatagctctcctcagattcagttggtacaagggtcacctagttctcaagagcagcaagtaactctcttcttatctccagcatccatgtctgccttgcagaccagtataaatcaacaagatatgcaacagtctcctctttattcccctcagaacaacatgcctggaattcaaggagccacatcttcgcctcaaccacaggctactttatttcacaacacagcaggaggcacaatgaaccaactgcagaattctcctggctcatctcagcagacatcaggaatgttcttatttggcattcaaaataactgtagtcagcttttaacctctggaccagctacattgcctgatcagttgatggccataagtcagccaggccaaccacaaaacgagggccagccacctgtgacaacacttctttctcagcaaatgccagagaattctccactggcatcctctataaacaccaaccagaacatcgaaaagattgatttgcttgtttcattgcaaaaccaagggaacaacttgactggctccttttaactggatataaattccacgaagaaaatcctgattccaagatgtcctgagatcttgtggttccatgagaattattactttaaaaacaaaacaaaatataaaaaactgtgtttgagtaaactgatagattttactctgactgcaaaagagcacacctatgctgcttgttgcagtaactaaccaccaatgttaacatcttcatattttatattcctaataacagtgatgactgagaatctatttgagtttccagctggcagaattaattgttattattttcctaggcgcaatttccttaaacgtacagtttaaattcaaggctggaccactcagttattattgctattagaaaataatatatcatgtttacttttgttcttcattattttctttcctgcattgttttagtcaagtaatggcttttgaaaaagtaaagttcaataataactaaggctgtgatttttttcaatataaaaggcacagctgttggccaaagtgaaggaatcttttttcagttttattggagaaactgaagggtaacattctaacaagtaaactgtatgtgcagataaaagtactcttgatttaacacaaaggcagatgatacacttataaaactgggaacagctggaatgcttcttgattttattttttcagagagttgttagttctctgggtttctactaaggggtttagccataactgtgcatagaaaaataattatctgtaaaaaatgaaggggataatatatgataaattatgttctgatatcctcctacagtagtttaaattgacagaaaaatttgaatgttttcttcttaacccagtcttaggctggtattccctttttatatatatctatattacttttcacctctttttcactttactttagagaactattaatatactactggcttcatgaccctgtagcatctttggccactttaatctagggtgacctagcaatcctgcagcacagggcagagagtactgtcttaggaattattaggagttgattcctgagaaacaacacatttttccccatgaacggtgctgttctgaagtcttcaaatttttccctctaataggaaacagtataaattttaattaaaaaaaaaaggcaaactaaaatttcttgaaatatcacttctccctgatctgcagtgagtataaattcacttgtcacctcagtgctttacagtttgaagtggtcacttacctgatggttcccacaagccttaggctttacagggttgtatcattgacttaaaatgaagaattaacttgtgttacatctataaagagcaaaataacacactccagaacttggcagttgtagcattagttatacagttttgggtgttcttgccacccgtgggatgcctgcttctcactaccacctgtgtctggacacatgcttatgtctcattttccttttggcatgtggaaagctgtcaatgcagtgtaaggccaacgtgtgtgtggcttctatgtgttgagataatgttttggtatccttgtccgtttcatttattttttaagtgtacaaaaaataacctgttaattgttgaaggctacttttctgttcttttttttttttttttctatcctgtacatttagttgaactgtgcggaattgtggtgttggttttgtttacacagccagatttttccttctttttgttttgngatgatcttcctttgttctttgaatgtgctcttttgtctttttctcttttttctcatgttttcttccctccacctccacccctttctttctttctctctctgattgagaggcattgaattacgttttcagtagtacaggcttcttgccgatatgaagggaacttttcagaaagagacctactctgggtcatttaattttgaatacagttttcaatcgttcaagttttggatggtttatatctaatgtgtgtttcatttttttggaaagctatattttgtatttaggaaatggtatactattttgctatttgtactgagtgagtacattggcataaatatagaaatttatatatatacatatatataaactattcttttttgccacacatttttgtggtaaatttgtgagtttgtctgatgttctaccacaacgtggcgtctgataacagtgagggggggtggggtttgttatgtctttattgagtatttaagtatcttttgaaacaaatgacctgttcatctgtggccattccatcaggcagttagttccttgatgtcagtagtgggctaaaggcagcttactgtgtgtttgctggagctttcactcagccaagtgttagagtcaggaaacccattgaggcaatggcgtcaaatggtgtttcacaagaatgagccattcagtctttgctcactatatatttaatattttattattgttgttattgttattattaattggctttctgtattctatgccttttatttataaagacactaagaaaacccatgtttgtaattttaataacatttttcccatcttgtaatatccagagctactttataaattctctgaaccaaaagtattttcctcagtgtatctcttctcccccagcccctattgggaaaaattacccagtatagttcaggttatgaggaggatcagccacacaatccagtgcttcagtttgaaaatgtaaaattctaaccctaaagtagggttggttgaaatttcagacaaagcaaacccagcaggtataaaaagtagtataaatacaaatctgtaagttatttttgaattttctgaacttttttctaagagattacataggagactaaagaaatctatctgttcaagttctaattaggatgattgttaatactgcactgtggatgaagtggcgactggcttgtgtgctgacttctgtggtttagcaagaggtttattgttatcaaatgctaattggcaatgccaagtcactgggaccaattttctgttttataatatctaagtttagaacagaatatatacctgaactgtagtggtttgatcggatggagacagaaaacccgatttttattctcataaattttgtggttatttatacaagggctgtgctatgctaccatattcttgttcaataataataggtttgttgttttttttacattgttaaatgttccttacccctaaaggtcaatgttaagtacaacattctgaaaatacaatttggctacaaagagtattcatcttctttgaagctcagtggttgatatttgtgctaataatgcaatttcctgattactgttacaagttatagctacatatgggagagactcagtgagccagcaaaggccatagaaacaacaatttattaaatgtatttatggcagaaggacctaaataaactgtgagccaccttttcttctttatattgttacatttaagtgttcttgctttcagcaactcacattaatgcttggagcttatctctttctctctctctctctctctctctgtgtgtgtgtgtgtatgtgtgtgtgtgtgtgtgtgtgtttccttattgtcattccattatatatccacaccaacatgggtgacgataattcaaagtcatattttgcctctaagcttgatcatgttacctttatgattaaagtatcatgttatttagccaatgcaaatctgttttaaaacaaatagtttaaaaaaagaacaagtttttaagggctttattatagaagaagtattaatgaaggactttccttcctccctccctttcctcccctccctgcctcccttcttcccttccatctccccctcctccctgccttctttgtttctccttcccttattcctccctccctcctttctcccttccttcctttcttccattcatccttccttgccttttatttttattttttgtaatatcacatgtgctgtagtttggaattttattctagtgcatttcttgctcatcagaacctcagctaatctacctaggaaaaatagtatcaaaggaaatgagaaagttgtatctgagtccctccagaactaagataattctttttgaccatttaagcctttataaatgcgttttgaccatttaagcctttataaatgcttgttttaggaaagtgaatctgttagatgcatcaacaaataatgaccaggacaaaacgatttaataattaaagtctcaaatcaccatggttatacattttcaccagaaatagtaatcttacaatttttcatttttctgatgaagatttctgttccaatatctgtttcctaatagattttttaaattaattagctttcctctgctttatgaccacaggttttatccctaaccgagacagctgtcttatatctgcatgccttagactgtgtggagggactccatgaagaaagaccataggttagaaaaataactcatagtatataccctagtaagtgggttagtagaatctcataacatgtattaaaaagaggttttcttctctgcttgtttgtgtcactagagcaaaattgtagagataatgctcataatgcagtaaatatcagaataatatctacaatatcatttgtggatggtcccaggtcccagtgctctagttactttacttcttttttttttttgagatggagtcttgctctgtctctcaggctagagcagtgtgcgatctcagctcactgcagcctccacctcccaggttcaagcgattctcctgcctcagcctcccaagtagccaggattacaggcaccctccactaggcccggctaattttttttgtatttttttagtagagatggggttttgccatgttggccaggctggtttcgaactcctaacctccagtgatccacctgcctcggcgtcccaaagtgctaggattacaggcatgagccaccacatccggcctaattacttctttaatccccatttatttttatgccattctagcctcatttattaataaaattatgtttttactttctctttcaggaaattttttaaattaatattttatatctagatcnaatgctatggaaaagtgcctttttatcatttataatttcatttttcactatttccaaaaacacataaacaaatagtttcagtaggtcccagcttttactttttccatttaaaccttcttttctccatttcttccctttggcttaagaataaaagaaaaggtacattgctagaattgtttctttgggagagggtaaaagattacagaattagactgttcagcctttatataaactaaatttgtcttcatctcaaccagctaatggtaggtcttatctgaatactcatgagaattttagcatctgtgaaactccatgcaccagatgtgtgtaaatttcaggaagaaagtgttgaaagcattttctctgatgttaattagatggaaataaatcactaaaacatagtttaggtaaagcctgattatgccacttttttttaactagacagggcaaagttgtttatgttagtgtacttcttgtctatcctcagttaatttacctagacaaaaagtgtcaaaggaaatgagaaaaaggttatatctgactccctccagacctaagataattccttttgatcagatacagtcagatggagtgccttggtttttgttaattttgcctctattccagctccttaccacagcggtggtgcttaaagaaaggatcatcagcaacaggtcaggatagttctacctttgggatagggctgctttccccgtgctagtatttctgtgactgttagtggcactgaggactgcaaacttttatgcaatattcttaataccctattgatattatgcactttaatcattccaaagaagccaagaatgctgtatagtgatgattccttcctaatgaattcatcttaactatttagaatgttatgtcccttttcttttggatagccaacttggtataaatgttatatggatttttctaaaatgactatataggacttaagactttgaaatgtaatttacttataaggggaaataattatgctttagcacatcattttagaaacgtcacattttagaaacattcagcttgctaacctacatgtttgggaattcattaaaaccagttgtctatatattttgtgccatgtatataagaacattacaatatatctttttctacatatgtagtatgtgcaaccagtggttctcagagtatggttctcagcccaccagctagtatcagtatcacctgggaactagttagaaatgtaaattctttggccccatcccagacatactgagtcagaaactctggaatagggcccccgcaatctgttttcacaagccctccaggtgattctgatgcacactttaaagtttaggaaccactgggctaagactctgttgagatatagagtttttctttccactcagactgatatagttatacattgttcttcatgtaaattcagcttaacctggttatctataatcttttattggcaaaagttaattctcagtactgcctatagagatacagtgtattttatgtacatacacaattagtctaattcttgataattcagttaatttagtttggcattttcctaccacttactaaaaggtttacattaaatgactgatttaaatatataggtgcaatgttctatgtttattttaattgttatgacatttaagtagctaatataattgaccggtgctaaagtctcctgtttatccataaaatgggtacattatgggcagtgtaatacaagctttcttttcattgcctagtactttaccagcagaccacagttttgccctggctagaccaaccctcagaacaaaatcatcattccttgtatttatatttgtatctgagatagtaaacaagatggctggccaggtcaacatggcaccttaacttatttttttaataggtaaaacttcttcaaaagtagcttgctttgtataagaactaagctatcagtatagatatagctatccttggagcttatgtttcagacaagaattatttactaaaataaataataaacaagataatgcattatacaatttgggcatttctcgtttctcaagtgtatgcatcatggtaaatataaactaaccacaagataggtagattgattcatttcattttaatctccttgtgtaattcagtacctccataattgttctaatcttcttcccactgtttacaaattaccagttaattaactcgtgaaagaaaaattcacatatcagaataaaaataaatgtatactcactttataaaaatcaccactgctgtctttccttaatactagcagtggaaatgtaagtggcttactctacaaattttggtgctggcaaatacataggcaaactgttgggagctgctctagttacattcctcccttcttattccctttttctcttcctcactttattgcataacatattcctgtacccaaagcattctaccacagttctatttgactcccacttgtaataactcctttaaaaaattccatgtttaaccatatgaccctgcttgcttactcatattctccctccctctccccttcctttctctctcttccagaagtcatttgcctggtttgaaatattttgtagggattgcttattatattattttagctgatgaacctcaggacaacgtctacacacacacacatacatacacgcacacaaaatctcagctgttgaagagtgggcttggaatcagacttctgtgtccagtaaaaaactcctgcactgaagtcattgtgacttgagtagttacagactgattccagtgaacttgatctaatttcttttgatctaatgaatgtgtctgcttaccttgtttccttttaattgataagctccaagtagttgctaattttttgacaactttaaatgagtttcattcacttcttttacttaatgttttaagtatagtaccaataatttcattaacctgttctcaagtggtttagctaccattctgccatttttaatttttatttaattttatttgcttgagcacactgatcaaccactgaactgccttcttccattgtcctgcaatgatataagggttacatttttgtgtatatggctttcatagttgggatttcagagcactgataccagatattttcagtttgttctctgggggaatttcatttgcatctatgtttttagctatctgtgataacttgttaaatattaaaaagatattttgcttctattggaacatttgtatactcgcaactatatttctgtaaacagctgcagtcaaaaataaaacactgaaagttttcattttgcagtggaaaaaag

SEQ ID NO: 350842 - DNA, 12608 bp, Homo sapiens
  misc_feature (5977)..(5977): n is a, c, g, or t
  misc_feature (9303)..(9303): n is a, c, g, or t
cagaggccaaggtaggaagattacttgagtccagaaatttgagatgataaatatccattggctaataattaaatgcatcatctatagttattgctgaacagatatgggcagcacagtgagaagatttcttgtctctacaaaaaaattaaaacaggccaggcgcagtggctcacgcctgtaatcccagcactttaggaggccaaggtgggcagataacctgaggccaggctggtctcgaactgctggcctcaagtgagccacctgcctcggcctcccaaagtgctgggattgcaggcatgagccaccacacttggcctttcagcagcatattgactgacaacaacaacaaaaatttatgaagggagcgatccaacttatagaccatgtgccattttaaaagcttctttatagccaagatttcttctcgatatcaaattaagaaatttaacagctatgctttctgaagactgtttccatagagcttccaagtggtagtaaacttttaaatcaggatttggctatgtgctcaactcagaagactgtcattagcaatagcagtaggtaccactgagtgccactgcggactcaagtagacaaaaaaagaagaaagaaaagcaatcaagggggaaaggtagatatagtgaagtggtagaatcttgctatatgttgcctctaggtataaatctagaactaactactcctgaaaatggaggtagtaggaggtgggaaataatttttcattttgcttgggaaatttggtttgtaaacctaaaatagcccttatttctggggaaaaaaaaaaagatgtttaaagtccagtctaaaagagaattgtgtccatgtgtcaacttgtcatattcaagttttctaattaatttagttttcttttaatttagaaaagcaaaatttattaatcactgggtggtattttctaatgagaagcttgaacttagtttaagaaagaagtgctctgacaatctcatagtccttaagaagttctgagactatattgtcagatagctaaatgctaagaggagagtgtagtttgtaattgagtagctttatcctcctggagatttttaagctgtatcctataatatactcttggtcaggttgggtagtatgattcaaggcacttggaaccgtcttggggaatatagcttggtaattgaactgcttaagcttattattaatatttaagctatagttccaggcccattccagaggtcccccagccaatgcacttcataaaagggaagatatatcttaatataccaggtttgtatctcatgctaccattgtagcatcaaaaaaatagacatttaaatcatggctaataacaaattttagaatgaaatagttggtaaattttgtgattttaaacttttctttttgtgtgtgtgtatatgcagcaatgaaaactactggatgtaatttagataaggtaaatattatccctaatgccctgatgactccactcataccaagcagtatgattaagagtgaagatgttactccaatggaagtaacagcagaaaaaagatcttccactatttttaagactacaaagtctgttggatcaactcagcaaacattagaaaacatctcaaacatagcaggaaatggctctttttcatcaccatcatcttcccacctaccttctgaaaatgaaaaacagcagcagattcagcccaaggcatacaacccagagaccctgacaactattcaaacccaggacatctcacagcctggtacttttccagcagtttctgcttctagtcagctgcccaacagcgatgcactattgcagcaggctacacagtttcagacaagagaaactcagtctagagagatattacagtcagatggtacagtggttaatttgtcacaactgactgaggcatcacaacaacagcagcagtcaccactacaagaacaagcacagactttacagcagcagatttcatcaaatatttttccatcaccaaatagtgtgagtcagcttcagaatactattcagcagctgcaagcagggagtttcacaggcagtactgctagtggcagcagtggaagtgttgacttggtccaacaagttttagaggcacagcagcagttatcttcagttttattttctgctccagatggtaatgagaatgttcaagagcagcttagtgcagatatttttcaacaagtcagtcaaattcagagtggtgtaagccctggaatgttttcctcaacagagccaacagtccataccagaccagataatttattacctggaagagctgaaagtgttcatccacagtctgaaaacacgttatctaatcaacagcagcagcagcagcagcaacagcaagtgatggaatcttcagccgcaatggtgatggagatgcaacagagtatctgccaggcagctgcccagattcagtcagagttattcccttcaactgcttcagcaaatggaaaccttcagcaatcgccagtttaccagcagacttctcacatgatgagtgcattgtctaccaatgaggatatgcaaatgcagtgtgaattgttttcttctcctcctgcagtttctggaaatgaaacttctacaactaccacacagcaggttgcaacccctggcactaccatgtttcagacatcaagttcaggagatggagaagaaactggaacacaagcaaaacagattcagaacagtgtctttcagaccatggtccaaatgcaacatagtggggacaatcaacctcaagttaaccttttttcatccacaaaaagtatgatgagtgttcagaatagtggtacccaacaacaaggtaatggtttattccagcaagggaatgagatgatgtcacttcaatctggaaattttttgcagcagtcttctcattcacaggcccaactttttcatcctcaaaatcctattgccgatgctcagaacctttcccaggaaactcaaggttctctctttcatagtccaaatcctattgtccacagtcagacttctacaacctcctctgaacaaatgcagcctccaatgtttcactctcaaagtaccattgctgtgttacagggctcttcagttcctcaagaccagcagtcaaccaacatatttctttcccagagtcccatgaataatcttcagactaacacagtagcccaagaagcattttttgcagcaccgaactcaatttctccacttcagtcaacatcaaacagtgaacaacaagctgctttccaacagcaagctccaatatcacacatccagactcctatgctttcccaagaacaggcacaacccccgcagcagggtttatttcagcctcaggtggccctgggctcccttccacctaatccaatgcctcaaagccaacaaggaaccatgttccagtcacagcactcaatagttgccatgcagagtaactctccatcccaggaacagcagcagcagcagcaacagcagcagcaacagcagcagcaacaacaacagagcattttattcagtaatcagaataccatggctacaatggcgtctccaaagcaaccaccaccaaacatgatattcaacccaaatcaaaatccaatggctaatcaggagcaacagaaccagtcaatttttcaccaacaaagtaacatggccccaatgaatcaagagcaacagcccatgcaatttcagagtcagtccacagtttcctcacttcagaacccaggtcctacccagtcggaatcatcacagacccccttgttccatagctctcctcagattcagttggtacaagggtcacctagttctcaagagcagcaagtaactctcttcttatctccagcatccatgtctgccttgcagaccagtataaatcaacaagatatgcaacagtctcctctttattcccctcagaacaacatgcctggaattcaaggagccacatcttcgcctcaaccacaggctactttatttcacaacacagcaggaggcacaatgaaccaactgcagaattctcctggctcatctcagcagacatcaggaatgttcttatttggcattcaaaataactgtagtcagcttttaacctctggaccagctacattgcctgatcagttgatggccataagtcagccaggccaaccacaaaacgagggccagccacctgtgacaacacttctttctcagcaaatgccagagaattctccactggcatcctctataaacaccaaccagaacatcgaaaagattgatttgcttgtttcattgcaaaaccaagggaacaacttgactggctccttttaactggatataaattccacgaagaaaatcctgattccaagatgtcctgagatcttgtggttccatgagaattattactttaaaaacaaaacaaaatataaaaaactgtgtttgagtaaactgatagattttactctgactgcaaaagagcacacctatgctgcttgttgcagtaactaaccaccaatgttaacatcttcatattttatattcctaataacagtgatgactgagaatctatttgagtttccagctggcagaattaattgttattattttcctaggcgcaatttccttaaacgtacagtttaaattcaaggctggaccactcagttattattgctattagaaaataatatatcatgtttacttttgttcttcattattttctttcctgcattgttttagtcaagtaatggcttttgaaaaagtaaagttcaataataactaaggctgtgatttttttcaatataaaaggcacagctgttggccaaagtgaaggaatcttttttcagttttattggagaaactgaagggtaacattctaacaagtaaactgtatgtgcagataaaagtactcttgatttaacacaaaggcagatgatacacttataaaactgggaacagctggaatgcttcttgattttattttttcagagagttgttagttctctgggtttctactaaggggtttagccataactgtgcatagaaaaataattatctgtaaaaaatgaaggggataatatatgataaattatgttctgatatcctcctacagtagtttaaattgacagaaaaatttgaatgttttcttcttaacccagtcttaggctggtattccctttttatatatatctatattacttttcacctctttttcactttactttagagaactattaatatactactggcttcatgaccctgtagcatctttggccactttaatctagggtgacctagcaatcctgcagcacagggcagagagtactgtcttaggaattattaggagttgattcctgagaaacaacacatttttccccatgaacggtgctgttctgaagtcttcaaatttttccctctaataggaaacagtataaattttaattaaaaaaaaaaggcaaactaaaatttcttgaaatatcacttctccctgatctgcagtgagtataaattcacttgtcacctcagtgctttacagtttgaagtggtcacttacctgatggttcccacaagccttaggctttacagggttgtatcattgacttaaaatgaagaattaacttgtgttacatctataaagagcaaaataacacactccagaacttggcagttgtagcattagttatacagttttgggtgttcttgccacccgtgggatgcctgcttctcactaccacctgtgtctggacacatgcttatgtctcattttccttttggcatgtggaaagctgtcaatgcagtgtaaggccaacgtgtgtgtggcttctatgtgttgagataatgttttggtatccttgtccgtttcatttattttttaagtgtacaaaaaataacctgttaattgttgaaggctacttttctgttcttttttttttttttttctatcctgtacatttagttgaactgtgcggaattgtggtgttggttttgtttacacagccagatttttccttctttttgttttgngatgatcttcctttgttctttgaatgtgctcttttgtctttttctcttttttctcatgttttcttccctccacctccacccctttctttctttctctctctgattgagaggcattgaattacgttttcagtagtacaggcttcttgccgatatgaagggaacttttcagaaagagacctactctgggtcatttaattttgaatacagttttcaatcgttcaagttttggatggtttatatctaatgtgtgtttcatttttttggaaagctatattttgtatttaggaaatggtatactattttgctatttgtactgagtgagtacattggcataaatatagaaatttatatatatacatatatataaactattcttttttgccacacatttttgtggtaaatttgtgagtttgtctgatgttctaccacaacgtggcgtctgataacagtgagggggggtggggtttgttatgtctttattgagtatttaagtatcttttgaaacaaatgacctgttcatctgtggccattccatcaggcagttagttccttgatgtcagtagtgggctaaaggcagcttactgtgtgtttgctggagctttcactcagccaagtgttagagtcaggaaacccattgaggcaatggcgtcaaatggtgtttcacaagaatgagccattcagtctttgctcactatatatttaatattttattattgttgttattgttattattaattggctttctgtattctatgccttttatttataaagacactaagaaaacccatgtttgtaattttaataacatttttcccatcttgtaatatccagagctactttataaattctctgaaccaaaagtattttcctcagtgtatctcttctcccccagcccctattgggaaaaattacccagtatagttcaggttatgaggaggatcagccacacaatccagtgcttcagtttgaaaatgtaaaattctaaccctaaagtagggttggttgaaatttcagacaaagcaaacccagcaggtataaaaagtagtataaatacaaatctgtaagttatttttgaattttctgaacttttttctaagagattacataggagactaaagaaatctatctgttcaagttctaattaggatgattgttaatactgcactgtggatgaagtggcgactggcttgtgtgctgacttctgtggtttagcaagaggtttattgttatcaaatgctaattggcaatgccaagtcactgggaccaattttctgttttataatatctaagtttagaacagaatatatacctgaactgtagtggtttgatcggatggagacagaaaacccgatttttattctcataaattttgtggttatttatacaagggctgtgctatgctaccatattcttgttcaataataataggtttgttgttttttttacattgttaaatgttccttacccctaaaggtcaatgttaagtacaacattctgaaaatacaatttggctacaaagagtattcatcttctttgaagctcagtggttgatatttgtgctaataatgcaatttcctgattactgttacaagttatagctacatatgggagagactcagtgagccagcaaaggccatagaaacaacaatttattaaatgtatttatggcagaaggacctaaataaactgtgagccaccttttcttctttatattgttacatttaagtgttcttgctttcagcaactcacattaatgcttggagcttatctctttctctctctctctctctctctctgtgtgtgtgtgtgtatgtgtgtgtgtgtgtgtgtgtgtttccttattgtcattccattatatatccacaccaacatgggtgacgataattcaaagtcatattttgcctctaagcttgatcatgttacctttatgattaaagtatcatgttatttagccaatgcaaatctgttttaaaacaaatagtttaaaaaaagaacaagtttttaagggctttattatagaagaagtattaatgaaggactttccttcctccctccctttcctcccctccctgcctcccttcttcccttccatctccccctcctccctgccttctttgtttctccttcccttattcctccctccctcctttctcccttccttcctttcttccattcatccttccttgccttttatttttattttttgtaatatcacatgtgctgtagtttggaattttattctagtgcatttcttgctcatcagaacctcagctaatctacctaggaaaaatagtatcaaaggaaatgagaaagttgtatctgagtccctccagaactaagataattctttttgaccatttaagcctttataaatgcgttttgaccatttaagcctttataaatgcttgttttaggaaagtgaatctgttagatgcatcaacaaataatgaccaggacaaaacgatttaataattaaagtctcaaatcaccatggttatacattttcaccagaaatagtaatcttacaatttttcatttttctgatgaagatttctgttccaatatctgtttcctaatagattttttaaattaattagctttcctctgctttatgaccacaggttttatccctaaccgagacagctgtcttatatctgcatgccttagactgtgtggagggactccatgaagaaagaccataggttagaaaaataactcatagtatataccctagtaagtgggttagtagaatctcataacatgtattaaaaagaggttttcttctctgcttgtttgtgtcactagagcaaaattgtagagataatgctcataatgcagtaaatatcagaataatatctacaatatcatttgtggatggtcccaggtcccagtgctctagttactttacttcttttttttttttgagatggagtcttgctctgtctctcaggctagagcagtgtgcgatctcagctcactgcagcctccacctcccaggttcaagcgattctcctgcctcagcctcccaagtagccaggattacaggcaccctccactaggcccggctaattttttttgtatttttttagtagagatggggttttgccatgttggccaggctggtttcgaactcctaacctccagtgatccacctgcctcggcgtcccaaagtgctaggattacaggcatgagccaccacatccggcctaattacttctttaatccccatttatttttatgccattctagcctcatttattaataaaattatgtttttactttctctttcaggaaattttttaaattaatattttatatctagatcnaatgctatggaaaagtgcctttttatcatttataatttcatttttcactatttccaaaaacacataaacaaatagtttcagtaggtcccagcttttactttttccatttaaaccttcttttctccatttcttccctttggcttaagaataaaagaaaaggtacattgctagaattgtttctttgggagagggtaaaagattacagaattagactgttcagcctttatataaactaaatttgtcttcatctcaaccagctaatggtaggtcttatctgaatactcatgagaattttagcatctgtgaaactccatgcaccagatgtgtgtaaatttcaggaagaaagtgttgaaagcattttctctgatgttaattagatggaaataaatcactaaaacatagtttaggtaaagcctgattatgccacttttttttaactagacagggcaaagttgtttatgttagtgtacttcttgtctatcctcagttaatttacctagacaaaaagtgtcaaaggaaatgagaaaaaggttatatctgactccctccagacctaagataattccttttgatcagatacagtcagatggagtgccttggtttttgttaattttgcctctattccagctccttaccacagcggtggtgcttaaagaaaggatcatcagcaacaggtcaggatagttctacctttgggatagggctgctttccccgtgctagtatttctgtgactgttagtggcactgaggactgcaaacttttatgcaatattcttaataccctattgatattatgcactttaatcattccaaagaagccaagaatgctgtatagtgatgattccttcctaatgaattcatcttaactatttagaatgttatgtcccttttcttttggatagccaacttggtataaatgttatatggatttttctaaaatgactatataggacttaagactttgaaatgtaatttacttataaggggaaataattatgctttagcacatcattttagaaacgtcacattttagaaacattcagcttgctaacctacatgtttgggaattcattaaaaccagttgtctatatattttgtgccatgtatataagaacattacaatatatctttttctacatatgtagtatgtgcaaccagtggttctcagagtatggttctcagcccaccagctagtatcagtatcacctgggaactagttagaaatgtaaattctttggccccatcccagacatactgagtcagaaactctggaatagggcccccgcaatctgttttcacaagccctccaggtgattctgatgcacactttaaagtttaggaaccactgggctaagactctgttgagatatagagtttttctttccactcagactgatatagttatacattgttcttcatgtaaattcagcttaacctggttatctataatcttttattggcaaaagttaattctcagtactgcctatagagatacagtgtattttatgtacatacacaattagtctaattcttgataattcagttaatttagtttggcattttcctaccacttactaaaaggtttacattaaatgactgatttaaatatataggtgcaatgttctatgtttattttaattgttatgacatttaagtagctaatataattgaccggtgctaaagtctcctgtttatccataaaatgggtacattatgggcagtgtaatacaagctttcttttcattgcctagtactttaccagcagaccacagttttgccctggctagaccaaccctcagaacaaaatcatcattccttgtatttatatttgtatctgagatagtaaacaagatggctggccaggtcaacatggcaccttaacttatttttttaataggtaaaacttcttcaaaagtagcttgctttgtataagaactaagctatcagtatagatatagctatccttggagcttatgtttcagacaagaattatttactaaaataaataataaacaagataatgcattatacaatttgggcatttctcgtttctcaagtgtatgcatcatggtaaatataaactaaccacaagataggtagattgattcatttcattttaatctccttgtgtaattcagtacctccataattgttctaatcttcttcccactgtttacaaattaccagttaattaactcgtgaaagaaaaattcacatatcagaataaaaataaatgtatactcactttataaaaatcaccactgctgtctttccttaatactagcagtggaaatgtaagtggcttactctacaaattttggtgctggcaaatacataggcaaactgttgggagctgctctagttacattcctcccttcttattccctttttctcttcctcactttattgcataacatattcctgtacccaaagcattctaccacagttctatttgactcccacttgtaataactcctttaaaaaattccatgtttaaccatatgaccctgcttgcttactcatattctccctccctctccccttcctttctctctcttccagaagtcatttgcctggtttgaaatattttgtagggattgcttattatattattttagctgatgaacctcaggacaacgtctacacacacacacatacatacacgcacacaaaatctcagctgttgaagagtgggcttggaatcagacttctgtgtccagtaaaaaactcctgcactgaagtcattgtgacttgagtagttacagactgattccagtgaacttgatctaatttcttttgatctaatgaatgtgtctgcttaccttgtttccttttaattgataagctccaagtagttgctaattttttgacaactttaaatgagtttcattcacttcttttacttaatgttttaagtatagtaccaataatttcattaacctgttctcaagtggtttagctaccattctgccatttttaatttttatttaattttatttgcttgagcacactgatcaaccactgaactgccttcttccattgtcctgcaatgatataagggttacatttttgtgtatatggctttcatagttgggatttcagagcactgataccagatattttcagtttgttctctgggggaatttcatttgcatctatgtttttagctatctgtgataacttgttaaatattaaaaagatattttgcttctattggaacatttgtatactcgcaactatatttctgtaaacagctgcagtcaaaaataaaacactgaaagttttcattttgcagtggaaaaaag

SEQ ID NO: 350843 - DNA, 11726 bp, Homo sapiens
  misc_feature (5095)..(5095): n is a, c, g, or t
  misc_feature (8421)..(8421): n is a, c, g, or t
ctgagtttagtatgttaaaagaagggaccgaggtcagtgtggctacagtgtagtgagctagaagagcaggaatgagatgaagttgacagggcagggatcttgaccttgtaagccattataaaacacttggattttaccttaaaagcagtgttaagattaatatcctgatgcctgtgaacctgagctttaaaatgcattcttttttttttaatcactttttaaactttacagctaacaggaaatatacttcatttaaaatttttaaatttaagtattgcttcttttccaactcttgtgcttttctttacattagaatcatcttattgtgaaggttcctccctatcatgaccaacatataactttgcctgtgtcagtgggaatatatgtagtgacaaatgctggaagatctcatgatgttcaaccattcacttacactccagacccagcagcagctggtgctttgaatgtaaatgtgaagaaggaaatatctagtccagcaagaccttgctcttttgaagaggccatgaaagcaatgaaaactactggatgtaatttagataaggtaaatattatccctaatgccctgatgactccactcataccaagcagtatgattaagagtgaagatgttactccaatggaagtaacagcagaaaaaagatcttccactatttttaagactacaaagtctgttggatcaactcagcaaacattagaaaacatctcaaacatagcaggaaatggctctttttcatcaccatcatcttcccacctaccttctgaaaatgaaaaacagcagcagattcagcccaaggcatacaacccagagaccctgacaactattcaaacccaggacatctcacagcctggtacttttccagcagtttctgcttctagtcagctgcccaacagcgatgcactattgcagcaggctacacagtttcagacaagagaaactcagtctagagagatattacagtcagatggtacagtggttaatttgtcacaactgactgaggcatcacaacaacagcagcagtcaccactacaagaacaagcacagactttacagcagcagatttcatcaaatatttttccatcaccaaatagtgtgagtcagcttcagaatactattcagcagctgcaagcagggagtttcacaggcagtactgctagtggcagcagtggaagtgttgacttggtccaacaagttttagaggcacagcagcagttatcttcagttttattttctgctccagatggtaatgagaatgttcaagagcagcttagtgcagatatttttcaacaagtcagtcaaattcagagtggtgtaagccctggaatgttttcctcaacagagccaacagtccataccagaccagataatttattacctggaagagctgaaagtgttcatccacagtctgaaaacacgttatctaatcaacagcagcagcagcagcagcaacagcaagtgatggaatcttcagccgcaatggtgatggagatgcaacagagtatctgccaggcagctgcccagattcagtcagagttattcccttcaactgcttcagcaaatggaaaccttcagcaatcgccagtttaccagcagacttctcacatgatgagtgcattgtctaccaatgaggatatgcaaatgcagtgtgaattgttttcttctcctcctgcagtttctggaaatgaaacttctacaactaccacacagcaggttgcaacccctggcactaccatgtttcagacatcaagttcaggagatggagaagaaactggaacacaagcaaaacagattcagaacagtgtctttcagaccatggtccaaatgcaacatagtggggacaatcaacctcaagttaaccttttttcatccacaaaaagtatgatgagtgttcagaatagtggtacccaacaacaaggtaatggtttattccagcaagggaatgagatgatgtcacttcaatctggaaattttttgcagcagtcttctcattcacaggcccaactttttcatcctcaaaatcctattgccgatgctcagaacctttcccaggaaactcaaggttctctctttcatagtccaaatcctattgtccacagtcagacttctacaacctcctctgaacaaatgcagcctccaatgtttcactctcaaagtaccattgctgtgttacagggctcttcagttcctcaagaccagcagtcaaccaacatatttctttcccagagtcccatgaataatcttcagactaacacagtagcccaagaagcattttttgcagcaccgaactcaatttctccacttcagtcaacatcaaacagtgaacaacaagctgctttccaacagcaagctccaatatcacacatccagactcctatgctttcccaagaacaggcacaacccccgcagcagggtttatttcagcctcaggtggccctgggctcccttccacctaatccaatgcctcaaagccaacaaggaaccatgttccagtcacagcactcaatagttgccatgcagagtaactctccatcccaggaacagcagcagcagcagcaacagcagcagcaacagcagcagcaacaacaacagagcattttattcagtaatcagaataccatggctacaatggcgtctccaaagcaaccaccaccaaacatgatattcaacccaaatcaaaatccaatggctaatcaggagcaacagaaccagtcaatttttcaccaacaaagtaacatggccccaatgaatcaagagcaacagcccatgcaatttcagagtcagtccacagtttcctcacttcagaacccaggtcctacccagtcggaatcatcacagacccccttgttccatagctctcctcagattcagttggtacaagggtcacctagttctcaagagcagcaagtaactctcttcttatctccagcatccatgtctgccttgcagaccagtataaatcaacaagatatgcaacagtctcctctttattcccctcagaacaacatgcctggaattcaaggagccacatcttcgcctcaaccacaggctactttatttcacaacacagcaggaggcacaatgaaccaactgcagaattctcctggctcatctcagcagacatcaggaatgttcttatttggcattcaaaataactgtagtcagcttttaacctctggaccagctacattgcctgatcagttgatggccataagtcagccaggccaaccacaaaacgagggccagccacctgtgacaacacttctttctcagcaaatgccagagaattctccactggcatcctctataaacaccaaccagaacatcgaaaagattgatttgcttgtttcattgcaaaaccaagggaacaacttgactggctccttttaactggatataaattccacgaagaaaatcctgattccaagatgtcctgagatcttgtggttccatgagaattattactttaaaaacaaaacaaaatataaaaaactgtgtttgagtaaactgatagattttactctgactgcaaaagagcacacctatgctgcttgttgcagtaactaaccaccaatgttaacatcttcatattttatattcctaataacagtgatgactgagaatctatttgagtttccagctggcagaattaattgttattattttcctaggcgcaatttccttaaacgtacagtttaaattcaaggctggaccactcagttattattgctattagaaaataatatatcatgtttacttttgttcttcattattttctttcctgcattgttttagtcaagtaatggcttttgaaaaagtaaagttcaataataactaaggctgtgatttttttcaatataaaaggcacagctgttggccaaagtgaaggaatcttttttcagttttattggagaaactgaagggtaacattctaacaagtaaactgtatgtgcagataaaagtactcttgatttaacacaaaggcagatgatacacttataaaactgggaacagctggaatgcttcttgattttattttttcagagagttgttagttctctgggtttctactaaggggtttagccataactgtgcatagaaaaataattatctgtaaaaaatgaaggggataatatatgataaattatgttctgatatcctcctacagtagtttaaattgacagaaaaatttgaatgttttcttcttaacccagtcttaggctggtattccctttttatatatatctatattacttttcacctctttttcactttactttagagaactattaatatactactggcttcatgaccctgtagcatctttggccactttaatctagggtgacctagcaatcctgcagcacagggcagagagtactgtcttaggaattattaggagttgattcctgagaaacaacacatttttccccatgaacggtgctgttctgaagtcttcaaatttttccctctaataggaaacagtataaattttaattaaaaaaaaaaggcaaactaaaatttcttgaaatatcacttctccctgatctgcagtgagtataaattcacttgtcacctcagtgctttacagtttgaagtggtcacttacctgatggttcccacaagccttaggctttacagggttgtatcattgacttaaaatgaagaattaacttgtgttacatctataaagagcaaaataacacactccagaacttggcagttgtagcattagttatacagttttgggtgttcttgccacccgtgggatgcctgcttctcactaccacctgtgtctggacacatgcttatgtctcattttccttttggcatgtggaaagctgtcaatgcagtgtaaggccaacgtgtgtgtggcttctatgtgttgagataatgttttggtatccttgtccgtttcatttattttttaagtgtacaaaaaataacctgttaattgttgaaggctacttttctgttcttttttttttttttttctatcctgtacatttagttgaactgtgcggaattgtggtgttggttttgtttacacagccagatttttccttctttttgttttgngatgatcttcctttgttctttgaatgtgctcttttgtctttttctcttttttctcatgttttcttccctccacctccacccctttctttctttctctctctgattgagaggcattgaattacgttttcagtagtacaggcttcttgccgatatgaagggaacttttcagaaagagacctactctgggtcatttaattttgaatacagttttcaatcgttcaagttttggatggtttatatctaatgtgtgtttcatttttttggaaagctatattttgtatttaggaaatggtatactattttgctatttgtactgagtgagtacattggcataaatatagaaatttatatatatacatatatataaactattcttttttgccacacatttttgtggtaaatttgtgagtttgtctgatgttctaccacaacgtggcgtctgataacagtgagggggggtggggtttgttatgtctttattgagtatttaagtatcttttgaaacaaatgacctgttcatctgtggccattccatcaggcagttagttccttgatgtcagtagtgggctaaaggcagcttactgtgtgtttgctggagctttcactcagccaagtgttagagtcaggaaacccattgaggcaatggcgtcaaatggtgtttcacaagaatgagccattcagtctttgctcactatatatttaatattttattattgttgttattgttattattaattggctttctgtattctatgccttttatttataaagacactaagaaaacccatgtttgtaattttaataacatttttcccatcttgtaatatccagagctactttataaattctctgaaccaaaagtattttcctcagtgtatctcttctcccccagcccctattgggaaaaattacccagtatagttcaggttatgaggaggatcagccacacaatccagtgcttcagtttgaaaatgtaaaattctaaccctaaagtagggttggttgaaatttcagacaaagcaaacccagcaggtataaaaagtagtataaatacaaatctgtaagttatttttgaattttctgaacttttttctaagagattacataggagactaaagaaatctatctgttcaagttctaattaggatgattgttaatactgcactgtggatgaagtggcgactggcttgtgtgctgacttctgtggtttagcaagaggtttattgttatcaaatgctaattggcaatgccaagtcactgggaccaattttctgttttataatatctaagtttagaacagaatatatacctgaactgtagtggtttgatcggatggagacagaaaacccgatttttattctcataaattttgtggttatttatacaagggctgtgctatgctaccatattcttgttcaataataataggtttgttgttttttttacattgttaaatgttccttacccctaaaggtcaatgttaagtacaacattctgaaaatacaatttggctacaaagagtattcatcttctttgaagctcagtggttgatatttgtgctaataatgcaatttcctgattactgttacaagttatagctacatatgggagagactcagtgagccagcaaaggccatagaaacaacaatttattaaatgtatttatggcagaaggacctaaataaactgtgagccaccttttcttctttatattgttacatttaagtgttcttgctttcagcaactcacattaatgcttggagcttatctctttctctctctctctctctctctctgtgtgtgtgtgtgtatgtgtgtgtgtgtgtgtgtgtgtttccttattgtcattccattatatatccacaccaacatgggtgacgataattcaaagtcatattttgcctctaagcttgatcatgttacctttatgattaaagtatcatgttatttagccaatgcaaatctgttttaaaacaaatagtttaaaaaaagaacaagtttttaagggctttattatagaagaagtattaatgaaggactttccttcctccctccctttcctcccctccctgcctcccttcttcccttccatctccccctcctccctgccttctttgtttctccttcccttattcctccctccctcctttctcccttccttcctttcttccattcatccttccttgccttttatttttattttttgtaatatcacatgtgctgtagtttggaattttattctagtgcatttcttgctcatcagaacctcagctaatctacctaggaaaaatagtatcaaaggaaatgagaaagttgtatctgagtccctccagaactaagataattctttttgaccatttaagcctttataaatgcgttttgaccatttaagcctttataaatgcttgttttaggaaagtgaatctgttagatgcatcaacaaataatgaccaggacaaaacgatttaataattaaagtctcaaatcaccatggttatacattttcaccagaaatagtaatcttacaatttttcatttttctgatgaagatttctgttccaatatctgtttcctaatagattttttaaattaattagctttcctctgctttatgaccacaggttttatccctaaccgagacagctgtcttatatctgcatgccttagactgtgtggagggactccatgaagaaagaccataggttagaaaaataactcatagtatataccctagtaagtgggttagtagaatctcataacatgtattaaaaagaggttttcttctctgcttgtttgtgtcactagagcaaaattgtagagataatgctcataatgcagtaaatatcagaataatatctacaatatcatttgtggatggtcccaggtcccagtgctctagttactttacttcttttttttttttgagatggagtcttgctctgtctctcaggctagagcagtgtgcgatctcagctcactgcagcctccacctcccaggttcaagcgattctcctgcctcagcctcccaagtagccaggattacaggcaccctccactaggcccggctaattttttttgtatttttttagtagagatggggttttgccatgttggccaggctggtttcgaactcctaacctccagtgatccacctgcctcggcgtcccaaagtgctaggattacaggcatgagccaccacatccggcctaattacttctttaatccccatttatttttatgccattctagcctcatttattaataaaattatgtttttactttctctttcaggaaattttttaaattaatattttatatctagatcnaatgctatggaaaagtgcctttttatcatttataatttcatttttcactatttccaaaaacacataaacaaatagtttcagtaggtcccagcttttactttttccatttaaaccttcttttctccatttcttccctttggcttaagaataaaagaaaaggtacattgctagaattgtttctttgggagagggtaaaagattacagaattagactgttcagcctttatataaactaaatttgtcttcatctcaaccagctaatggtaggtcttatctgaatactcatgagaattttagcatctgtgaaactccatgcaccagatgtgtgtaaatttcaggaagaaagtgttgaaagcattttctctgatgttaattagatggaaataaatcactaaaacatagtttaggtaaagcctgattatgccacttttttttaactagacagggcaaagttgtttatgttagtgtacttcttgtctatcctcagttaatttacctagacaaaaagtgtcaaaggaaatgagaaaaaggttatatctgactccctccagacctaagataattccttttgatcagatacagtcagatggagtgccttggtttttgttaattttgcctctattccagctccttaccacagcggtggtgcttaaagaaaggatcatcagcaacaggtcaggatagttctacctttgggatagggctgctttccccgtgctagtatttctgtgactgttagtggcactgaggactgcaaacttttatgcaatattcttaataccctattgatattatgcactttaatcattccaaagaagccaagaatgctgtatagtgatgattccttcctaatgaattcatcttaactatttagaatgttatgtcccttttcttttggatagccaacttggtataaatgttatatggatttttctaaaatgactatataggacttaagactttgaaatgtaatttacttataaggggaaataattatgctttagcacatcattttagaaacgtcacattttagaaacattcagcttgctaacctacatgtttgggaattcattaaaaccagttgtctatatattttgtgccatgtatataagaacattacaatatatctttttctacatatgtagtatgtgcaaccagtggttctcagagtatggttctcagcccaccagctagtatcagtatcacctgggaactagttagaaatgtaaattctttggccccatcccagacatactgagtcagaaactctggaatagggcccccgcaatctgttttcacaagccctccaggtgattctgatgcacactttaaagtttaggaaccactgggctaagactctgttgagatatagagtttttctttccactcagactgatatagttatacattgttcttcatgtaaattcagcttaacctggttatctataatcttttattggcaaaagttaattctcagtactgcctatagagatacagtgtattttatgtacatacacaattagtctaattcttgataattcagttaatttagtttggcattttcctaccacttactaaaaggtttacattaaatgactgatttaaatatataggtgcaatgttctatgtttattttaattgttatgacatttaagtagctaatataattgaccggtgctaaagtctcctgtttatccataaaatgggtacattatgggcagtgtaatacaagctttcttttcattgcctagtactttaccagcagaccacagttttgccctggctagaccaaccctcagaacaaaatcatcattccttgtatttatatttgtatctgagatagtaaacaagatggctggccaggtcaacatggcaccttaacttatttttttaataggtaaaacttcttcaaaagtagcttgctttgtataagaactaagctatcagtatagatatagctatccttggagcttatgtttcagacaagaattatttactaaaataaataataaacaagataatgcattatacaatttgggcatttctcgtttctcaagtgtatgcatcatggtaaatataaactaaccacaagataggtagattgattcatttcattttaatctccttgtgtaattcagtacctccataattgttctaatcttcttcccactgtttacaaattaccagttaattaactcgtgaaagaaaaattcacatatcagaataaaaataaatgtatactcactttataaaaatcaccactgctgtctttccttaatactagcagtggaaatgtaagtggcttactctacaaattttggtgctggcaaatacataggcaaactgttgggagctgctctagttacattcctcccttcttattccctttttctcttcctcactttattgcataacatattcctgtacccaaagcattctaccacagttctatttgactcccacttgtaataactcctttaaaaaattccatgtttaaccatatgaccctgcttgcttactcatattctccctccctctccccttcctttctctctcttccagaagtcatttgcctggtttgaaatattttgtagggattgcttattatattattttagctgatgaacctcaggacaacgtctacacacacacacatacatacacgcacacaaaatctcagctgttgaagagtgggcttggaatcagacttctgtgtccagtaaaaaactcctgcactgaagtcattgtgacttgagtagttacagactgattccagtgaacttgatctaatttcttttgatctaatgaatgtgtctgcttaccttgtttccttttaattgataagctccaagtagttgctaattttttgacaactttaaatgagtttcattcacttcttttacttaatgttttaagtatagtaccaataatttcattaacctgttctcaagtggtttagctaccattctgccatttttaatttttatttaattttatttgcttgagcacactgatcaaccactgaactgccttcttccattgtcctgcaatgatataagggttacatttttgtgtatatggctttcatagttgggatttcagagcactgataccagatattttcagtttgttctctgggggaatttcatttgcatctatgtttttagctatctgtgataacttgttaaatattaaaaagatattttgcttctattggaacatttgtatactcgcaactatatttctgtaaacagctgcagtcaaaaataaaacactgaaagttttcattttgcagtggaaaaaag

SEQ ID NO: 350844 - DNA, 13837 bp, Homo sapiens
  misc_feature (17)..(17): n is a, c, g, or t
  misc_feature (7206)..(7206): n is a, c, g, or t
  misc_feature (10532)..(10532): n is a, c, g, or t
tgcaacggaaacttttngctccacgaacagaaaagcaagagcaaaaactcagttaaatgcgttcttcctccatctttgcctagtccaaaaggaaaaaaaaagaaacagaaaaaagaaaaactgtttggaagagtagcgttgaggtttgctttttacctgtttttcctctagaacagccaggtggattcacatgatccaattttttaattgtcttctatgtcccactccgaataacccggatgccccagcacaatcagagagatcgttttttttaaaaaaaatttcagcctccaaaggtaggaggggagtgttaggggagaaagtactttaattaaaaatcaataactcgaggtttttgggatacggtttgccatttcctaattaagaaatgggtttgacagtccctttgtacacactgctatgcaaaccccaaagggttggcggctgtccgggcgatgacactccggtcccctgcgagaccccgggccagccaggcccgtccgccgccggcctctggggtccgtccccggctcgcgcagacctctcgcttctctcggctctgtctcctgcgctcagctctgctcggggccggccgcctcaggctcgccgccaccaggtcgttgcaaataccttttccctccccggggccccagcgcgcggccacctcccagcctccccccctcccaccctggcagcggggccctttcccggctcaggaacagcagcagcccgggccgcgccggcaggaagcgaggcccatgttgctgctgttccctggcgcgcctccccgccctccgggggccgccacggctcttccgcgctcccgggcacccccctccgcgcctgcgctgtgccccacgggggcggggctcagattcctgtcagcggcggcggcggtggcggcgaccgtcagttttcgctgaggagaaacacgaaacggaccctttggctctcccccttccccttccccgtcctgaacccctctcctggtcaccgagaatcagtccccgtggagttccccctccacctcgccatcgtttcctcggtcctcggcccagtggaagtcactaccctcgaggaggaggcagcggcagccgccctcgcgtcgccgcccccggttcggtgcccgcggtcccggagaggaggtgccgccgccaccgccgctccccccctcccgctgccctcgggccgggctgggtcgagctgcgatgccctcggacttcatctcattgctcagcgcggacctagacctggaatcgcccaagtccctctactcgcgagattctctgaagttacacccatcacagaattttcatagagctggactattggaagaatctgtctatgatcttctcccaaaggagttacagttacctccatctagagaaacatctgtagcatcaatgagtcagacaagcggtggtgaggcaggctcgcctcctccagctgttgttgctgctgatgcttcttcagctccctcctcttcctccatgggcggtgcttgcagctcctttaccacctcttccagccctaccatttattctacctcagtcaccgacagcaaggctatgcaagtggagagctgctcctcagccgtgggggtaagtaacagaggggtaagtgaaaagcagttaaccagtaacacagttcagcagcatccatcaacaccgaagaggcacacagtcttgtacatctcaccaccacctgaggacttgctggataacagtcggatgtcctgccaggatgaggggtgtggattggaatctgagcagagctgcagtatgtggatggaggattccccctccaacttcagtaacatgagcaccagttcctacaatgataacactgaggtacctcgtaaatcacgaaaacgaaatccaaagcagaggccgggggtcaaacgacgagattgtgaagaatctaatatggatatatttgatgccgacagtgccaaagcacctcactatgtgctttctcagcttaccacggacaacaaaggcaactcaaaagcgggaaatggaacattggaaaaccaaaaaggaactggagtaaagaagagccctatgttgtgtggacaatatcctgttaaaagtgagggaaaggagctgaagatagttgtacaacctgagacacagcaccgagctcggtacctgactgagggcagccgtggctcagtgaaagatagaacacagcaaggctttcctacagtaaagctggaaggccataatgaacctgtagtgttgcaagtgtttgtgggcaacgactctggacgagtgaaaccacatggattttatcaggcctgcagagtaactggacgaaatacaactccttgcaaagaagtggacattgaaggcactactgttatagaagtcggccttgatcctagcaacaacatgacactggcggtggactgcgtagggatattgaaattgaggaatgctgatgtcgaagccagaataggaattgctggttccaagaagaaaagcactcgtgccagattggtttttcgagttaatatcatgaggaaagatggctccactttgacactgcaaacaccctcttctccaattttgtgtactcagccagcaggagtgccagaaatcttaaagaaaagcttgcatagctgttcagtgaaaggagaagaagaagtgtttttaatcggcaagaactttctgaaaggaactaaagttattttccaagaaaatgtttctgatgaaaactcttggaagtcagaagctgaaattgatatggaactatttcatcagaatcatcttattgtgaaggttcctccctatcatgaccaacatataactttgcctgtgtcagtgggaatatatgtagtgacaaatgctggaagatctcatgatgttcaaccattcacttacactccagacccagcagcagctggtgctttgaatgtaaatgtgaagaaggaaatatctagtccagcaagaccttgctcttttgaagaggccatgaaagcaatgaaaactactggatgtaatttagataaggtaaatattatccctaatgccctgatgactccactcataccaagcagtatgattaagagtgaagatgttactccaatggaagtaacagcagaaaaaagatcttccactatttttaagactacaaagtctgttggatcaactcagcaaacattagaaaacatctcaaacatagcaggaaatggctctttttcatcaccatcatcttcccacctaccttctgaaaatgaaaaacagcagcagattcagcccaaggcatacaacccagagaccctgacaactattcaaacccaggacatctcacagcctggtacttttccagcagtttctgcttctagtcagctgcccaacagcgatgcactattgcagcaggctacacagtttcagacaagagaaactcagtctagagagatattacagtcagatggtacagtggttaatttgtcacaactgactgaggcatcacaacaacagcagcagtcaccactacaagaacaagcacagactttacagcagcagatttcatcaaatatttttccatcaccaaatagtgtgagtcagcttcagaatactattcagcagctgcaagcagggagtttcacaggcagtactgctagtggcagcagtggaagtgttgacttggtccaacaagttttagaggcacagcagcagttatcttcagttttattttctgctccagatggtaatgagaatgttcaagagcagcttagtgcagatatttttcaacaagtcagtcaaattcagagtggtgtaagccctggaatgttttcctcaacagagccaacagtccataccagaccagataatttattacctggaagagctgaaagtgttcatccacagtctgaaaacacgttatctaatcaacagcagcagcagcagcagcaacagcaagtgatggaatcttcagccgcaatggtgatggagatgcaacagagtatctgccaggcagctgcccagattcagtcagagttattcccttcaactgcttcagcaaatggaaaccttcagcaatcgccagtttaccagcagacttctcacatgatgagtgcattgtctaccaatgaggatatgcaaatgcagtgtgaattgttttcttctcctcctgcagtttctggaaatgaaacttctacaactaccacacagcaggttgcaacccctggcactaccatgtttcagacatcaagttcaggagatggagaagaaactggaacacaagcaaaacagattcagaacagtgtctttcagaccatggtccaaatgcaacatagtggggacaatcaacctcaagttaaccttttttcatccacaaaaagtatgatgagtgttcagaatagtggtacccaacaacaaggtaatggtttattccagcaagggaatgagatgatgtcacttcaatctggaaattttttgcagcagtcttctcattcacaggcccaactttttcatcctcaaaatcctattgccgatgctcagaacctttcccaggaaactcaaggttctctctttcatagtccaaatcctattgtccacagtcagacttctacaacctcctctgaacaaatgcagcctccaatgtttcactctcaaagtaccattgctgtgttacagggctcttcagttcctcaagaccagcagtcaaccaacatatttctttcccagagtcccatgaataatcttcagactaacacagtagcccaagaagcattttttgcagcaccgaactcaatttctccacttcagtcaacatcaaacagtgaacaacaagctgctttccaacagcaagctccaatatcacacatccagactcctatgctttcccaagaacaggcacaacccccgcagcagggtttatttcagcctcaggtggccctgggctcccttccacctaatccaatgcctcaaagccaacaaggaaccatgttccagtcacagcactcaatagttgccatgcagagtaactctccatcccaggaacagcagcagcagcagcaacagcagcagcaacagcagcagcaacaacaacagagcattttattcagtaatcagaataccatggctacaatggcgtctccaaagcaaccaccaccaaacatgatattcaacccaaatcaaaatccaatggctaatcaggagcaacagaaccagtcaatttttcaccaacaaagtaacatggccccaatgaatcaagagcaacagcccatgcaatttcagagtcagtccacagtttcctcacttcagaacccaggtcctacccagtcggaatcatcacagacccccttgttccatagctctcctcagattcagttggtacaagggtcacctagttctcaagagcaaacaacatgcctggaattcaaggagccacatcttcgcctcaaccacaggctactttatttcacaacacagcaggaggcacaatgaaccaactgcagaattctcctggctcatctcagcagacatcaggaatgttcttatttggcattcaaaataaaattccacgaagaaaatcctgattccaagatgtcctgagatcttgtggttccatgagaattattactttaaaaacaaaacaaaatataaaaaactgtgtttgagtaaactgatagattttactctgactgcaaaagagcacacctatgctgcttgttgcagtaactaaccaccaatgttaacatcttcatattttatattcctaataacagtgatgactgagaatctatttgagtttccagctggcagaattaattgttattattttcctaggcgcaatttccttaaacgtacagtttaaattcaaggctggaccactcagttattattgctattagaaaataatatatcatgtttacttttgttcttcattattttctttcctgcattgttttagtcaagtaatggcttttgaaaaagtaaagttcaataataactaaggctgtgatttttttcaatataaaaggcacagctgttggccaaagtgaaggaatcttttttcagttttattggagaaactgaagggtaacattctaacaagtaaactgtatgtgcagataaaagtactcttgatttaacacaaaggcagatgatacacttataaaactgggaacagctggaatgcttcttgattttattttttcagagagttgttagttctctgggtttctactaaggggtttagccataactgtgcatagaaaaataattatctgtaaaaaatgaaggggataatatatgataaattatgttctgatatcctcctacagtagtttaaattgacagaaaaatttgaatgttttcttcttaacccagtcttaggctggtattccctttttatatatatctatattacttttcacctctttttcactttactttagagaactattaatatactactggcttcatgaccctgtagcatctttggccactttaatctagggtgacctagcaatcctgcagcacagggcagagagtactgtcttaggaattattaggagttgattcctgagaaacaacacatttttccccatgaacggtgctgttctgaagtcttcaaatttttccctctaataggaaacagtataaattttaattaaaaaaaaaaggcaaactaaaatttcttgaaatatcacttctccctgatctgcagtgagtataaattcacttgtcacctcagtgctttacagtttgaagtggtcacttacctgatggttcccacaagccttaggctttacagggttgtatcattgacttaaaatgaagaattaacttgtgttacatctataaagagcaaaataacacactccagaacttggcagttgtagcattagttatacagttttgggtgttcttgccacccgtgggatgcctgcttctcactaccacctgtgtctggacacatgcttatgtctcattttccttttggcatgtggaaagctgtcaatgcagtgtaaggccaacgtgtgtgtggcttctatgtgttgagataatgttttggtatccttgtccgtttcatttattttttaagtgtacaaaaaataacctgttaattgttgaaggctacttttctgttcttttttttttttttttctatcctgtacatttagttgaactgtgcggaattgtggtgttggttttgtttacacagccagatttttccttctttttgttttgngatgatcttcctttgttctttgaatgtgctcttttgtctttttctcttttttctcatgttttcttccctccacctccacccctttctttctttctctctctgattgagaggcattgaattacgttttcagtagtacaggcttcttgccgatatgaagggaacttttcagaaagagacctactctgggtcatttaattttgaatacagttttcaatcgttcaagttttggatggtttatatctaatgtgtgtttcatttttttggaaagctatattttgtatttaggaaatggtatactattttgctatttgtactgagtgagtacattggcataaatatagaaatttatatatatacatatatataaactattcttttttgccacacatttttgtggtaaatttgtgagtttgtctgatgttctaccacaacgtggcgtctgataacagtgagggggggtggggtttgttatgtctttattgagtatttaagtatcttttgaaacaaatgacctgttcatctgtggccattccatcaggcagttagttccttgatgtcagtagtgggctaaaggcagcttactgtgtgtttgctggagctttcactcagccaagtgttagagtcaggaaacccattgaggcaatggcgtcaaatggtgtttcacaagaatgagccattcagtctttgctcactatatatttaatattttattattgttgttattgttattattaattggctttctgtattctatgccttttatttataaagacactaagaaaacccatgtttgtaattttaataacatttttcccatcttgtaatatccagagctactttataaattctctgaaccaaaagtattttcctcagtgtatctcttctcccccagcccctattgggaaaaattacccagtatagttcaggttatgaggaggatcagccacacaatccagtgcttcagtttgaaaatgtaaaattctaaccctaaagtagggttggttgaaatttcagacaaagcaaacccagcaggtataaaaagtagtataaatacaaatctgtaagttatttttgaattttctgaacttttttctaagagattacataggagactaaagaaatctatctgttcaagttctaattaggatgattgttaatactgcactgtggatgaagtggcgactggcttgtgtgctgacttctgtggtttagcaagaggtttattgttatcaaatgctaattggcaatgccaagtcactgggaccaattttctgttttataatatctaagtttagaacagaatatatacctgaactgtagtggtttgatcggatggagacagaaaacccgatttttattctcataaattttgtggttatttatacaagggctgtgctatgctaccatattcttgttcaataataataggtttgttgttttttttacattgttaaatgttccttacccctaaaggtcaatgttaagtacaacattctgaaaatacaatttggctacaaagagtattcatcttctttgaagctcagtggttgatatttgtgctaataatgcaatttcctgattactgttacaagttatagctacatatgggagagactcagtgagccagcaaaggccatagaaacaacaatttattaaatgtatttatggcagaaggacctaaataaactgtgagccaccttttcttctttatattgttacatttaagtgttcttgctttcagcaactcacattaatgcttggagcttatctctttctctctctctctctctctctctgtgtgtgtgtgtgtatgtgtgtgtgtgtgtgtgtgtgtttccttattgtcattccattatatatccacaccaacatgggtgacgataattcaaagtcatattttgcctctaagcttgatcatgttacctttatgattaaagtatcatgttatttagccaatgcaaatctgttttaaaacaaatagtttaaaaaaagaacaagtttttaagggctttattatagaagaagtattaatgaaggactttccttcctccctccctttcctcccctccctgcctcccttcttcccttccatctccccctcctccctgccttctttgtttctccttcccttattcctccctccctcctttctcccttccttcctttcttccattcatccttccttgccttttatttttattttttgtaatatcacatgtgctgtagtttggaattttattctagtgcatttcttgctcatcagaacctcagctaatctacctaggaaaaatagtatcaaaggaaatgagaaagttgtatctgagtccctccagaactaagataattctttttgaccatttaagcctttataaatgcgttttgaccatttaagcctttataaatgcttgttttaggaaagtgaatctgttagatgcatcaacaaataatgaccaggacaaaacgatttaataattaaagtctcaaatcaccatggttatacattttcaccagaaatagtaatcttacaatttttcatttttctgatgaagatttctgttccaatatctgtttcctaatagattttttaaattaattagctttcctctgctttatgaccacaggttttatccctaaccgagacagctgtcttatatctgcatgccttagactgtgtggagggactccatgaagaaagaccataggttagaaaaataactcatagtatataccctagtaagtgggttagtagaatctcataacatgtattaaaaagaggttttcttctctgcttgtttgtgtcactagagcaaaattgtagagataatgctcataatgcagtaaatatcagaataatatctacaatatcatttgtggatggtcccaggtcccagtgctctagttactttacttcttttttttttttgagatggagtcttgctctgtctctcaggctagagcagtgtgcgatctcagctcactgcagcctccacctcccaggttcaagcgattctcctgcctcagcctcccaagtagccaggattacaggcaccctccactaggcccggctaattttttttgtatttttttagtagagatggggttttgccatgttggccaggctggtttcgaactcctaacctccagtgatccacctgcctcggcgtcccaaagtgctaggattacaggcatgagccaccacatccggcctaattacttctttaatccccatttatttttatgccattctagcctcatttattaataaaattatgtttttactttctctttcaggaaattttttaaattaatattttatatctagatcnaatgctatggaaaagtgcctttttatcatttataatttcatttttcactatttccaaaaacacataaacaaatagtttcagtaggtcccagcttttactttttccatttaaaccttcttttctccatttcttccctttggcttaagaataaaagaaaaggtacattgctagaattgtttctttgggagagggtaaaagattacagaattagactgttcagcctttatataaactaaatttgtcttcatctcaaccagctaatggtaggtcttatctgaatactcatgagaattttagcatctgtgaaactccatgcaccagatgtgtgtaaatttcaggaagaaagtgttgaaagcattttctctgatgttaattagatggaaataaatcactaaaacatagtttaggtaaagcctgattatgccacttttttttaactagacagggcaaagttgtttatgttagtgtacttcttgtctatcctcagttaatttacctagacaaaaagtgtcaaaggaaatgagaaaaaggttatatctgactccctccagacctaagataattccttttgatcagatacagtcagatggagtgccttggtttttgttaattttgcctctattccagctccttaccacagcggtggtgcttaaagaaaggatcatcagcaacaggtcaggatagttctacctttgggatagggctgctttccccgtgctagtatttctgtgactgttagtggcactgaggactgcaaacttttatgcaatattcttaataccctattgatattatgcactttaatcattccaaagaagccaagaatgctgtatagtgatgattccttcctaatgaattcatcttaactatttagaatgttatgtcccttttcttttggatagccaacttggtataaatgttatatggatttttctaaaatgactatataggacttaagactttgaaatgtaatttacttataaggggaaataattatgctttagcacatcattttagaaacgtcacattttagaaacattcagcttgctaacctacatgtttgggaattcattaaaaccagttgtctatatattttgtgccatgtatataagaacattacaatatatctttttctacatatgtagtatgtgcaaccagtggttctcagagtatggttctcagcccaccagctagtatcagtatcacctgggaactagttagaaatgtaaattctttggccccatcccagacatactgagtcagaaactctggaatagggcccccgcaatctgttttcacaagccctccaggtgattctgatgcacactttaaagtttaggaaccactgggctaagactctgttgagatatagagtttttctttccactcagactgatatagttatacattgttcttcatgtaaattcagcttaacctggttatctataatcttttattggcaaaagttaattctcagtactgcctatagagatacagtgtattttatgtacatacacaattagtctaattcttgataattcagttaatttagtttggcattttcctaccacttactaaaaggtttacattaaatgactgatttaaatatataggtgcaatgttctatgtttattttaattgttatgacatttaagtagctaatataattgaccggtgctaaagtctcctgtttatccataaaatgggtacattatgggcagtgtaatacaagctttcttttcattgcctagtactttaccagcagaccacagttttgccctggctagaccaaccctcagaacaaaatcatcattccttgtatttatatttgtatctgagatagtaaacaagatggctggccaggtcaacatggcaccttaacttatttttttaataggtaaaacttcttcaaaagtagcttgctttgtataagaactaagctatcagtatagatatagctatccttggagcttatgtttcagacaagaattatttactaaaataaataataaacaagataatgcattatacaatttgggcatttctcgtttctcaagtgtatgcatcatggtaaatataaactaaccacaagataggtagattgattcatttcattttaatctccttgtgtaattcagtacctccataattgttctaatcttcttcccactgtttacaaattaccagttaattaactcgtgaaagaaaaattcacatatcagaataaaaataaatgtatactcactttataaaaatcaccactgctgtctttccttaatactagcagtggaaatgtaagtggcttactctacaaattttggtgctggcaaatacataggcaaactgttgggagctgctctagttacattcctcccttcttattccctttttctcttcctcactttattgcataacatattcctgtacccaaagcattctaccacagttctatttgactcccacttgtaataactcctttaaaaaattccatgtttaaccatatgaccctgcttgcttactcatattctccctccctctccccttcctttctctctcttccagaagtcatttgcctggtttgaaatattttgtagggattgcttattatattattttagctgatgaacctcaggacaacgtctacacacacacacatacatacacgcacacaaaatctcagctgttgaagagtgggcttggaatcagacttctgtgtccagtaaaaaactcctgcactgaagtcattgtgacttgagtagttacagactgattccagtgaacttgatctaatttcttttgatctaatgaatgtgtctgcttaccttgtttccttttaattgataagctccaagtagttgctaattttttgacaactttaaatgagtttcattcacttcttttacttaatgttttaagtatagtaccaataatttcattaacctgttctcaagtggtttagctaccattctgccatttttaatttttatttaattttatttgcttgagcacactgatcaaccactgaactgccttcttccattgtcctgcaatgatataagggttacatttttgtgtatatggctttcatagttgggatttcagagcactgataccagatattttcagtttgttctctgggggaatttcatttgcatctatgtttttagctatctgtgataacttgttaaatattaaaaagatattttgcttctattggaacatttgtatactcgcaactatatttctgtaaacagctgcagtcaaaaataaaacactgaaagttttcattttgcagtggaaaaaag

SEQ ID NO: 350845 - DNA, 12031 bp, Homo sapiens
  misc_feature (17)..(17): n is a, c, g, or t
  misc_feature (5400)..(5400): n is a, c, g, or t
  misc_feature (8726)..(8726): n is a, c, g, or t
tgcaacggaaacttttngctccacgaacagaaaagcaagagcaaaaactcagttaaatgcgttcttcctccatctttgcctagtccaaaaggaaaaaaaaagaaacagaaaaaagaaaaactgtttggaagagtagcgttgaggtttgctttttacctgtttttcctctagaacagccaggtggattcacatgatccaattttttaattgtcttctatgtcccactccgaataacccggatgccccagcacaatcagagagatcgttttttttaaaaaaaatttcagcctccaaaggtaggaggggagtgttaggggagaaagtactttaattaaaaatcaataactcgaggtttttgggatacggtttgccatttcctaattaagaaatgggtttgacagtccctttgtacacactgctatgcaaaccccaaagggttggcggctgtccgggcgatgacactccggtcccctgcgagaccccgggccagccaggcccgtccgccgccggcctctggggtccgtccccggctcgcgcagacctctcgcttctctcggctctgtctcctgcgctcagctctgctcggggccggccgcctcaggctcgccgccaccaggtcgttgcaaataccttttccctccccggggccccagcgcgcggccacctcccagcctccccccctcccaccctggcagcggggccctttcccggctcaggaacagcagcagcccgggccgcgccggcaggaagcgaggcccatgttgctgctgttccctggcgcgcctccccgccctccgggggccgccacggctcttccgcgctcccgggcacccccctccgcgcctgcgctgtgccccacgggggcggggctcagattcctgtcagcggcggcggcggtggcggcgaccgtcagttttcgctgaggagaaacacgaaacggaccctttggctctcccccttccccttccccgtcctgaacccctctcctggtcaccgagaatcagtccccgtggagttccccctccacctcgccatcgtttcctcggtcctcggcccagtggaagtcactaccctcgaggaggaggcagcggcagccgccctcgcgtcgccgcccccggttcggtgcccgcggtcccggagaggaggtgccgccgccaccgccgctccccccctcccgctgccctcgggccgggctgggtcgagctgcgatgccctcggacttcatctcattgctcagcgcggacctagacctggaatcgcccaagtccctctactcgcgagattctctgaagttacacccatcacagaattttcatagagctggactattggaagaatctgtctatgatcttctcccaaaggagttacagttacctccatctagagaaacatctgtagcatcaatgagtcagacaagcggtggtgaggcaggctcgcctcctccagctgttgttgctgctgatgcttcttcagctccctcctcttcctccatgggcggtgcttgcagctcctttaccacctcttccagccctaccatttattctacctcagtcaccgacagcaaggctatgcaagtggagagctgctcctcagccgtgggggtaagtaacagaggggtaagtgaaaagcagttaaccagtaacacagttcagcagcatccatcaacaccgaagaggcacacagtcttgtacatctcaccaccacctgaggacttgctggataacagtcggatgtcctgccaggatgaggggtgtggattggaatctgagcagagctgcagtatgtggatggaggattccccctccaacttcagtaacatgagcaccagttcctacaatgataacactgaggtacctcgtaaatcacgaaaacgaaatccaaagcagaggccgggggtcaaacgacgagattgtgaagaatctaatatggatatatttgatgccgacagtgccaaagcacctcactatgtgctttctcagcttaccacggacaacaaaggcaactcaaaagcgggaaatggaacattggaaaaccaaaaaggaactggagtaaagaagagccctatgttgtgtggacaatatcctgttaaaagtgagggaaaggagctgaagatagttgtacaacctgagacacagcaccgagctcggtacctgactgagggcagccgtggctcagtgaaagatagaacacagcaaggctttcctacagtaaagctggaaggccataatgaacctgtagtgttgcaagtgtttgtgggcaacgactctggacgagtgaaaccacatggattttatcaggcctgcagagtaactggacgaaatacaactccttgcaaagaagtggacattgaaggcactactgttatagaagtcggccttgatcctagcaacaacatgacactggcggtggactgcgtagggatattgaaattgaggaatgctgatgtcgaagccagaataggaattgctggttccaagaagaaaagcactcgtgccagattggtttttcgagttaatatcatgaggaaagatggctccactttgacactgcaaacaccctcttctccaattttgtgtactcagccagcaggagtgccagaaatcttaaagaaaagcttgcatagctgttcagtgaaaggagaagaagaagtgtttttaatcggcaagaactttctgaaaggaactaaagttattttccaagaaaatgtttctgatgaaaactcttggaagtcagaagctgaaattgatatggaactatttcatcagaatcatcttattgtgaaggttcctccctatcatgaccaacatataactttgcctgtgtcagtgggaatatatgtagtgacaaatgctggaagatctcatgatgttcaaccattcacttacactccagacccagcagcagctggtgctttgaatgtaaatgtgaagaaggaaatatctagtccagcaagaccttgctcttttgaagaggccatgaaagcaatgaaaactactggatgtaatttagataaggtaaatattatccctaatgccctgatgactccactcataccaagcagtatgattaagagtgaagatgttactccaatggaagtaacagcagaaaaaagatcttccactatttttaagactacaaagtctgttggatcaactcagcaaacattagaaaacatctcaaacatagcaggaaatggctctttttcatcaccatcatcttcccacctaccttctgaaaatgaaaaacagcagcagattcagcccaaggcatacaacccagagaccctgacaactattcaaacccaggacatctcacagcctgaacaacatgcctggaattcaaggagccacatcttcgcctcaaccacaggctactttatttcacaacacagcaggaggcacaatgaaccaactgcagaattctcctggctcatctcagcagacatcaggaatgttcttatttggcattcaaaataactgtagtcagcttttaacctctggaccagctacattgcctgatcagttgatggccataagtcagccaggccaaccacaaaacgagggccagccacctgtgacaacacttctttctcagcaaatgccagagaattctccactggcatcctctataaacaccaaccagaacatcgaaaagattgatttgcttgtttcattgcaaaaccaagggaacaacttgactggctccttttaactggatataaattccacgaagaaaatcctgattccaagatgtcctgagatcttgtggttccatgagaattattactttaaaaacaaaacaaaatataaaaaactgtgtttgagtaaactgatagattttactctgactgcaaaagagcacacctatgctgcttgttgcagtaactaaccaccaatgttaacatcttcatattttatattcctaataacagtgatgactgagaatctatttgagtttccagctggcagaattaattgttattattttcctaggcgcaatttccttaaacgtacagtttaaattcaaggctggaccactcagttattattgctattagaaaataatatatcatgtttacttttgttcttcattattttctttcctgcattgttttagtcaagtaatggcttttgaaaaagtaaagttcaataataactaaggctgtgatttttttcaatataaaaggcacagctgttggccaaagtgaaggaatcttttttcagttttattggagaaactgaagggtaacattctaacaagtaaactgtatgtgcagataaaagtactcttgatttaacacaaaggcagatgatacacttataaaactgggaacagctggaatgcttcttgattttattttttcagagagttgttagttctctgggtttctactaaggggtttagccataactgtgcatagaaaaataattatctgtaaaaaatgaaggggataatatatgataaattatgttctgatatcctcctacagtagtttaaattgacagaaaaatttgaatgttttcttcttaacccagtcttaggctggtattccctttttatatatatctatattacttttcacctctttttcactttactttagagaactattaatatactactggcttcatgaccctgtagcatctttggccactttaatctagggtgacctagcaatcctgcagcacagggcagagagtactgtcttaggaattattaggagttgattcctgagaaacaacacatttttccccatgaacggtgctgttctgaagtcttcaaatttttccctctaataggaaacagtataaattttaattaaaaaaaaaaggcaaactaaaatttcttgaaatatcacttctccctgatctgcagtgagtataaattcacttgtcacctcagtgctttacagtttgaagtggtcacttacctgatggttcccacaagccttaggctttacagggttgtatcattgacttaaaatgaagaattaacttgtgttacatctataaagagcaaaataacacactccagaacttggcagttgtagcattagttatacagttttgggtgttcttgccacccgtgggatgcctgcttctcactaccacctgtgtctggacacatgcttatgtctcattttccttttggcatgtggaaagctgtcaatgcagtgtaaggccaacgtgtgtgtggcttctatgtgttgagataatgttttggtatccttgtccgtttcatttattttttaagtgtacaaaaaataacctgttaattgttgaaggctacttttctgttcttttttttttttttttctatcctgtacatttagttgaactgtgcggaattgtggtgttggttttgtttacacagccagatttttccttctttttgttttgngatgatcttcctttgttctttgaatgtgctcttttgtctttttctcttttttctcatgttttcttccctccacctccacccctttctttctttctctctctgattgagaggcattgaattacgttttcagtagtacaggcttcttgccgatatgaagggaacttttcagaaagagacctactctgggtcatttaattttgaatacagttttcaatcgttcaagttttggatggtttatatctaatgtgtgtttcatttttttggaaagctatattttgtatttaggaaatggtatactattttgctatttgtactgagtgagtacattggcataaatatagaaatttatatatatacatatatataaactattcttttttgccacacatttttgtggtaaatttgtgagtttgtctgatgttctaccacaacgtggcgtctgataacagtgagggggggtggggtttgttatgtctttattgagtatttaagtatcttttgaaacaaatgacctgttcatctgtggccattccatcaggcagttagttccttgatgtcagtagtgggctaaaggcagcttactgtgtgtttgctggagctttcactcagccaagtgttagagtcaggaaacccattgaggcaatggcgtcaaatggtgtttcacaagaatgagccattcagtctttgctcactatatatttaatattttattattgttgttattgttattattaattggctttctgtattctatgccttttatttataaagacactaagaaaacccatgtttgtaattttaataacatttttcccatcttgtaatatccagagctactttataaattctctgaaccaaaagtattttcctcagtgtatctcttctcccccagcccctattgggaaaaattacccagtatagttcaggttatgaggaggatcagccacacaatccagtgcttcagtttgaaaatgtaaaattctaaccctaaagtagggttggttgaaatttcagacaaagcaaacccagcaggtataaaaagtagtataaatacaaatctgtaagttatttttgaattttctgaacttttttctaagagattacataggagactaaagaaatctatctgttcaagttctaattaggatgattgttaatactgcactgtggatgaagtggcgactggcttgtgtgctgacttctgtggtttagcaagaggtttattgttatcaaatgctaattggcaatgccaagtcactgggaccaattttctgttttataatatctaagtttagaacagaatatatacctgaactgtagtggtttgatcggatggagacagaaaacccgatttttattctcataaattttgtggttatttatacaagggctgtgctatgctaccatattcttgttcaataataataggtttgttgttttttttacattgttaaatgttccttacccctaaaggtcaatgttaagtacaacattctgaaaatacaatttggctacaaagagtattcatcttctttgaagctcagtggttgatatttgtgctaataatgcaatttcctgattactgttacaagttatagctacatatgggagagactcagtgagccagcaaaggccatagaaacaacaatttattaaatgtatttatggcagaaggacctaaataaactgtgagccaccttttcttctttatattgttacatttaagtgttcttgctttcagcaactcacattaatgcttggagcttatctctttctctctctctctctctctctctgtgtgtgtgtgtgtatgtgtgtgtgtgtgtgtgtgtgtttccttattgtcattccattatatatccacaccaacatgggtgacgataattcaaagtcatattttgcctctaagcttgatcatgttacctttatgattaaagtatcatgttatttagccaatgcaaatctgttttaaaacaaatagtttaaaaaaagaacaagtttttaagggctttattatagaagaagtattaatgaaggactttccttcctccctccctttcctcccctccctgcctcccttcttcccttccatctccccctcctccctgccttctttgtttctccttcccttattcctccctccctcctttctcccttccttcctttcttccattcatccttccttgccttttatttttattttttgtaatatcacatgtgctgtagtttggaattttattctagtgcatttcttgctcatcagaacctcagctaatctacctaggaaaaatagtatcaaaggaaatgagaaagttgtatctgagtccctccagaactaagataattctttttgaccatttaagcctttataaatgcgttttgaccatttaagcctttataaatgcttgttttaggaaagtgaatctgttagatgcatcaacaaataatgaccaggacaaaacgatttaataattaaagtctcaaatcaccatggttatacattttcaccagaaatagtaatcttacaatttttcatttttctgatgaagatttctgttccaatatctgtttcctaatagattttttaaattaattagctttcctctgctttatgaccacaggttttatccctaaccgagacagctgtcttatatctgcatgccttagactgtgtggagggactccatgaagaaagaccataggttagaaaaataactcatagtatataccctagtaagtgggttagtagaatctcataacatgtattaaaaagaggttttcttctctgcttgtttgtgtcactagagcaaaattgtagagataatgctcataatgcagtaaatatcagaataatatctacaatatcatttgtggatggtcccaggtcccagtgctctagttactttacttcttttttttttttgagatggagtcttgctctgtctctcaggctagagcagtgtgcgatctcagctcactgcagcctccacctcccaggttcaagcgattctcctgcctcagcctcccaagtagccaggattacaggcaccctccactaggcccggctaattttttttgtatttttttagtagagatggggttttgccatgttggccaggctggtttcgaactcctaacctccagtgatccacctgcctcggcgtcccaaagtgctaggattacaggcatgagccaccacatccggcctaattacttctttaatccccatttatttttatgccattctagcctcatttattaataaaattatgtttttactttctctttcaggaaattttttaaattaatattttatatctagatcnaatgctatggaaaagtgcctttttatcatttataatttcatttttcactatttccaaaaacacataaacaaatagtttcagtaggtcccagcttttactttttccatttaaaccttcttttctccatttcttccctttggcttaagaataaaagaaaaggtacattgctagaattgtttctttgggagagggtaaaagattacagaattagactgttcagcctttatataaactaaatttgtcttcatctcaaccagctaatggtaggtcttatctgaatactcatgagaattttagcatctgtgaaactccatgcaccagatgtgtgtaaatttcaggaagaaagtgttgaaagcattttctctgatgttaattagatggaaataaatcactaaaacatagtttaggtaaagcctgattatgccacttttttttaactagacagggcaaagttgtttatgttagtgtacttcttgtctatcctcagttaatttacctagacaaaaagtgtcaaaggaaatgagaaaaaggttatatctgactccctccagacctaagataattccttttgatcagatacagtcagatggagtgccttggtttttgttaattttgcctctattccagctccttaccacagcggtggtgcttaaagaaaggatcatcagcaacaggtcaggatagttctacctttgggatagggctgctttccccgtgctagtatttctgtgactgttagtggcactgaggactgcaaacttttatgcaatattcttaataccctattgatattatgcactttaatcattccaaagaagccaagaatgctgtatagtgatgattccttcctaatgaattcatcttaactatttagaatgttatgtcccttttcttttggatagccaacttggtataaatgttatatggatttttctaaaatgactatataggacttaagactttgaaatgtaatttacttataaggggaaataattatgctttagcacatcattttagaaacgtcacattttagaaacattcagcttgctaacctacatgtttgggaattcattaaaaccagttgtctatatattttgtgccatgtatataagaacattacaatatatctttttctacatatgtagtatgtgcaaccagtggttctcagagtatggttctcagcccaccagctagtatcagtatcacctgggaactagttagaaatgtaaattctttggccccatcccagacatactgagtcagaaactctggaatagggcccccgcaatctgttttcacaagccctccaggtgattctgatgcacactttaaagtttaggaaccactgggctaagactctgttgagatatagagtttttctttccactcagactgatatagttatacattgttcttcatgtaaattcagcttaacctggttatctataatcttttattggcaaaagttaattctcagtactgcctatagagatacagtgtattttatgtacatacacaattagtctaattcttgataattcagttaatttagtttggcattttcctaccacttactaaaaggtttacattaaatgactgatttaaatatataggtgcaatgttctatgtttattttaattgttatgacatttaagtagctaatataattgaccggtgctaaagtctcctgtttatccataaaatgggtacattatgggcagtgtaatacaagctttcttttcattgcctagtactttaccagcagaccacagttttgccctggctagaccaaccctcagaacaaaatcatcattccttgtatttatatttgtatctgagatagtaaacaagatggctggccaggtcaacatggcaccttaacttatttttttaataggtaaaacttcttcaaaagtagcttgctttgtataagaactaagctatcagtatagatatagctatccttggagcttatgtttcagacaagaattatttactaaaataaataataaacaagataatgcattatacaatttgggcatttctcgtttctcaagtgtatgcatcatggtaaatataaactaaccacaagataggtagattgattcatttcattttaatctccttgtgtaattcagtacctccataattgttctaatcttcttcccactgtttacaaattaccagttaattaactcgtgaaagaaaaattcacatatcagaataaaaataaatgtatactcactttataaaaatcaccactgctgtctttccttaatactagcagtggaaatgtaagtggcttactctacaaattttggtgctggcaaatacataggcaaactgttgggagctgctctagttacattcctcccttcttattccctttttctcttcctcactttattgcataacatattcctgtacccaaagcattctaccacagttctatttgactcccacttgtaataactcctttaaaaaattccatgtttaaccatatgaccctgcttgcttactcatattctccctccctctccccttcctttctctctcttccagaagtcatttgcctggtttgaaatattttgtagggattgcttattatattattttagctgatgaacctcaggacaacgtctacacacacacacatacatacacgcacacaaaatctcagctgttgaagagtgggcttggaatcagacttctgtgtccagtaaaaaactcctgcactgaagtcattgtgacttgagtagttacagactgattccagtgaacttgatctaatttcttttgatctaatgaatgtgtctgcttaccttgtttccttttaattgataagctccaagtagttgctaattttttgacaactttaaatgagtttcattcacttcttttacttaatgttttaagtatagtaccaataatttcattaacctgttctcaagtggtttagctaccattctgccatttttaatttttatttaattttatttgcttgagcacactgatcaaccactgaactgccttcttccattgtcctgcaatgatataagggttacatttttgtgtatatggctttcatagttgggatttcagagcactgataccagatattttcagtttgttctctgggggaatttcatttgcatctatgtttttagctatctgtgataacttgttaaatattaaaaagatattttgcttctattggaacatttgtatactcgcaactatatttctgtaaacagctgcagtcaaaaataaaacactgaaagttttcattttgcagtggaaaaaag

SEQ ID NO: 350846 - DNA, 10319 bp, Homo sapiens
  misc_feature (17)..(17): n is a, c, g, or t
  misc_feature (3688)..(3688): n is a, c, g, or t
  misc_feature (7014)..(7014): n is a, c, g, or t
tgcaacggaaacttttngctccacgaacagaaaagcaagagcaaaaactcagttaaatgcgttcttcctccatctttgcctagtccaaaaggaaaaaaaaagaaacagaaaaaagaaaaactgtttggaagagtagcgttgaggtttgctttttacctgtttttcctctagaacagccaggtggattcacatgatccaattttttaattgtcttctatgtcccactccgaataacccggatgccccagcacaatcagagagatcgttttttttaaaaaaaatttcagcctccaaaggtaggaggggagtgttaggggagaaagtactttaattaaaaatcaataactcgaggtttttgggatacggtttgccatttcctaattaagaaatgggtttgacagtccctttgtacacactgctatgcaaaccccaaagggttggcggctgtccgggcgatgacactccggtcccctgcgagaccccgggccagccaggcccgtccgccgccggcctctggggtccgtccccggctcgcgcagacctctcgcttctctcggctctgtctcctgcgctcagctctgctcggggccggccgcctcaggctcgccgccaccaggtcgttgcaaataccttttccctccccggggccccagcgcgcggccacctcccagcctccccccctcccaccctggcagcggggccctttcccggctcaggaacagcagcagcccgggccgcgccggcaggaagcgaggcccatgttgctgctgttccctggcgcgcctccccgccctccgggggccgccacggctcttccgcgctcccgggcacccccctccgcgcctgcgctgtgccccacgggggcggggctcagattcctgtcagcggcggcggcggtggcggcgaccgtcagttttcgctgaggagaaacacgaaacggaccctttggctctcccccttccccttccccgtcctgaacccctctcctggtcaccgagaatcagtccccgtggagttccccctccacctcgccatcgtttcctcggtcctcggcccagtggaagtcactaccctcgaggaggaggcagcggcagccgccctcgcgtcgccgcccccggttcggtgcccgcggtcccggagaggaggtgccgccgccaccgccgctccccccctcccgctgccctcgggccgggctgggtcgagctgcgatgccctcggacttcatctcattgctcagcgcggacctagacctggaatcgcccaagtccctctactcgcgagaatctgtctatgatcttctcccaaaggagttacagttacctccatctagagaaacatctgtagcatcaatgagtcagacaagcggtggtgaggcaggctcgcctcctccagctgttgttgctgctggatttgcctctgaagcagggagtgtctgcattaaaaatgacctgtagttctctgcttcatagatgcttcttcagctccctcctcttcctccatgggcggtgcttgcagctcctttaccacctcttccagccctaccatttattctacctcagtcaccgacagcaaggctatgcaagtggagagctgctcctcagccgtggggaacaacatgcctggaattcaaggagccacatcttcgcctcaaccacaggctactttatttcacaacacagcaggaggcacaatgaaccaactgcagaattctcctggctcatctcagcagacatcaggaatgttcttatttggcattcaaaataactgtagtcagcttttaacctctggaccagctacattgcctgatcagttgatggccataagtcagccaggccaaccacaaaacgagggccagccacctgtgacaacacttctttctcagcaaatgccagagaattctccactggcatcctctataaacaccaaccagaacatcgaaaagattgatttgcttgtttcattgcaaaaccaagggaacaacttgactggctccttttaactggatataaattccacgaagaaaatcctgattccaagatgtcctgagatcttgtggttccatgagaattattactttaaaaacaaaacaaaatataaaaaactgtgtttgagtaaactgatagattttactctgactgcaaaagagcacacctatgctgcttgttgcagtaactaaccaccaatgttaacatcttcatattttatattcctaataacagtgatgactgagaatctatttgagtttccagctggcagaattaattgttattattttcctaggcgcaatttccttaaacgtacagtttaaattcaaggctggaccactcagttattattgctattagaaaataatatatcatgtttacttttgttcttcattattttctttcctgcattgttttagtcaagtaatggcttttgaaaaagtaaagttcaataataactaaggctgtgatttttttcaatataaaaggcacagctgttggccaaagtgaaggaatcttttttcagttttattggagaaactgaagggtaacattctaacaagtaaactgtatgtgcagataaaagtactcttgatttaacacaaaggcagatgatacacttataaaactgggaacagctggaatgcttcttgattttattttttcagagagttgttagttctctgggtttctactaaggggtttagccataactgtgcatagaaaaataattatctgtaaaaaatgaaggggataatatatgataaattatgttctgatatcctcctacagtagtttaaattgacagaaaaatttgaatgttttcttcttaacccagtcttaggctggtattccctttttatatatatctatattacttttcacctctttttcactttactttagagaactattaatatactactggcttcatgaccctgtagcatctttggccactttaatctagggtgacctagcaatcctgcagcacagggcagagagtactgtcttaggaattattaggagttgattcctgagaaacaacacatttttccccatgaacggtgctgttctgaagtcttcaaatttttccctctaataggaaacagtataaattttaattaaaaaaaaaaggcaaactaaaatttcttgaaatatcacttctccctgatctgcagtgagtataaattcacttgtcacctcagtgctttacagtttgaagtggtcacttacctgatggttcccacaagccttaggctttacagggttgtatcattgacttaaaatgaagaattaacttgtgttacatctataaagagcaaaataacacactccagaacttggcagttgtagcattagttatacagttttgggtgttcttgccacccgtgggatgcctgcttctcactaccacctgtgtctggacacatgcttatgtctcattttccttttggcatgtggaaagctgtcaatgcagtgtaaggccaacgtgtgtgtggcttctatgtgttgagataatgttttggtatccttgtccgtttcatttattttttaagtgtacaaaaaataacctgttaattgttgaaggctacttttctgttcttttttttttttttttctatcctgtacatttagttgaactgtgcggaattgtggtgttggttttgtttacacagccagatttttccttctttttgttttgngatgatcttcctttgttctttgaatgtgctcttttgtctttttctcttttttctcatgttttcttccctccacctccacccctttctttctttctctctctgattgagaggcattgaattacgttttcagtagtacaggcttcttgccgatatgaagggaacttttcagaaagagacctactctgggtcatttaattttgaatacagttttcaatcgttcaagttttggatggtttatatctaatgtgtgtttcatttttttggaaagctatattttgtatttaggaaatggtatactattttgctatttgtactgagtgagtacattggcataaatatagaaatttatatatatacatatatataaactattcttttttgccacacatttttgtggtaaatttgtgagtttgtctgatgttctaccacaacgtggcgtctgataacagtgagggggggtggggtttgttatgtctttattgagtatttaagtatcttttgaaacaaatgacctgttcatctgtggccattccatcaggcagttagttccttgatgtcagtagtgggctaaaggcagcttactgtgtgtttgctggagctttcactcagccaagtgttagagtcaggaaacccattgaggcaatggcgtcaaatggtgtttcacaagaatgagccattcagtctttgctcactatatatttaatattttattattgttgttattgttattattaattggctttctgtattctatgccttttatttataaagacactaagaaaacccatgtttgtaattttaataacatttttcccatcttgtaatatccagagctactttataaattctctgaaccaaaagtattttcctcagtgtatctcttctcccccagcccctattgggaaaaattacccagtatagttcaggttatgaggaggatcagccacacaatccagtgcttcagtttgaaaatgtaaaattctaaccctaaagtagggttggttgaaatttcagacaaagcaaacccagcaggtataaaaagtagtataaatacaaatctgtaagttatttttgaattttctgaacttttttctaagagattacataggagactaaagaaatctatctgttcaagttctaattaggatgattgttaatactgcactgtggatgaagtggcgactggcttgtgtgctgacttctgtggtttagcaagaggtttattgttatcaaatgctaattggcaatgccaagtcactgggaccaattttctgttttataatatctaagtttagaacagaatatatacctgaactgtagtggtttgatcggatggagacagaaaacccgatttttattctcataaattttgtggttatttatacaagggctgtgctatgctaccatattcttgttcaataataataggtttgttgttttttttacattgttaaatgttccttacccctaaaggtcaatgttaagtacaacattctgaaaatacaatttggctacaaagagtattcatcttctttgaagctcagtggttgatatttgtgctaataatgcaatttcctgattactgttacaagttatagctacatatgggagagactcagtgagccagcaaaggccatagaaacaacaatttattaaatgtatttatggcagaaggacctaaataaactgtgagccaccttttcttctttatattgttacatttaagtgttcttgctttcagcaactcacattaatgcttggagcttatctctttctctctctctctctctctctctgtgtgtgtgtgtgtatgtgtgtgtgtgtgtgtgtgtgtttccttattgtcattccattatatatccacaccaacatgggtgacgataattcaaagtcatattttgcctctaagcttgatcatgttacctttatgattaaagtatcatgttatttagccaatgcaaatctgttttaaaacaaatagtttaaaaaaagaacaagtttttaagggctttattatagaagaagtattaatgaaggactttccttcctccctccctttcctcccctccctgcctcccttcttcccttccatctccccctcctccctgccttctttgtttctccttcccttattcctccctccctcctttctcccttccttcctttcttccattcatccttccttgccttttatttttattttttgtaatatcacatgtgctgtagtttggaattttattctagtgcatttcttgctcatcagaacctcagctaatctacctaggaaaaatagtatcaaaggaaatgagaaagttgtatctgagtccctccagaactaagataattctttttgaccatttaagcctttataaatgcgttttgaccatttaagcctttataaatgcttgttttaggaaagtgaatctgttagatgcatcaacaaataatgaccaggacaaaacgatttaataattaaagtctcaaatcaccatggttatacattttcaccagaaatagtaatcttacaatttttcatttttctgatgaagatttctgttccaatatctgtttcctaatagattttttaaattaattagctttcctctgctttatgaccacaggttttatccctaaccgagacagctgtcttatatctgcatgccttagactgtgtggagggactccatgaagaaagaccataggttagaaaaataactcatagtatataccctagtaagtgggttagtagaatctcataacatgtattaaaaagaggttttcttctctgcttgtttgtgtcactagagcaaaattgtagagataatgctcataatgcagtaaatatcagaataatatctacaatatcatttgtggatggtcccaggtcccagtgctctagttactttacttcttttttttttttgagatggagtcttgctctgtctctcaggctagagcagtgtgcgatctcagctcactgcagcctccacctcccaggttcaagcgattctcctgcctcagcctcccaagtagccaggattacaggcaccctccactaggcccggctaattttttttgtatttttttagtagagatggggttttgccatgttggccaggctggtttcgaactcctaacctccagtgatccacctgcctcggcgtcccaaagtgctaggattacaggcatgagccaccacatccggcctaattacttctttaatccccatttatttttatgccattctagcctcatttattaataaaattatgtttttactttctctttcaggaaattttttaaattaatattttatatctagatcnaatgctatggaaaagtgcctttttatcatttataatttcatttttcactatttccaaaaacacataaacaaatagtttcagtaggtcccagcttttactttttccatttaaaccttcttttctccatttcttccctttggcttaagaataaaagaaaaggtacattgctagaattgtttctttgggagagggtaaaagattacagaattagactgttcagcctttatataaactaaatttgtcttcatctcaaccagctaatggtaggtcttatctgaatactcatgagaattttagcatctgtgaaactccatgcaccagatgtgtgtaaatttcaggaagaaagtgttgaaagcattttctctgatgttaattagatggaaataaatcactaaaacatagtttaggtaaagcctgattatgccacttttttttaactagacagggcaaagttgtttatgttagtgtacttcttgtctatcctcagttaatttacctagacaaaaagtgtcaaaggaaatgagaaaaaggttatatctgactccctccagacctaagataattccttttgatcagatacagtcagatggagtgccttggtttttgttaattttgcctctattccagctccttaccacagcggtggtgcttaaagaaaggatcatcagcaacaggtcaggatagttctacctttgggatagggctgctttccccgtgctagtatttctgtgactgttagtggcactgaggactgcaaacttttatgcaatattcttaataccctattgatattatgcactttaatcattccaaagaagccaagaatgctgtatagtgatgattccttcctaatgaattcatcttaactatttagaatgttatgtcccttttcttttggatagccaacttggtataaatgttatatggatttttctaaaatgactatataggacttaagactttgaaatgtaatttacttataaggggaaataattatgctttagcacatcattttagaaacgtcacattttagaaacattcagcttgctaacctacatgtttgggaattcattaaaaccagttgtctatatattttgtgccatgtatataagaacattacaatatatctttttctacatatgtagtatgtgcaaccagtggttctcagagtatggttctcagcccaccagctagtatcagtatcacctgggaactagttagaaatgtaaattctttggccccatcccagacatactgagtcagaaactctggaatagggcccccgcaatctgttttcacaagccctccaggtgattctgatgcacactttaaagtttaggaaccactgggctaagactctgttgagatatagagtttttctttccactcagactgatatagttatacattgttcttcatgtaaattcagcttaacctggttatctataatcttttattggcaaaagttaattctcagtactgcctatagagatacagtgtattttatgtacatacacaattagtctaattcttgataattcagttaatttagtttggcattttcctaccacttactaaaaggtttacattaaatgactgatttaaatatataggtgcaatgttctatgtttattttaattgttatgacatttaagtagctaatataattgaccggtgctaaagtctcctgtttatccataaaatgggtacattatgggcagtgtaatacaagctttcttttcattgcctagtactttaccagcagaccacagttttgccctggctagaccaaccctcagaacaaaatcatcattccttgtatttatatttgtatctgagatagtaaacaagatggctggccaggtcaacatggcaccttaacttatttttttaataggtaaaacttcttcaaaagtagcttgctttgtataagaactaagctatcagtatagatatagctatccttggagcttatgtttcagacaagaattatttactaaaataaataataaacaagataatgcattatacaatttgggcatttctcgtttctcaagtgtatgcatcatggtaaatataaactaaccacaagataggtagattgattcatttcattttaatctccttgtgtaattcagtacctccataattgttctaatcttcttcccactgtttacaaattaccagttaattaactcgtgaaagaaaaattcacatatcagaataaaaataaatgtatactcactttataaaaatcaccactgctgtctttccttaatactagcagtggaaatgtaagtggcttactctacaaattttggtgctggcaaatacataggcaaactgttgggagctgctctagttacattcctcccttcttattccctttttctcttcctcactttattgcataacatattcctgtacccaaagcattctaccacagttctatttgactcccacttgtaataactcctttaaaaaattccatgtttaaccatatgaccctgcttgcttactcatattctccctccctctccccttcctttctctctcttccagaagtcatttgcctggtttgaaatattttgtagggattgcttattatattattttagctgatgaacctcaggacaacgtctacacacacacacatacatacacgcacacaaaatctcagctgttgaagagtgggcttggaatcagacttctgtgtccagtaaaaaactcctgcactgaagtcattgtgacttgagtagttacagactgattccagtgaacttgatctaatttcttttgatctaatgaatgtgtctgcttaccttgtttccttttaattgataagctccaagtagttgctaattttttgacaactttaaatgagtttcattcacttcttttacttaatgttttaagtatagtaccaataatttcattaacctgttctcaagtggtttagctaccattctgccatttttaatttttatttaattttatttgcttgagcacactgatcaaccactgaactgccttcttccattgtcctgcaatgatataagggttacatttttgtgtatatggctttcatagttgggatttcagagcactgataccagatattttcagtttgttctctgggggaatttcatttgcatctatgtttttagctatctgtgataacttgttaaatattaaaaagatattttgcttctattggaacatttgtatactcgcaactatatttctgtaaacagctgcagtcaaaaataaaacactgaaagttttcattttgcagtggaaaaaag

SEQ ID NO: 350847 - DNA, 4913 bp, Homo sapiens
  misc_feature (3)..(3): n is a, c, g, or t
  misc_feature (14)..(14): n is a, c, g, or t
  misc_feature (1608)..(1608): n is a, c, g, or t
ggncacaaggactncagtgcaggagttttttactggacacagaagtctgattccaagcccactcttcaacagctgagattttgtgtgtgtgtatgtgtgtgtgtgtgtgtgtgtgtttccttattgtcattccattatatatccacaccaacatgggtgacgataattcaaagtcatattttgcctctaagcttgatcatgttacctttatgattaaagtatcatgttatttagccaatgcaaatctgttttaaaacaaatagtttaaaaaaagaacaagtttttaagggctttattatagaagaagtattaatgaaggactttccttcctccctccctttcctcccctccctgcctcccttcttcccttccatctccccctcctccctgccttctttgtttctccttcccttattcctccctccctcctttctcccttccttcctttcttccattcatccttccttgccttttatttttattttttgtaatatcacatgtgctgtagtttggaattttattctagtgcatttcttgctcatcagaacctcagctaatctacctaggaaaaatagtatcaaaggaaatgagaaagttgtatctgagtccctccagaactaagataattctttttgaccatttaagcctttataaatgcgttttgaccatttaagcctttataaatgcttgttttaggaaagtgaatctgttagatgcatcaacaaataatgaccaggacaaaacgatttaataattaaagtctcaaatcaccatggttatacattttcaccagaaatagtaatcttacaatttttcatttttctgatgaagatttctgttccaatatctgtttcctaatagattttttaaattaattagctttcctctgctttatgaccacaggttttatccctaaccgagacagctgtcttatatctgcatgccttagactgtgtggagggactccatgaagaaagaccataggttagaaaaataactcatagtatataccctagtaagtgggttagtagaatctcataacatgtattaaaaagaggttttcttctctgcttgtttgtgtcactagagcaaaattgtagagataatgctcataatgcagtaaatatcagaataatatctacaatatcatttgtggatggtcccaggtcccagtgctctagttactttacttcttttttttttttgagatggagtcttgctctgtctctcaggctagagcagtgtgcgatctcagctcactgcagcctccacctcccaggttcaagcgattctcctgcctcagcctcccaagtagccaggattacaggcaccctccactaggcccggctaattttttttgtatttttttagtagagatggggttttgccatgttggccaggctggtttcgaactcctaacctccagtgatccacctgcctcggcgtcccaaagtgctaggattacaggcatgagccaccacatccggcctaattacttctttaatccccatttatttttatgccattctagcctcatttattaataaaattatgtttttactttctctttcaggaaattttttaaattaatattttatatctagatcnaatgctatggaaaagtgcctttttatcatttataatttcatttttcactatttccaaaaacacataaacaaatagtttcagtaggtcccagcttttactttttccatttaaaccttcttttctccatttcttccctttggcttaagaataaaagaaaaggtacattgctagaattgtttctttgggagagggtaaaagattacagaattagactgttcagcctttatataaactaaatttgtcttcatctcaaccagctaatggtaggtcttatctgaatactcatgagaattttagcatctgtgaaactccatgcaccagatgtgtgtaaatttcaggaagaaagtgttgaaagcattttctctgatgttaattagatggaaataaatcactaaaacatagtttaggtaaagcctgattatgccacttttttttaactagacagggcaaagttgtttatgttagtgtacttcttgtctatcctcagttaatttacctagacaaaaagtgtcaaaggaaatgagaaaaaggttatatctgactccctccagacctaagataattccttttgatcagatacagtcagatggagtgccttggtttttgttaattttgcctctattccagctccttaccacagcggtggtgcttaaagaaaggatcatcagcaacaggtcaggatagttctacctttgggatagggctgctttccccgtgctagtatttctgtgactgttagtggcactgaggactgcaaacttttatgcaatattcttaataccctattgatattatgcactttaatcattccaaagaagccaagaatgctgtatagtgatgattccttcctaatgaattcatcttaactatttagaatgttatgtcccttttcttttggatagccaacttggtataaatgttatatggatttttctaaaatgactatataggacttaagactttgaaatgtaatttacttataaggggaaataattatgctttagcacatcattttagaaacgtcacattttagaaacattcagcttgctaacctacatgtttgggaattcattaaaaccagttgtctatatattttgtgccatgtatataagaacattacaatatatctttttctacatatgtagtatgtgcaaccagtggttctcagagtatggttctcagcccaccagctagtatcagtatcacctgggaactagttagaaatgtaaattctttggccccatcccagacatactgagtcagaaactctggaatagggcccccgcaatctgttttcacaagccctccaggtgattctgatgcacactttaaagtttaggaaccactgggctaagactctgttgagatatagagtttttctttccactcagactgatatagttatacattgttcttcatgtaaattcagcttaacctggttatctataatcttttattggcaaaagttaattctcagtactgcctatagagatacagtgtattttatgtacatacacaattagtctaattcttgataattcagttaatttagtttggcattttcctaccacttactaaaaggtttacattaaatgactgatttaaatatataggtgcaatgttctatgtttattttaattgttatgacatttaagtagctaatataattgaccggtgctaaagtctcctgtttatccataaaatgggtacattatgggcagtgtaatacaagctttcttttcattgcctagtactttaccagcagaccacagttttgccctggctagaccaaccctcagaacaaaatcatcattccttgtatttatatttgtatctgagatagtaaacaagatggctggccaggtcaacatggcaccttaacttatttttttaataggtaaaacttcttcaaaagtagcttgctttgtataagaactaagctatcagtatagatatagctatccttggagcttatgtttcagacaagaattatttactaaaataaataataaacaagataatgcattatacaatttgggcatttctcgtttctcaagtgtatgcatcatggtaaatataaactaaccacaagataggtagattgattcatttcattttaatctccttgtgtaattcagtacctccataattgttctaatcttcttcccactgtttacaaattaccagttaattaactcgtgaaagaaaaattcacatatcagaataaaaataaatgtatactcactttataaaaatcaccactgctgtctttccttaatactagcagtggaaatgtaagtggcttactctacaaattttggtgctggcaaatacataggcaaactgttgggagctgctctagttacattcctcccttcttattccctttttctcttcctcactttattgcataacatattcctgtacccaaagcattctaccacagttctatttgactcccacttgtaataactcctttaaaaaattccatgtttaaccatatgaccctgcttgcttactcatattctccctccctctccccttcctttctctctcttccagaagtcatttgcctggtttgaaatattttgtagggattgcttattatattattttagctgatgaacctcaggacaacgtctacacacacacacatacatacacgcacacaaaatctcagctgttgaagagtgggcttggaatcagacttctgtgtccagtaaaaaactcctgcactgaagtcattgtgacttgagtagttacagactgattccagtgaacttgatctaatttcttttgatctaatgaatgtgtctgcttaccttgtttccttttaattgataagctccaagtagttgctaattttttgacaactttaaatgagtttcattcacttcttttacttaatgttttaagtatagtaccaataatttcattaacctgttctcaagtggtttagctaccattctgccatttttaatttttatttaattttatttgcttgagcacactgatcaaccactgaactgccttcttccattgtcctgcaatgatataagggttacatttttgtgtatatggctttcatagttgggatttcagagcactgataccagatattttcagtttgttctctgggggaatttcatttgcatctatgtttttagctatctgtgataacttgttaaatattaaaaagatattttgcttctattggaacatttgtatactcgcaactatatttctgtaaacagctgcagtcaaaaataaaacactgaaagttttcattttgcagtggaaaaaag

SEQ ID NO: 350848 - DNA, 3653 bp, Homo sapiens
  misc_feature (348)..(348): n is a, c, g, or t
cttttgaaagggagtgagagagggaaaaattgtattatacaggccggacatggtggctcacacctgcaatcccagcacttcgggaggctgaggagggaggatcacctgaggtcaggagtttgagaccagcctggccaatatggtgaaaccctgtctctcctaaaaatacaataattagctcggcgtcccaaagtgctaggattacaggcatgagccaccacatccggcctaattacttctttaatccccatttatttttatgccattctagcctcatttattaataaaattatgtttttactttctctttcaggaaattttttaaattaatattttatatctagatcnaatgctatggaaaagtgcctttttatcatttataatttcatttttcactatttccaaaaacacataaacaaatagtttcagtaggtcccagcttttactttttccatttaaaccttcttttctccatttcttccctttggcttaagaataaaagaaaaggtacattgctagaattgtttctttgggagagggtaaaagattacagaattagactgttcagcctttatataaactaaatttgtcttcatctcaaccagctaatggtaggtcttatctgaatactcatgagaattttagcatctgtgaaactccatgcaccagatgtgtgtaaatttcaggaagaaagtgttgaaagcattttctctgatgttaattagatggaaataaatcactaaaacatagtttaggtaaagcctgattatgccacttttttttaactagacagggcaaagttgtttatgttagtgtacttcttgtctatcctcagttaatttacctagacaaaaagtgtcaaaggaaatgagaaaaaggttatatctgactccctccagacctaagataattccttttgatcagatacagtcagatggagtgccttggtttttgttaattttgcctctattccagctccttaccacagcggtggtgcttaaagaaaggatcatcagcaacaggtcaggatagttctacctttgggatagggctgctttccccgtgctagtatttctgtgactgttagtggcactgaggactgcaaacttttatgcaatattcttaataccctattgatattatgcactttaatcattccaaagaagccaagaatgctgtatagtgatgattccttcctaatgaattcatcttaactatttagaatgttatgtcccttttcttttggatagccaacttggtataaatgttatatggatttttctaaaatgactatataggacttaagactttgaaatgtaatttacttataaggggaaataattatgctttagcacatcattttagaaacgtcacattttagaaacattcagcttgctaacctacatgtttgggaattcattaaaaccagttgtctatatattttgtgccatgtatataagaacattacaatatatctttttctacatatgtagtatgtgcaaccagtggttctcagagtatggttctcagcccaccagctagtatcagtatcacctgggaactagttagaaatgtaaattctttggccccatcccagacatactgagtcagaaactctggaatagggcccccgcaatctgttttcacaagccctccaggtgattctgatgcacactttaaagtttaggaaccactgggctaagactctgttgagatatagagtttttctttccactcagactgatatagttatacattgttcttcatgtaaattcagcttaacctggttatctataatcttttattggcaaaagttaattctcagtactgcctatagagatacagtgtattttatgtacatacacaattagtctaattcttgataattcagttaatttagtttggcattttcctaccacttactaaaaggtttacattaaatgactgatttaaatatataggtgcaatgttctatgtttattttaattgttatgacatttaagtagctaatataattgaccggtgctaaagtctcctgtttatccataaaatgggtacattatgggcagtgtaatacaagctttcttttcattgcctagtactttaccagcagaccacagttttgccctggctagaccaaccctcagaacaaaatcatcattccttgtatttatatttgtatctgagatagtaaacaagatggctggccaggtcaacatggcaccttaacttatttttttaataggtaaaacttcttcaaaagtagcttgctttgtataagaactaagctatcagtatagatatagctatccttggagcttatgtttcagacaagaattatttactaaaataaataataaacaagataatgcattatacaatttgggcatttctcgtttctcaagtgtatgcatcatggtaaatataaactaaccacaagataggtagattgattcatttcattttaatctccttgtgtaattcagtacctccataattgttctaatcttcttcccactgtttacaaattaccagttaattaactcgtgaaagaaaaattcacatatcagaataaaaataaatgtatactcactttataaaaatcaccactgctgtctttccttaatactagcagtggaaatgtaagtggcttactctacaaattttggtgctggcaaatacataggcaaactgttgggagctgctctagttacattcctcccttcttattccctttttctcttcctcactttattgcataacatattcctgtacccaaagcattctaccacagttctatttgactcccacttgtaataactcctttaaaaaattccatgtttaaccatatgaccctgcttgcttactcatattctccctccctctccccttcctttctctctcttccagaagtcatttgcctggtttgaaatattttgtagggattgcttattatattattttagctgatgaacctcaggacaacgtctacacacacacacatacatacacgcacacaaaatctcagctgttgaagagtgggcttggaatcagacttctgtgtccagtaaaaaactcctgcactgaagtcattgtgacttgagtagttacagactgattccagtgaacttgatctaatttcttttgatctaatgaatgtgtctgcttaccttgtttccttttaattgataagctccaagtagttgctaattttttgacaactttaaatgagtttcattcacttcttttacttaatgttttaagtatagtaccaataatttcattaacctgttctcaagtggtttagctaccattctgccatttttaatttttatttaattttatttgcttgagcacactgatcaaccactgaactgccttcttccattgtcctgcaatgatataagggttacatttttgtgtatatggctttcatagttgggatttcagagcactgataccagatattttcagtttgttctctgggggaatttcatttgcatctatgtttttagctatctgtgataacttgttaaatattaaaaagatattttgcttctattggaacatttgtatactcgcaactatatttctgtaaacagctgcagtcaaaaataaaacactgaaagttttcattttgcagtggaaaaaag

SEQ ID NO: 350849 - DNA, 3377 bp, Homo sapiens
  misc_feature (72)..(72): n is a, c, g, or t
tcactttattgcttggattttctttggtgttggttaaggttgtggcctgctttttgctttatatctagatcnaatgctatggaaaagtgcctttttatcatttataatttcatttttcactatttccaaaaacacataaacaaatagtttcagtaggtcccagcttttactttttccatttaaaccttcttttctccatttcttccctttggcttaagaataaaagaaaaggtacattgctagaattgtttctttgggagagggtaaaagattacagaattagactgttcagcctttatataaactaaatttgtcttcatctcaaccagctaatggtaggtcttatctgaatactcatgagaattttagcatctgtgaaactccatgcaccagatgtgtgtaaatttcaggaagaaagtgttgaaagcattttctctgatgttaattagatggaaataaatcactaaaacatagtttaggtaaagcctgattatgccacttttttttaactagacagggcaaagttgtttatgttagtgtacttcttgtctatcctcagttaatttacctagacaaaaagtgtcaaaggaaatgagaaaaaggttatatctgactccctccagacctaagataattccttttgatcagatacagtcagatggagtgccttggtttttgttaattttgcctctattccagctccttaccacagcggtggtgcttaaagaaaggatcatcagcaacaggtcaggatagttctacctttgggatagggctgctttccccgtgctagtatttctgtgactgttagtggcactgaggactgcaaacttttatgcaatattcttaataccctattgatattatgcactttaatcattccaaagaagccaagaatgctgtatagtgatgattccttcctaatgaattcatcttaactatttagaatgttatgtcccttttcttttggatagccaacttggtataaatgttatatggatttttctaaaatgactatataggacttaagactttgaaatgtaatttacttataaggggaaataattatgctttagcacatcattttagaaacgtcacattttagaaacattcagcttgctaacctacatgtttgggaattcattaaaaccagttgtctatatattttgtgccatgtatataagaacattacaatatatctttttctacatatgtagtatgtgcaaccagtggttctcagagtatggttctcagcccaccagctagtatcagtatcacctgggaactagttagaaatgtaaattctttggccccatcccagacatactgagtcagaaactctggaatagggcccccgcaatctgttttcacaagccctccaggtgattctgatgcacactttaaagtttaggaaccactgggctaagactctgttgagatatagagtttttctttccactcagactgatatagttatacattgttcttcatgtaaattcagcttaacctggttatctataatcttttattggcaaaagttaattctcagtactgcctatagagatacagtgtattttatgtacatacacaattagtctaattcttgataattcagttaatttagtttggcattttcctaccacttactaaaaggtttacattaaatgactgatttaaatatataggtgcaatgttctatgtttattttaattgttatgacatttaagtagctaatataattgaccggtgctaaagtctcctgtttatccataaaatgggtacattatgggcagtgtaatacaagctttcttttcattgcctagtactttaccagcagaccacagttttgccctggctagaccaaccctcagaacaaaatcatcattccttgtatttatatttgtatctgagatagtaaacaagatggctggccaggtcaacatggcaccttaacttatttttttaataggtaaaacttcttcaaaagtagcttgctttgtataagaactaagctatcagtatagatatagctatccttggagcttatgtttcagacaagaattatttactaaaataaataataaacaagataatgcattatacaatttgggcatttctcgtttctcaagtgtatgcatcatggtaaatataaactaaccacaagataggtagattgattcatttcattttaatctccttgtgtaattcagtacctccataattgttctaatcttcttcccactgtttacaaattaccagttaattaactcgtgaaagaaaaattcacatatcagaataaaaataaatgtatactcactttataaaaatcaccactgctgtctttccttaatactagcagtggaaatgtaagtggcttactctacaaattttggtgctggcaaatacataggcaaactgttgggagctgctctagttacattcctcccttcttattccctttttctcttcctcactttattgcataacatattcctgtacccaaagcattctaccacagttctatttgactcccacttgtaataactcctttaaaaaattccatgtttaaccatatgaccctgcttgcttactcatattctccctccctctccccttcctttctctctcttccagaagtcatttgcctggtttgaaatattttgtagggattgcttattatattattttagctgatgaacctcaggacaacgtctacacacacacacatacatacacgcacacaaaatctcagctgttgaagagtgggcttggaatcagacttctgtgtccagtaaaaaactcctgcactgaagtcattgtgacttgagtagttacagactgattccagtgaacttgatctaatttcttttgatctaatgaatgtgtctgcttaccttgtttccttttaattgataagctccaagtagttgctaattttttgacaactttaaatgagtttcattcacttcttttacttaatgttttaagtatagtaccaataatttcattaacctgttctcaagtggtttagctaccattctgccatttttaatttttatttaattttatttgcttgagcacactgatcaaccactgaactgccttcttccattgtcctgcaatgatataagggttacatttttgtgtatatggctttcatagttgggatttcagagcactgataccagatattttcagtttgttctctgggggaatttcatttgcatctatgtttttagctatctgtgataacttgttaaatattaaaaagatattttgcttctattggaacatttgtatactcgcaactatatttctgtaaacagctgcagtcaaaaataaaacactgaaagttttcattttgcagtggaaaaaag

SEQ ID NO: 350850 - DNA, 5408 bp, Homo sapiens
  misc_feature (2)..(2): n is a, c, g, or t
  misc_feature (4)..(4): n is a, c, g, or t
  misc_feature (6)..(7): n is a, c, g, or t
  misc_feature (14)..(14): n is a, c, g, or t
  misc_feature (16)..(16): n is a, c, g, or t
  misc_feature (18)..(18): n is a, c, g, or t
cncncnntcccctncncncagaatctgtctatgatcttctcccaaaggagttacagttacctccatctagagaaacatctgtagcatcaatgagtcagacaagcggtggtgaggcaggctcgcctcctccagctgttgttgctgctggatttgcctctgaagcagggagtgtctgcattaaaaatgacctgtagttctctgcttcatagatgcttcttcagctccctcctcttcctccatgggcggtgcttgcagctcctttaccacctcttccagccctaccatttattctacctcagtcaccgacagcaaggctatgcaagtggagagctgctcctcagccgtgggggtaagtaacagaggggtaagtgaaaagcagttaaccagtaacacagttcagcagcatccatcaacaccgaagaggcacacagtcttgtacatctcaccaccacctgaggacttgctggataacagtcggatgtcctgccaggatgaggggtgtggattggaatctgagcagagctgcagtatgtggatggaggattccccctccaacttcagtaacatgagcaccagttcctacaatgataacactgaggtacctcgtaaatcacgaaaacgaaatccaaagcagaggccgggggtcaaacgacgagattgtgaagaatctaatatggatatatttgatgccgacagtgccaaagcacctcactatgtgctttctcagcttaccacggacaacaaaggcaactcaaaagcgggaaatggaacattggaaaaccaaaaaggaactggagtaaagaagagccctatgttgtgtggacaatatcctgttaaaagtgagggaaaggagctgaagatagttgtacaacctgagacacagcaccgagctcggtacctgactgagggcagccgtggctcagtgaaagatagaacacagcaaggctttcctacagtaaagctggaaggccataatgaacctgtagtgttgcaagtgtttgtgggcaacgactctggacgagtgaaaccacatggattttatcaggcctgcagagtaactggacgaaatacaactccttgcaaagaagtggacattgaaggcactactgttatagaagtcggccttgatcctagcaacaacatgacactggcggtggactgcgtagggatattgaaattgaggaatgctgatgtcgaagccagaataggaattgctggttccaagaagaaaagcactcgtgccagattggtttttcgagttaatatcatgaggaaagatggctccactttgacactgcaaacaccctcttctccaattttgtgtactcagccagcaggagtgccagaaatcttaaagaaaagcttgcatagctgttcagtgaaaggagaagaagaagtgtttttaatcggcaagaactttctgaaaggaactaaagttattttccaagaaaatgtttctgatgaaaactcttggaagtcagaagctgaaattgatatggaactatttcatcagaatcatcttattgtgaaggttcctccctatcatgaccaacatataactttgcctgtgtcagtgggaatatatgtagtgacaaatgctggaagatctcatgatgttcaaccattcacttacactccagacccagcagcagctggtgctttgaatgtaaatgtgaagaaggaaatatctagtccagcaagaccttgctcttttgaagaggccatgaaagcaatgaaaactactggatgtaatttagataaggtaaatattatccctaatgccctgatgactccactcataccaagcagtatgattaagagtgaagatgttactccaatggaagtaacagcagaaaaaagatcttccactatttttaagactacaaagtctgttggatcaactcagcaaacattagaaaacatctcaaacatagcaggaaatggctctttttcatcaccatcatcttcccacctaccttctgaaaatgaaaaacagcagcagattcagcccaaggcatacaacccagagaccctgacaactattcaaacccaggacatctcacagcctggtacttttccagcagtttctgcttctagtcagctgcccaacagcgatgcactattgcagcaggctacacagtttcagacaagagaaactcagtctagagagatattacagtcagatggtacagtggttaatttgtcacaactgactgaggcatcacaacaacagcagcagtcaccactacaagaacaagcacagactttacagcagcagatttcatcaaatatttttccatcaccaaatagtgtgagtcagcttcagaatactattcagcagctgcaagcagggagtttcacaggcagtactgctagtggcagcagtggaagtgttgacttggtccaacaagttttagaggcacagcagcagttatcttcagttttattttctgctccagatggtaatgagaatgttcaagagcagcttagtgcagatatttttcaacaagtcagtcaaattcagagtggtgtaagccctggaatgttttcctcaacagagccaacagtccataccagaccagataatttattacctggaagagctgaaagtgttcatccacagtctgaaaacacgttatctaatcaacagcagcagcagcagcagcaacagcaagtgatggaatcttcagccgcaatggtgatggagatgcaacagagtatctgccaggcagctgcccagattcagtcagagttattcccttcaactgcttcagcaaatggaaaccttcagcaatcgccagtttaccagcagacttctcacatgatgagtgcattgtctaccaatgaggatatgcaaatgcagtgtgaattgttttcttctcctcctgcagtttctggaaatgaaacttctacaactaccacacagcaggttgcaacccctggcactaccatgtttcagacatcaagttcaggagatggagaagaaactggaacacaagcaaaacagattcagaacagtgtctttcagaccatggtccaaatgcaacatagtggggacaatcaacctcaagttaaccttttttcatccacaaaaagtatgatgagtgttcagaatagtggtacccaacaacaaggtaatggtttattccagcaagggaatgagatgatgtcacttcaatctggaaattttttgcagcagtcttctcattcacaggcccaactttttcatcctcaaaatcctattgccgatgctcagaacctttcccaggaaactcaaggttctctctttcatagtccaaatcctattgtccacagtcagacttctacaacctcctctgaacaaatgcagcctccaatgtttcactctcaaagtaccattgctgtgttacagggctcttcagttcctcaagaccagcagtcaaccaacatatttctttcccagagtcccatgaataatcttcagactaacacagtagcccaagaagcattttttgcagcaccgaactcaatttctccacttcagtcaacatcaaacagtgaacaacaagctgctttccaacagcaagctccaatatcacacatccagactcctatgctttcccaagaacaggcacaacccccgcagcagggtttatttcagcctcaggtggccctgggctcccttccacctaatccaatgcctcaaagccaacaaggaaccatgttccagtcacagcactcaatagttgccatgcagagtaactctccatcccaggaacagcagcagcagcagcaacagcagcagcaacagcagcagcaacaacaacagagcattttattcagtaatcagaataccatggctacaatggcgtctccaaagcaaccaccaccaaacatgatattcaacccaaatcaaaatccaatggctaatcaggagcaacagaaccagtcaatttttcaccaacaaagtaacatggccccaatgaatcaagagcaacagcccatgcaatttcagagtcagtccacagtttcctcacttcagaacccaggtcctacccagtcggaatcatcacagacccccttgttccatagctctcctcagattcagttggtacaagggtcacctagttctcaagagcagcaagtaactctcttcttatctccagcatccatgtctgccttgcagaccagtataaatcaacaagatatgcaacagtctcctctttattcccctcagaacaacatgcctggaattcaaggagccacatcttcgcctcaaccacaggctactttatttcacaacacagcaggaggcacaatgaaccaactgcagaattctcctggctcatctcagcagacatcaggaatgttcttatttggcattcaaaataactgtagtcagcttttaacctctggaccagctacattgcctgatcagttgatggccataagtcagccaggccaaccacaaaacgagggccagccacctgtgacaacacttctttctcagcaaatgccagagaattctccactggcatcctctataaacaccaaccagaacatcgaaaagattgatttgcttgtttcattgcaaaaccaagggaacaacttgactggctccttttaactggatatgtaagtattgcattttggcttcttattgaaaagcatcagattttattcttcttaacagatttaggttaagtaatagtagttctaatcttttaaaatgtggctttctcacaagatgatacttttttactctgaataaaattattctgaatgatagcttatggtcatatagttaatacagaccaggccgggcgtggtggctcatgcctgtaatcccagcactttgagagaccaaggtgggcggatcacgaggtcaggcgatcgagaccatcctggctaacatggtgaaaccccgtctctactaaaatacaaaattagtcaggcatgatggcaggcgcctgtcatcccagctactagggaggctgaggcaggagaattgctggaacctgggaggcagaggttgcagtgagccgagatcacaccactgcactccagcctgggtaacagagcaagactgcttccaaaaaaaattttttttaattaaaaaaaaagtagatgactgcagcaaagaagagatttattagctcttcctttcaaggtatctgtgtactgtatataaacaacaaagctgaccaagagtggtacttgtgctaggcatattagtaactgctttgtaattgaaagcaagaaatatcataaacaagcattagatggctaactaccaaacaagttaagtcccttagggcaggtagattcagtcttttccttctctgagcaattcccttctgccataaactacagagaggtgattaatagaacattggagagttgaatgatacctagccaaactgtaccct

SEQ ID NO: 350851 - DNA, 1306 bp, Homo sapiens
agttccgggccgcgctgcgagactacgagacggtggtcaaggccaagccccagctgcggagctgcatcatggtaaatataaactaaccacaagataggtagattgattcatttcattttaatctccttgtgtaattcagtacctccataattgttctaatcttcttcccactgtttacaaattaccagttaattaactcgtgaaagaaaaattcacatatcagaataaaaataaatgtatactcactttataaaaatcaccactgctgtctttccttaatactagcagtggaaatgtaagtggcttactctacaaattttggtgctggcaaatacataggcaaactgttgggagctgctctagttacattcctcccttcttattccctttttctcttcctcactttattgcataacatattcctgtacccaaagcattctaccacagttctatttgactcccacttgtaataactcctttaaaaaattccatgtttaaccatatgaccctgcttgcttactcatattctccctccctctccccttcctttctctctcttccagaagtcatttgcctggtttgaaatattttgtagggattgcttattatattattttagctgatgaacctcaggacaacgtctacacacacacacatacatacacgcacacaaaatctcagctgttgaagagtgggcttggaatcagacttctgtgtccagtaaaaaactcctgcactgaagtcattgtgacttgagtagttacagactgattccagtgaacttgatctaatttcttttgatctaatgaatgtgtctgcttaccttgtttccttttaattgataagctccaagtagttgctaattttttgacaactttaaatgagtttcattcacttcttttacttaatgttttaagtatagtaccaataatttcattaacctgttctcaagtggtttagctaccattctgccatttttaatttttatttaattttatttgcttgagcacactgatcaaccactgaactgccttcttccattgtcctgcaatgatataagggttacatttttgtgtatatggctttcatagttgggatttcagagcactgataccagatattttcagtttgttctctgggggaatttcatttgcatctatgtttttagctatctgtgataacttgttaaatattaaaaagatattttgcttctattggaacatttgtatactcgcaactatatttctgtaaacagctgcagtcaaaaataaaacactgaaagttttcattttgcagtggaaaaaag

SEQ ID NO: 350852 - DNA, 3559 bp, Homo sapiens
  misc_feature (17)..(17): n is a, c, g, or t
tgcaacggaaacttttngctccacgaacagaaaagcaagagcaaaaactcagttaaatgcgttcttcctccatctttgcctagtccaaaaggaaaaaaaaagaaacagaaaaaagaaaaactgtttggaagagtagcgttgaggtttgctttttacctgtttttcctctagaacagccaggtggattcacatgatccaattttttaattgtcttctatgtcccactccgaataacccggatgccccagcacaatcagagagatcgttttttttaaaaaaaatttcagcctccaaaggtaggaggggagtgttaggggagaaagtactttaattaaaaatcaataactcgaggtttttgggatacggtttgccatttcctaattaagaaatgggtttgacagtccctttgtacacactgctatgcaaaccccaaagggttggcggctgtccgggcgatgacactccggtcccctgcgagaccccgggccagccaggcccgtccgccgccggcctctggggtccgtccccggctcgcgcagacctctcgcttctctcggctctgtctcctgcgctcagctctgctcggggccggccgcctcaggctcgccgccaccaggtcgttgcaaataccttttccctccccggggccccagcgcgcggccacctcccagcctccccccctcccaccctggcagcggggccctttcccggctcaggaacagcagcagcccgggccgcgccggcaggaagcgaggcccatgttgctgctgttccctggcgcgcctccccgccctccgggggccgccacggctcttccgcgctcccgggcacccccctccgcgcctgcgctgtgccccacgggggcggggctcagattcctgtcagcggcggcggcggtggcggcgaccgtcagttttcgctgaggagaaacacgaaacggaccctttggctctcccccttccccttccccgtcctgaacccctctcctggtcaccgagaatcagtccccgtggagttccccctccacctcgccatcgtttcctcggtcctcggcccagtggaagtcactaccctcgaggaggaggcagcggcagccgccctcgcgtcgccgcccccggttcggtgcccgcggtcccggagaggaggtgccgccgccaccgccgctccccccctcccgctgccctcgggccgggctgggtcgagctgcgatgccctcggacttcatctcattgctcagcgcggacctagacctggaatcgcccaagtccctctactcgcgagattctctgaagttacacccatcacagaattttcatagagctggactattggaagaatctgtctatgatcttctcccaaaggagttacagttacctccatctagagaaacatctgtagcatcaatgagtcagacaagcggtggtgaggcaggctcgcctcctccagctgttgttgctgctgatgcttcttcagctccctcctcttcctccatgggcggtgcttgcagctcctttaccacctcttccagccctaccatttattctacctcagtcaccgacagcaaggctatgcaagtggagagctgctcctcagccgtgggggtaagtaacagaggggtaagtgaaaagcagttaaccagtaacacagttcagcagcatccatcaacaccgaagaggcacacagtcttgtacatctcaccaccacctgaggacttgctggataacagtcggatgtcctgccaggatgaggggtgtggattggaatctgagcagagctgcagtatgtggatggaggattccccctccaacttcagtaacatgagcaccagttcctacaatgataacactgaggtacctcgtaaatcacgaaaacgaaatccaaagcagaggccgggggtcaaacgacgagattgtgaagaatctaatatggatatatttgatgccgacagtgccaaagcacctcactatgtgctttctcagcttaccacggacaacaaaggcaactcaaaagcgggaaatggaacattggaaaaccaaaaaggaactggagtaaagaagagccctatgttgtgtggacaatatcctgttaaaagtgagggaaaggagctgaagatagttgtacaacctgagacacagcaccgagctcggtacctgactgagggcagccgtggctcagtgaaagatagaacacagcaaggctttcctacagtaaagctggaaggccataatgaacctgtagtgttgcaagtgtttgtgggcaacgactctggacgagtgaaaccacatggattttatcaggcctgcagagtaactggacgaaatacaactccttgcaaagaagtggacattgaaggcactactgttatagaagtcggccttgatcctagcaacaacatgacactggcggtggactgcgtagggatattgaaattgaggaatgctgatgtcgaagccagaataggaattgctggttccaagaagaaaagcactcgtgccagattggtttttcgagttaatatcatgaggaaagatggctccactttgacactgcaaacaccctcttctccaattttgtgtactcagccagcaggagtgccagaaatcttaaagaaaagcttgcatagctgttcagtgaaaggagaagaagaagtgtttttaatcggcaagaactttctgaaaggaactaaagttattttccaagaaaatgtttctgatgaaaactcttggaagtcagaagctgaaattgatatggaactatttcatcagaatcatcttattgtgaaggttcctccctatcatgaccaacatataactttgcctgtgtcagtgggaatatatgtagtgacaaatgctggaagatctcatgatgttcaaccattcacttacactccagacccagcagcagctggtgctttgaatgtaaatgtgaagaaggaaatatctagtccagcaagaccttgctcttttgaagaggccatgaaaggtaccaagtaaattcttctcaaaaatcgtaattgggtgctcctgtatgttttctctagcacaccttactattttgttttctcttaggtacttataatactttgcagggtatcttcatattgtaaaataaatatgtgtttaactttactaaatgtagagacttgttttccaatttgatatttttcttgctgaatatgtttttatatatatatatatatatatttttttttttaagtatattggagtggaggagttttgtttttttttttaattacccaatattaaaagtatatgaggctgggcacagtggttcatgcctgtaatgccagcactttgggaggccgagtcaggtagatcatttgaggtcaggacttcaagacctgcctggccaacatggtgaaaccctgtctctactgaaaatacaaaaattagccaggggtggtggcaggtgcccgtagtcccagctgctcgggaggctgagtcaggagaatctctttaatctgggaggcaggggttgcagtgagccaaggtcatgccactgtactccagcctgggcgacagagcgagaccctgtctta

SEQ ID NO: 350853 - DNA, 667 bp, Homo sapiens
aaattactgtgttctgattacccttaattcacctaagcatatcaatagccgattattctacttccttgtttgactatctttgcttgtcgtacttttaaaaaatatatctcaaggaaaatgagacatcatgttatggagaattgtagtcctgtacctgttttctaaatgataataatatagagtggaaagctggtcctgcatatatttttagagcaatagtgatttttgatgtatgttacaaacttgtttaatgtttatatattcataatatttggggatttttattttttagactacaaagtctgttggatcaactcagcaaacattagaaaacatctcaaacatagcaggaaatggctctttttcatcaccatcatcttcccacctaccttctgaaaatgaaaaacagcagcagattcagcccaaggcatacaacccagagaccctgacaactattcaaacccaggacatctcacagcctggtacttttccagcagtttctgcttctagtcagctgcccaacagcgatgcactattgcagcaggctacacagtttcagacaagagaaactcagtctagagagatattacagtcagatggtacagtggttaatttgtcacaactgactgaggcatcacaacaacagcagcagtcaccactacaagaa

SEQ ID NO: 350854 - DNA, 324 bp, Homo sapiens
attgacaggattaggaacagtggtgaatgtttagaatttacccttttgtactttttgaacttggaactttgtaactttattacatattcacagaattaatagataagcaaaattttaaaaacaaacttgttgattaagaacattatactatttatacaacaaaatgtccctttatatattttttttctgtattagggtggactgcgtagggatattgaaattgaggaatgctgatgtcgaagccagaataggaattgctggttccaagaagaaaagcactcgtgccagattggtttttcgagttaatatcatgaggaaagatgg

SEQ ID NO: 350855 - DNA, 572 bp, Homo sapiens
tgaggcaataaaagctttatttttgctttacagcttaaaacgttaaatgagattttaaaaatctatggattgtaacataagtaaaataatgctatttgggcatttttaaaaattccatttcttaggccttatattgcttgaagcatttatattctaaaacataaccaaattctgactattcattttggggaaaaacaatcagttcacaaatcacattttcaatgggactgctagccagcataggtgaaaacatgtatagtgtatttactcttgaattgtacactgcagatgcttcttcagctccctcctcttcctccatgggcggtgcttgcagctcctttaccacctcttccagccctaccatttattctacctcagtcaccgacagcaaggctatgcaagtggagagctgctcctcagccgtgggggtaagtaacagaggggtaagtgaaaagcagttaaccagtaacacagttcagcagcatccatcaacaccgaagaggcacacagtcttgtacatctcaccaccacctgaggacttgctggataacagtcggatgtcctgccaggat

SEQ ID NO: 350856 - DNA, 5464 bp, Homo sapiens
  misc_feature (17)..(17): n is a, c, g, or t
  misc_feature (5422)..(5422): n is a, c, g, or t
tgcaacggaaacttttngctccacgaacagaaaagcaagagcaaaaactcagttaaatgcgttcttcctccatctttgcctagtccaaaaggaaaaaaaaagaaacagaaaaaagaaaaactgtttggaagagtagcgttgaggtttgctttttacctgtttttcctctagaacagccaggtggattcacatgatccaattttttaattgtcttctatgtcccactccgaataacccggatgccccagcacaatcagagagatcgttttttttaaaaaaaatttcagcctccaaaggtaggaggggagtgttaggggagaaagtactttaattaaaaatcaataactcgaggtttttgggatacggtttgccatttcctaattaagaaatgggtttgacagtccctttgtacacactgctatgcaaaccccaaagggttggcggctgtccgggcgatgacactccggtcccctgcgagaccccgggccagccaggcccgtccgccgccggcctctggggtccgtccccggctcgcgcagacctctcgcttctctcggctctgtctcctgcgctcagctctgctcggggccggccgcctcaggctcgccgccaccaggtcgttgcaaataccttttccctccccggggccccagcgcgcggccacctcccagcctccccccctcccaccctggcagcggggccctttcccggctcaggaacagcagcagcccgggccgcgccggcaggaagcgaggcccatgttgctgctgttccctggcgcgcctccccgccctccgggggccgccacggctcttccgcgctcccgggcacccccctccgcgcctgcgctgtgccccacgggggcggggctcagattcctgtcagcggcggcggcggtggcggcgaccgtcagttttcgctgaggagaaacacgaaacggaccctttggctctcccccttccccttccccgtcctgaacccctctcctggtcaccgagaatcagtccccgtggagttccccctccacctcgccatcgtttcctcggtcctcggcccagtggaagtcactaccctcgaggaggaggcagcggcagccgccctcgcgtcgccgcccccggttcggtgcccgcggtcccggagaggaggtgccgccgccaccgccgctccccccctcccgctgccctcgggccgggctgggtcgagctgcgatgccctcggacttcatctcattgctcagcgcggacctagacctggaatcgcccaagtccctctactcgcgagattctctgaagttacacccatcacagaattttcatagagctggactattggaagaatctgtctatgatcttctcccaaaggagttacagttacctccatctagagaaacatctgtagcatcaatgagtcagacaagcggtggtgaggcaggctcgcctcctccagctgttgttgctgctgatgcttcttcagctccctcctcttcctccatgggcggtgcttgcagctcctttaccacctcttccagccctaccatttattctacctcagtcaccgacagcaaggctatgcaagtggagagctgctcctcagccgtgggggtaagtaacagaggggtaagtgaaaagcagttaaccagtaacacagttcagcagcatccatcaacaccgaagaggcacacagtcttgtacatctcaccaccacctgaggacttgctggataacagtcggatgtcctgccaggatgaggggtgtggattggaatctgagcagagctgcagtatgtggatggaggattccccctccaacttcagtaacatgagcaccagttcctacaatgataacactgaggtacctcgtaaatcacgaaaacgaaatccaaagcagaggccgggggtcaaacgacgagattgtgaagaatctaatatggatatatttgatgccgacagtgccaaagcacctcactatgtgctttctcagcttaccacggacaacaaaggcaactcaaaagcgggaaatggaacattggaaaaccaaaaaggaactggagtaaagaagagccctatgttgtgtggacaatatcctgttaaaagtgagggaaaggagctgaagatagttgtacaacctgagacacagcaccgagctcggtacctgactgagggcagccgtggctcagtgaaagatagaacacagcaaggctttcctacagtaaagctggaaggccataatgaacctgtagtgttgcaagtgtttgtgggcaacgactctggacgagtgaaaccacatggattttatcaggcctgcagagtaactggacgaaatacaactccttgcaaagaagtggacattgaaggcactactgttatagaagtcggccttgatcctagcaacaacatgacactggcggtggactgcgtagggatattgaaattgaggaatgctgatgtcgaagccagaataggaattgctggttccaagaagaaaagcactcgtgccagattggtttttcgagttaatatcatgaggaaagatggctccactttgacactgcaaacaccctcttctccaattttgtgtactcagccagcaggagtgccagaaatcttaaagaaaagcttgcatagctgttcagtgaaaggagaagaagaagtgtttttaatcggcaagaactttctgaaaggaactaaagttattttccaagaaaatgtttctgatgaaaactcttggaagtcagaagctgaaattgatatggaactatttcatcagaatcatcttattgtgaaggttcctccctatcatgaccaacatataactttgcctgtgtcagtgggaatatatgtagtgacaaatgctggaagatctcatgatgttcaaccattcacttacactccagacccagcagcagctggtgctttgaatgtaaatgtgaagaaggaaatatctagtccagcaagaccttgctcttttgaagaggccatgaaagcaatgaaaactactggatgtaatttagataaggtaaatattatccctaatgccctgatgactccactcataccaagcagtatgattaagagtgaagatgttactccaatggaagtaacagcagaaaaaagatcttccactatttttaagactacaaagtctgttggatcaactcagcaaacattagaaaacatctcaaacatagcaggaaatggctctttttcatcaccatcatcttcccacctaccttctgaaaatgaaaaacagcagcagattcagcccaaggcatacaacccagagaccctgacaactattcaaacccaggacatctcacagcctggtacttttccagcagtttctgcttctagtcagctgcccaacagcgatgcactattgcagcaggctacacagtttcagacaagagaaactcagtctagagagatattacagtcagatggtacagtggttaatttgtcacaactgactgaggcatcacaacaacagcagcagtcaccactacaagaacaagcacagactttacagcagcagatttcatcaaatatttttccatcaccaaatagtgtgagtcagcttcagaatactattcagcagctgcaagcagggagtttcacaggcagtactgctagtggcagcagtggaagtgttgacttggtccaacaagttttagaggcacagcagcagttatcttcagttttattttctgctccagatggtaatgagaatgttcaagagcagcttagtgcagatatttttcaacaagtcagtcaaattcagagtggtgtaagccctggaatgttttcctcaacagagccaacagtccataccagaccagataatttattacctggaagagctgaaagtgttcatccacagtctgaaaacacgttatctaatcaacagcagcagcagcagcagcaacagcaagtgatggaatcttcagccgcaatggtgatggagatgcaacagagtatctgccaggcagctgcccagattcagtcagagttattcccttcaactgcttcagcaaatggaaaccttcagcaatcgccagtttaccagcagacttctcacatgatgagtgcattgtctaccaatgaggatatgcaaatgcagtgtgaattgttttcttctcctcctgcagtttctggaaatgaaacttctacaactaccacacagcaggttgcaacccctggcactaccatgtttcagacatcaagttcaggagatggagaagaaactggaacacaagcaaaacagattcagaacagtgtctttcagaccatggtccaaatgcaacatagtggggacaatcaacctcaagttaaccttttttcatccacaaaaagtatgatgagtgttcagaatagtggtacccaacaacaaggtaatggtttattccagcaagggaatgagatgatgtcacttcaatctggaaattttttgcagcagtcttctcattcacaggcccaactttttcatcctcaaaatcctattgccgatgctcagaacctttcccaggaaactcaaggttctctctttcatagtccaaatcctattgtccacagtcagacttctacaacctcctctgaacaaatgcagcctccaatgtttcactctcaaagtaccattgctgtgttacagggctcttcagttcctcaagaccagcagtcaaccaacatatttctttcccagagtcccatgaataatcttcagactaacacagtagcccaagaagcattttttgcagcaccgaactcaatttctccacttcagtcaacatcaaacagtgaacaacaagctgctttccaacagcaagctccaatatcacacatccagactcctatgctttcccaagaacaggcacaacccccgcagcagggtttatttcagcctcaggtggccctgggctcccttccacctaatccaatgcctcaaagccaacaaggaaccatgttccagtcacagcactcaatagttgccatgcagagtaactctccatcccaggaacagcagcagcagcagcaacagcagcagcaacagcagcagcaacaacaacagagcattttattcagtaatcagaataccatggctacaatggcgtctccaaagcaaccaccaccaaacatgatattcaacccaaatcaaaatccaatggctaatcaggagcaacagaaccagtcaatttttcaccaacaaagtaacatggccccaatgaatcaagagcaacagcccatgcaatttcagagtcagtccacagtttcctcacttcagaacccaggtcctacccagtcggaatcatcacagacccccttgttccatagctctcctcagattcagttggtacaagggtcacctagttctcaagagcagcaagtaactctcttcttatctccagcatccatgtctgccttgcagacagntagagccgagggggatcctgctacgacgacgacctgcagcac

SEQ ID NO: 350857 - DNA, 2192 bp, Homo sapiens
  misc_feature (17)..(17): n is a, c, g, or t
tgcaacggaaacttttngctccacgaacagaaaagcaagagcaaaaactcagttaaatgcgttcttcctccatctttgcctagtccaaaaggaaaaaaaaagaaacagaaaaaagaaaaactgtttggaagagtagcgttgaggtttgctttttacctgtttttcctctagaacagccaggtggattcacatgatccaattttttaattgtcttctatgtcccactccgaataacccggatgccccagcacaatcagagagatcgttttttttaaaaaaaatttcagcctccaaaggtaggaggggagtgttaggggagaaagtactttaattaaaaatcaataactcgaggtttttgggatacggtttgccatttcctaattaagaaatgggtttgacagtccctttgtacacactgctatgcaaaccccaaagggttggcggctgtccgggcgatgacactccggtcccctgcgagaccccgggccagccaggcccgtccgccgccggcctctggggtccgtccccggctcgcgcagacctctcgcttctctcggctctgtctcctgcgctcagctctgctcggggccggccgcctcaggctcgccgccaccaggtcgttgcaaataccttttccctccccggggccccagcgcgcggccacctcccagcctccccccctcccaccctggcagcggggccctttcccggctcaggaacagcagcagcccgggccgcgccggcaggaagcgaggcccatgttgctgctgttccctggcgcgcctccccgccctccgggggccgccacggctcttccgcgctcccgggcacccccctccgcgcctgcgctgtgccccacgggggcggggctcagattcctgtcagcggcggcggcggtggcggcgaccgtcagttttcgctgaggagaaacacgaaacggaccctttggctctcccccttccccttccccgtcctgaacccctctcctggtcaccgagaatcagtccccgtggagttccccctccacctcgccatcgtttcctcggtcctcggcccagtggaagtcactaccctcgaggaggaggcagcggcagccgccctcgcgtcgccgcccccggttcggtgcccgcggtcccggagaggaggtgccgccgccaccgccgctccccccctcccgctgccctcgggccgggctgggtcgagctgcgatgccctcggacttcatctcattgctcagcgcggacctagacctggaatcgcccaagtccctctactcgcgagattctctgaagttacacccatcacagaattttcatagagctggactattggaaggtcagcaaagtaccattttaaagcatattgtgttagtatgcaaaggctttctctgaaatggagtttaaatgggaaagtatgaaactttgcaaactcacacaatgtagttttctcctaaagagtctgatccttcttttagagcagctgaatgtttcaatgggttttgttgctgcgtttgatgtgcttgttggctgttctatctgctttgagaaacattgaaaaaaaaatcattttaaattatgtgttgagtgttctactttagaattccagaccttcattttagctttttatacacaaaatagaatgtgaaaaggcccaaacattaacatgaatataaaagagtgacaccaaacacataattagtttgaaaattcagaatttagaacatttatatgctgagcatttcaaaatatgttaattatttattgcaaaagcattgatgccattgttattgcattatacttaagggtaaggaaagccaagtaatagcgatgatgattgagctatgcttagaagaaaggggtttagaaagttctggaaatgttaatagagtctgtagattagtttaaacagcttacacttactttagaaaacttttggctttgtgtgtgtgtgtgttttaacattttaagacataaaatagtcttgtgtttttgtagattttgaagtgatttcacatatatcatctttaaatctttataattttggaattggacagcaaaggtactaatttccccattgtagagaagagaaactaaggctgaaattaagaaaccaaaaaaaaaaaagtcccacagtagaagaaataatactttctgcgtttcagttagtgctctttatgcaaagcggccaccgtg

SEQ ID NO: 350858 - DNA, 14124 bp, Homo sapiens
  misc_feature (17)..(17): n is a, c, g, or t
  misc_feature (7493)..(7493): n is a, c, g, or t
  misc_feature (10819)..(10819): n is a, c, g, or t
tgcaacggaaacttttngctccacgaacagaaaagcaagagcaaaaactcagttaaatgcgttcttcctccatctttgcctagtccaaaaggaaaaaaaaagaaacagaaaaaagaaaaactgtttggaagagtagcgttgaggtttgctttttacctgtttttcctctagaacagccaggtggattcacatgatccaattttttaattgtcttctatgtcccactccgaataacccggatgccccagcacaatcagagagatcgttttttttaaaaaaaatttcagcctccaaaggtaggaggggagtgttaggggagaaagtactttaattaaaaatcaataactcgaggtttttgggatacggtttgccatttcctaattaagaaatgggtttgacagtccctttgtacacactgctatgcaaaccccaaagggttggcggctgtccgggcgatgacactccggtcccctgcgagaccccgggccagccaggcccgtccgccgccggcctctggggtccgtccccggctcgcgcagacctctcgcttctctcggctctgtctcctgcgctcagctctgctcggggccggccgcctcaggctcgccgccaccaggtcgttgcaaataccttttccctccccggggccccagcgcgcggccacctcccagcctccccccctcccaccctggcagcggggccctttcccggctcaggaacagcagcagcccgggccgcgccggcaggaagcgaggcccatgttgctgctgttccctggcgcgcctccccgccctccgggggccgccacggctcttccgcgctcccgggcacccccctccgcgcctgcgctgtgccccacgggggcggggctcagattcctgtcagcggcggcggcggtggcggcgaccgtcagttttcgctgaggagaaacacgaaacggaccctttggctctcccccttccccttccccgtcctgaacccctctcctggtcaccgagaatcagtccccgtggagttccccctccacctcgccatcgtttcctcggtcctcggcccagtggaagtcactaccctcgaggaggaggcagcggcagccgccctcgcgtcgccgcccccggttcggtgcccgcggtcccggagaggaggtgccgccgccaccgccgctccccccctcccgctgccctcgggccgggctgggtcgagctgcgatgccctcggacttcatctcattgctcagcgcggacctagacctggaatcgcccaagtccctctactcgcgagaatctgtctatgatcttctcccaaaggagttacagttacctccatctagagaaacatctgtagcatcaatgagtcagacaagcggtggtgaggcaggctcgcctcctccagctgttgttgctgctgatgcttcttcagctccctcctcttcctccatgggcggtgcttgcagctcctttaccacctcttccagccctaccatttattctacctcagtcaccgacagcaaggctatgcaagtggagagctgctcctcagccgtgggggtaagtaacagaggggtaagtgaaaagcagttaaccagtaacacagttcagcagcatccatcaacaccgaagaggcacacagtcttgtacatctcaccaccacctgaggacttgctggataacagtcggatgtcctgccaggatgaggggtgtggattggaatctgagcagagctgcagtatgtggatggaggattccccctccaacttcagtaacatgagcaccagttcctacaatgataacactgaggtacctcgtaaatcacgaaaacgaaatccaaagcagaggccgggggtcaaacgacgagattgtgaagaatctaatatggatatatttgatgccgacagtgccaaagcacctcactatgtgctttctcagcttaccacggacaacaaaggcaactcaaaagcgggaaatggaacattggaaaaccaaaaaggaactggagtaaagaagagccctatgttgtgtggacaatatcctgttaaaagtgagggaaaggagctgaagatagttgtacaacctgagacacagcaccgagctcggtacctgactgagggcagccgtggctcagtgaaagatagaacacagcaaggctttcctacagtaaagctggaaggccataatgaacctgtagtgttgcaagtgtttgtgggcaacgactctggacgagtgaaaccacatggattttatcaggcctgcagagtaactggacgaaatacaactccttgcaaagaagtggacattgaaggcactactgttatagaagtcggccttgatcctagcaacaacatgacactggcggtggactgcgtagggatattgaaattgaggaatgctgatgtcgaagccagaataggaattgctggttccaagaagaaaagcactcgtgccagattggtttttcgagttaatatcatgaggaaagatggctccactttgacactgcaaacaccctcttctccaattttgtgtactcagccagcaggagtgccagaaatcttaaagaaaagcttgcatagctgttcagtgaaaggagaagaagaagtgtttttaatcggcaagaactttctgaaaggaactaaagttattttccaagaaaatgtttctgatgaaaactcttggaagtcagaagctgaaattgatatggaactatttcatcagaatcatcttattgtgaaggttcctccctatcatgaccaacatataactttgcctgtgtcagtgggaatatatgtagtgacaaatgctggaagatctcatgatgttcaaccattcacttacactccagacccagcagcagctggtgctttgaatgtaaatgtgaagaaggaaatatctagtccagcaagaccttgctcttttgaagaggccatgaaagcaatgaaaactactggatgtaatttagataaggtaaatattatccctaatgccctgatgactccactcataccaagcagtatgattaagagtgaagatgttactccaatggaagtaacagcagaaaaaagatcttccactatttttaagactacaaagtctgttggatcaactcagcaaacattagaaaacatctcaaacatagcaggaaatggctctttttcatcaccatcatcttcccacctaccttctgaaaatgaaaaacagcagcagattcagcccaaggcatacaacccagagaccctgacaactattcaaacccaggacatctcacagcctggtacttttccagcagtttctgcttctagtcagctgcccaacagcgatgcactattgcagcaggctacacagtttcagacaagagaaactcagtctagagagatattacagtcagatggtacagtggttaatttgtcacaactgactgaggcatcacaacaacagcagcagtcaccactacaagaacaagcacagactttacagcagcagatttcatcaaatatttttccatcaccaaatagtgtgagtcagcttcagaatactattcagcagctgcaagcagggagtttcacaggcagtactgctagtggcagcagtggaagtgttgacttggtccaacaagttttagaggcacagcagcagttatcttcagttttattttctgctccagatggtaatgagaatgttcaagagcagcttagtgcagatatttttcaacaagtcagtcaaattcagagtggtgtaagccctggaatgttttcctcaacagagccaacagtccataccagaccagataatttattacctggaagagctgaaagtgttcatccacagtctgaaaacacgttatctaatcaacagcagcagcagcagcagcaacagcaagtgatggaatcttcagccgcaatggtgatggagatgcaacagagtatctgccaggcagctgcccagattcagtcagagttattcccttcaactgcttcagcaaatggaaaccttcagcaatcgccagtttaccagcagacttctcacatgatgagtgcattgtctaccaatgaggatatgcaaatgcagtgtgaattgttttcttctcctcctgcagtttctggaaatgaaacttctacaactaccacacagcaggttgcaacccctggcactaccatgtttcagacatcaagttcaggagatggagaagaaactggaacacaagcaaaacagattcagaacagtgtctttcagaccatggtccaaatgcaacatagtggggacaatcaacctcaagttaaccttttttcatccacaaaaagtatgatgagtgttcagaatagtggtacccaacaacaaggtaatggtttattccagcaagggaatgagatgatgtcacttcaatctggaaattttttgcagcagtcttctcattcacaggcccaactttttcatcctcaaaatcctattgccgatgctcagaacctttcccaggaaactcaaggttctctctttcatagtccaaatcctattgtccacagtcagacttctacaacctcctctgaacaaatgcagcctccaatgtttcactctcaaagtaccattgctgtgttacagggctcttcagttcctcaagaccagcagtcaaccaacatatttctttcccagagtcccatgaataatcttcagactaacacagtagcccaagaagcattttttgcagcaccgaactcaatttctccacttcagtcaacatcaaacagtgaacaacaagctgctttccaacagcaagctccaatatcacacatccagactcctatgctttcccaagaacaggcacaacccccgcagcagggtttatttcagcctcaggtggccctgggctcccttccacctaatccaatgcctcaaagccaacaaggaaccatgttccagtcacagcactcaatagttgccatgcagagtaactctccatcccaggaacagcagcagcagcagcaacagcagcagcaacagcagcagcaacaacaacagagcattttattcagtaatcagaataccatggctacaatggcgtctccaaagcaaccaccaccaaacatgatattcaacccaaatcaaaatccaatggctaatcaggagcaacagaaccagtcaatttttcaccaacaaagtaacatggccccaatgaatcaagagcaacagcccatgcaatttcagagtcagtccacagtttcctcacttcagaacccaggtcctacccagtcggaatcatcacagacccccttgttccatagctctcctcagattcagttggtacaagggtcacctagttctcaagagcagcaagtaactctcttcttatctccagcatccatgtctgccttgcagaccagtataaatcaacaagatatgcaacagtctcctctttattcccctcagaacaacatgcctggaattcaaggagccacatcttcgcctcaaccacaggctactttatttcacaacacagcaggaggcacaatgaaccaactgcagaattctcctggctcatctcagcagacatcaggaatgttcttatttggcattcaaaataactgtagtcagcttttaacctctggaccagctacattgcctgatcagttgatggccataagtcagccaggccaaccacaaaacgagggccagccacctgtgacaacacttctttctcagcaaatgccagagaattctccactggcatcctctataaacaccaaccagaacatcgaaaagattgatttgcttgtttcattgcaaaaccaagggaacaacttgactggctccttttaactggatataaattccacgaagaaaatcctgattccaagatgtcctgagatcttgtggttccatgagaattattactttaaaaacaaaacaaaatataaaaaactgtgtttgagtaaactgatagattttactctgactgcaaaagagcacacctatgctgcttgttgcagtaactaaccaccaatgttaacatcttcatattttatattcctaataacagtgatgactgagaatctatttgagtttccagctggcagaattaattgttattattttcctaggcgcaatttccttaaacgtacagtttaaattcaaggctggaccactcagttattattgctattagaaaataatatatcatgtttacttttgttcttcattattttctttcctgcattgttttagtcaagtaatggcttttgaaaaagtaaagttcaataataactaaggctgtgatttttttcaatataaaaggcacagctgttggccaaagtgaaggaatcttttttcagttttattggagaaactgaagggtaacattctaacaagtaaactgtatgtgcagataaaagtactcttgatttaacacaaaggcagatgatacacttataaaactgggaacagctggaatgcttcttgattttattttttcagagagttgttagttctctgggtttctactaaggggtttagccataactgtgcatagaaaaataattatctgtaaaaaatgaaggggataatatatgataaattatgttctgatatcctcctacagtagtttaaattgacagaaaaatttgaatgttttcttcttaacccagtcttaggctggtattccctttttatatatatctatattacttttcacctctttttcactttactttagagaactattaatatactactggcttcatgaccctgtagcatctttggccactttaatctagggtgacctagcaatcctgcagcacagggcagagagtactgtcttaggaattattaggagttgattcctgagaaacaacacatttttccccatgaacggtgctgttctgaagtcttcaaatttttccctctaataggaaacagtataaattttaattaaaaaaaaaaggcaaactaaaatttcttgaaatatcacttctccctgatctgcagtgagtataaattcacttgtcacctcagtgctttacagtttgaagtggtcacttacctgatggttcccacaagccttaggctttacagggttgtatcattgacttaaaatgaagaattaacttgtgttacatctataaagagcaaaataacacactccagaacttggcagttgtagcattagttatacagttttgggtgttcttgccacccgtgggatgcctgcttctcactaccacctgtgtctggacacatgcttatgtctcattttccttttggcatgtggaaagctgtcaatgcagtgtaaggccaacgtgtgtgtggcttctatgtgttgagataatgttttggtatccttgtccgtttcatttattttttaagtgtacaaaaaataacctgttaattgttgaaggctacttttctgttcttttttttttttttttctatcctgtacatttagttgaactgtgcggaattgtggtgttggttttgtttacacagccagatttttccttctttttgttttgngatgatcttcctttgttctttgaatgtgctcttttgtctttttctcttttttctcatgttttcttccctccacctccacccctttctttctttctctctctgattgagaggcattgaattacgttttcagtagtacaggcttcttgccgatatgaagggaacttttcagaaagagacctactctgggtcatttaattttgaatacagttttcaatcgttcaagttttggatggtttatatctaatgtgtgtttcatttttttggaaagctatattttgtatttaggaaatggtatactattttgctatttgtactgagtgagtacattggcataaatatagaaatttatatatatacatatatataaactattcttttttgccacacatttttgtggtaaatttgtgagtttgtctgatgttctaccacaacgtggcgtctgataacagtgagggggggtggggtttgttatgtctttattgagtatttaagtatcttttgaaacaaatgacctgttcatctgtggccattccatcaggcagttagttccttgatgtcagtagtgggctaaaggcagcttactgtgtgtttgctggagctttcactcagccaagtgttagagtcaggaaacccattgaggcaatggcgtcaaatggtgtttcacaagaatgagccattcagtctttgctcactatatatttaatattttattattgttgttattgttattattaattggctttctgtattctatgccttttatttataaagacactaagaaaacccatgtttgtaattttaataacatttttcccatcttgtaatatccagagctactttataaattctctgaaccaaaagtattttcctcagtgtatctcttctcccccagcccctattgggaaaaattacccagtatagttcaggttatgaggaggatcagccacacaatccagtgcttcagtttgaaaatgtaaaattctaaccctaaagtagggttggttgaaatttcagacaaagcaaacccagcaggtataaaaagtagtataaatacaaatctgtaagttatttttgaattttctgaacttttttctaagagattacataggagactaaagaaatctatctgttcaagttctaattaggatgattgttaatactgcactgtggatgaagtggcgactggcttgtgtgctgacttctgtggtttagcaagaggtttattgttatcaaatgctaattggcaatgccaagtcactgggaccaattttctgttttataatatctaagtttagaacagaatatatacctgaactgtagtggtttgatcggatggagacagaaaacccgatttttattctcataaattttgtggttatttatacaagggctgtgctatgctaccatattcttgttcaataataataggtttgttgttttttttacattgttaaatgttccttacccctaaaggtcaatgttaagtacaacattctgaaaatacaatttggctacaaagagtattcatcttctttgaagctcagtggttgatatttgtgctaataatgcaatttcctgattactgttacaagttatagctacatatgggagagactcagtgagccagcaaaggccatagaaacaacaatttattaaatgtatttatggcagaaggacctaaataaactgtgagccaccttttcttctttatattgttacatttaagtgttcttgctttcagcaactcacattaatgcttggagcttatctctttctctctctctctctctctctctgtgtgtgtgtgtgtatgtgtgtgtgtgtgtgtgtgtgtttccttattgtcattccattatatatccacaccaacatgggtgacgataattcaaagtcatattttgcctctaagcttgatcatgttacctttatgattaaagtatcatgttatttagccaatgcaaatctgttttaaaacaaatagtttaaaaaaagaacaagtttttaagggctttattatagaagaagtattaatgaaggactttccttcctccctccctttcctcccctccctgcctcccttcttcccttccatctccccctcctccctgccttctttgtttctccttcccttattcctccctccctcctttctcccttccttcctttcttccattcatccttccttgccttttatttttattttttgtaatatcacatgtgctgtagtttggaattttattctagtgcatttcttgctcatcagaacctcagctaatctacctaggaaaaatagtatcaaaggaaatgagaaagttgtatctgagtccctccagaactaagataattctttttgaccatttaagcctttataaatgcgttttgaccatttaagcctttataaatgcttgttttaggaaagtgaatctgttagatgcatcaacaaataatgaccaggacaaaacgatttaataattaaagtctcaaatcaccatggttatacattttcaccagaaatagtaatcttacaatttttcatttttctgatgaagatttctgttccaatatctgtttcctaatagattttttaaattaattagctttcctctgctttatgaccacaggttttatccctaaccgagacagctgtcttatatctgcatgccttagactgtgtggagggactccatgaagaaagaccataggttagaaaaataactcatagtatataccctagtaagtgggttagtagaatctcataacatgtattaaaaagaggttttcttctctgcttgtttgtgtcactagagcaaaattgtagagataatgctcataatgcagtaaatatcagaataatatctacaatatcatttgtggatggtcccaggtcccagtgctctagttactttacttcttttttttttttgagatggagtcttgctctgtctctcaggctagagcagtgtgcgatctcagctcactgcagcctccacctcccaggttcaagcgattctcctgcctcagcctcccaagtagccaggattacaggcaccctccactaggcccggctaattttttttgtatttttttagtagagatggggttttgccatgttggccaggctggtttcgaactcctaacctccagtgatccacctgcctcggcgtcccaaagtgctaggattacaggcatgagccaccacatccggcctaattacttctttaatccccatttatttttatgccattctagcctcatttattaataaaattatgtttttactttctctttcaggaaattttttaaattaatattttatatctagatcnaatgctatggaaaagtgcctttttatcatttataatttcatttttcactatttccaaaaacacataaacaaatagtttcagtaggtcccagcttttactttttccatttaaaccttcttttctccatttcttccctttggcttaagaataaaagaaaaggtacattgctagaattgtttctttgggagagggtaaaagattacagaattagactgttcagcctttatataaactaaatttgtcttcatctcaaccagctaatggtaggtcttatctgaatactcatgagaattttagcatctgtgaaactccatgcaccagatgtgtgtaaatttcaggaagaaagtgttgaaagcattttctctgatgttaattagatggaaataaatcactaaaacatagtttaggtaaagcctgattatgccacttttttttaactagacagggcaaagttgtttatgttagtgtacttcttgtctatcctcagttaatttacctagacaaaaagtgtcaaaggaaatgagaaaaaggttatatctgactccctccagacctaagataattccttttgatcagatacagtcagatggagtgccttggtttttgttaattttgcctctattccagctccttaccacagcggtggtgcttaaagaaaggatcatcagcaacaggtcaggatagttctacctttgggatagggctgctttccccgtgctagtatttctgtgactgttagtggcactgaggactgcaaacttttatgcaatattcttaataccctattgatattatgcactttaatcattccaaagaagccaagaatgctgtatagtgatgattccttcctaatgaattcatcttaactatttagaatgttatgtcccttttcttttggatagccaacttggtataaatgttatatggatttttctaaaatgactatataggacttaagactttgaaatgtaatttacttataaggggaaataattatgctttagcacatcattttagaaacgtcacattttagaaacattcagcttgctaacctacatgtttgggaattcattaaaaccagttgtctatatattttgtgccatgtatataagaacattacaatatatctttttctacatatgtagtatgtgcaaccagtggttctcagagtatggttctcagcccaccagctagtatcagtatcacctgggaactagttagaaatgtaaattctttggccccatcccagacatactgagtcagaaactctggaatagggcccccgcaatctgttttcacaagccctccaggtgattctgatgcacactttaaagtttaggaaccactgggctaagactctgttgagatatagagtttttctttccactcagactgatatagttatacattgttcttcatgtaaattcagcttaacctggttatctataatcttttattggcaaaagttaattctcagtactgcctatagagatacagtgtattttatgtacatacacaattagtctaattcttgataattcagttaatttagtttggcattttcctaccacttactaaaaggtttacattaaatgactgatttaaatatataggtgcaatgttctatgtttattttaattgttatgacatttaagtagctaatataattgaccggtgctaaagtctcctgtttatccataaaatgggtacattatgggcagtgtaatacaagctttcttttcattgcctagtactttaccagcagaccacagttttgccctggctagaccaaccctcagaacaaaatcatcattccttgtatttatatttgtatctgagatagtaaacaagatggctggccaggtcaacatggcaccttaacttatttttttaataggtaaaacttcttcaaaagtagcttgctttgtataagaactaagctatcagtatagatatagctatccttggagcttatgtttcagacaagaattatttactaaaataaataataaacaagataatgcattatacaatttgggcatttctcgtttctcaagtgtatgcatcatggtaaatataaactaaccacaagataggtagattgattcatttcattttaatctccttgtgtaattcagtacctccataattgttctaatcttcttcccactgtttacaaattaccagttaattaactcgtgaaagaaaaattcacatatcagaataaaaataaatgtatactcactttataaaaatcaccactgctgtctttccttaatactagcagtggaaatgtaagtggcttactctacaaattttggtgctggcaaatacataggcaaactgttgggagctgctctagttacattcctcccttcttattccctttttctcttcctcactttattgcataacatattcctgtacccaaagcattctaccacagttctatttgactcccacttgtaataactcctttaaaaaattccatgtttaaccatatgaccctgcttgcttactcatattctccctccctctccccttcctttctctctcttccagaagtcatttgcctggtttgaaatattttgtagggattgcttattatattattttagctgatgaacctcaggacaacgtctacacacacacacatacatacacgcacacaaaatctcagctgttgaagagtgggcttggaatcagacttctgtgtccagtaaaaaactcctgcactgaagtcattgtgacttgagtagttacagactgattccagtgaacttgatctaatttcttttgatctaatgaatgtgtctgcttaccttgtttccttttaattgataagctccaagtagttgctaattttttgacaactttaaatgagtttcattcacttcttttacttaatgttttaagtatagtaccaataatttcattaacctgttctcaagtggtttagctaccattctgccatttttaatttttatttaattttatttgcttgagcacactgatcaaccactgaactgccttcttccattgtcctgcaatgatataagggttacatttttgtgtatatggctttcatagttgggatttcagagcactgataccagatattttcagtttgttctctgggggaatttcatttgcatctatgtttttagctatctgtgataacttgttaaatattaaaaagatattttgcttctattggaacatttgtatactcgcaactatatttctgtaaacagctgcagtcaaaaataaaacactgaaagttttcattttgcagtggaaaaaag

SEQ ID NO: 350859 - DNA, 14240 bp, Homo sapiens
  misc_feature (17)..(17): n is a, c, g, or t
  misc_feature (7609)..(7609): n is a, c, g, or t
  misc_feature (10935)..(10935): n is a, c, g, or t
tgcaacggaaacttttngctccacgaacagaaaagcaagagcaaaaactcagttaaatgcgttcttcctccatctttgcctagtccaaaaggaaaaaaaaagaaacagaaaaaagaaaaactgtttggaagagtagcgttgaggtttgctttttacctgtttttcctctagaacagccaggtggattcacatgatccaattttttaattgtcttctatgtcccactccgaataacccggatgccccagcacaatcagagagatcgttttttttaaaaaaaatttcagcctccaaaggtaggaggggagtgttaggggagaaagtactttaattaaaaatcaataactcgaggtttttgggatacggtttgccatttcctaattaagaaatgggtttgacagtccctttgtacacactgctatgcaaaccccaaagggttggcggctgtccgggcgatgacactccggtcccctgcgagaccccgggccagccaggcccgtccgccgccggcctctggggtccgtccccggctcgcgcagacctctcgcttctctcggctctgtctcctgcgctcagctctgctcggggccggccgcctcaggctcgccgccaccaggtcgttgcaaataccttttccctccccggggccccagcgcgcggccacctcccagcctccccccctcccaccctggcagcggggccctttcccggctcaggaacagcagcagcccgggccgcgccggcaggaagcgaggcccatgttgctgctgttccctggcgcgcctccccgccctccgggggccgccacggctcttccgcgctcccgggcacccccctccgcgcctgcgctgtgccccacgggggcggggctcagattcctgtcagcggcggcggcggtggcggcgaccgtcagttttcgctgaggagaaacacgaaacggaccctttggctctcccccttccccttccccgtcctgaacccctctcctggtcaccgagaatcagtccccgtggagttccccctccacctcgccatcgtttcctcggtcctcggcccagtggaagtcactaccctcgaggaggaggcagcggcagccgccctcgcgtcgccgcccccggttcggtgcccgcggtcccggagaggaggtgccgccgccaccgccgctccccccctcccgctgccctcgggccgggctgggtcgagctgcgatgccctcggacttcatctcattgctcagcgcggacctagacctggaatcgcccaagtccctctactcgcgagattctctgaagttacacccatcacagaattttcatagagctggactattggaagaatctgtctatgatcttctcccaaaggagttacagttacctccatctagagaaacatctgtagcatcaatgagtcagacaagcggtggtgaggcaggctcgcctcctccagctgttgttgctgctggatttgcctctgaagcagggagtgtctgcattaaaaatgacctgtagttctctgcttcatagatgcttcttcagctccctcctcttcctccatgggcggtgcttgcagctcctttaccacctcttccagccctaccatttattctacctcagtcaccgacagcaaggctatgcaagtggagagctgctcctcagccgtgggggtaagtaacagaggggtaagtgaaaagcagttaaccagtaacacagttcagcagcatccatcaacaccgaagaggcacacagtcttgtacatctcaccaccacctgaggacttgctggataacagtcggatgtcctgccaggatgaggggtgtggattggaatctgagcagagctgcagtatgtggatggaggattccccctccaacttcagtaacatgagcaccagttcctacaatgataacactgaggtacctcgtaaatcacgaaaacgaaatccaaagcagaggccgggggtcaaacgacgagattgtgaagaatctaatatggatatatttgatgccgacagtgccaaagcacctcactatgtgctttctcagcttaccacggacaacaaaggcaactcaaaagcgggaaatggaacattggaaaaccaaaaaggaactggagtaaagaagagccctatgttgtgtggacaatatcctgttaaaagtgagggaaaggagctgaagatagttgtacaacctgagacacagcaccgagctcggtacctgactgagggcagccgtggctcagtgaaagatagaacacagcaaggctttcctacagtaaagctggaaggccataatgaacctgtagtgttgcaagtgtttgtgggcaacgactctggacgagtgaaaccacatggattttatcaggcctgcagagtaactggacgaaatacaactccttgcaaagaagtggacattgaaggcactactgttatagaagtcggccttgatcctagcaacaacatgacactggcggtggactgcgtagggatattgaaattgaggaatgctgatgtcgaagccagaataggaattgctggttccaagaagaaaagcactcgtgccagattggtttttcgagttaatatcatgaggaaagatggctccactttgacactgcaaacaccctcttctccaattttgtgtactcagccagcaggagtgccagaaatcttaaagaaaagcttgcatagctgttcagtgaaaggagaagaagaagtgtttttaatcggcaagaactttctgaaaggaactaaagttattttccaagaaaatgtttctgatgaaaactcttggaagtcagaagctgaaattgatatggaactatttcatcagaatcatcttattgtgaaggttcctccctatcatgaccaacatataactttgcctgtgtcagtgggaatatatgtagtgacaaatgctggaagatctcatgatgttcaaccattcacttacactccagacccagcagcagctggtgctttgaatgtaaatgtgaagaaggaaatatctagtccagcaagaccttgctcttttgaagaggccatgaaagcaatgaaaactactggatgtaatttagataaggtaaatattatccctaatgccctgatgactccactcataccaagcagtatgattaagagtgaagatgttactccaatggaagtaacagcagaaaaaagatcttccactatttttaagactacaaagtctgttggatcaactcagcaaacattagaaaacatctcaaacatagcaggaaatggctctttttcatcaccatcatcttcccacctaccttctgaaaatgaaaaacagcagcagattcagcccaaggcatacaacccagagaccctgacaactattcaaacccaggacatctcacagcctggtacttttccagcagtttctgcttctagtcagctgcccaacagcgatgcactattgcagcaggctacacagtttcagacaagagaaactcagtctagagagatattacagtcagatggtacagtggttaatttgtcacaactgactgaggcatcacaacaacagcagcagtcaccactacaagaacaagcacagactttacagcagcagatttcatcaaatatttttccatcaccaaatagtgtgagtcagcttcagaatactattcagcagctgcaagcagggagtttcacaggcagtactgctagtggcagcagtggaagtgttgacttggtccaacaagttttagaggcacagcagcagttatcttcagttttattttctgctccagatggtaatgagaatgttcaagagcagcttagtgcagatatttttcaacaagtcagtcaaattcagagtggtgtaagccctggaatgttttcctcaacagagccaacagtccataccagaccagataatttattacctggaagagctgaaagtgttcatccacagtctgaaaacacgttatctaatcaacagcagcagcagcagcagcaacagcaagtgatggaatcttcagccgcaatggtgatggagatgcaacagagtatctgccaggcagctgcccagattcagtcagagttattcccttcaactgcttcagcaaatggaaaccttcagcaatcgccagtttaccagcagacttctcacatgatgagtgcattgtctaccaatgaggatatgcaaatgcagtgtgaattgttttcttctcctcctgcagtttctggaaatgaaacttctacaactaccacacagcaggttgcaacccctggcactaccatgtttcagacatcaagttcaggagatggagaagaaactggaacacaagcaaaacagattcagaacagtgtctttcagaccatggtccaaatgcaacatagtggggacaatcaacctcaagttaaccttttttcatccacaaaaagtatgatgagtgttcagaatagtggtacccaacaacaaggtaatggtttattccagcaagggaatgagatgatgtcacttcaatctggaaattttttgcagcagtcttctcattcacaggcccaactttttcatcctcaaaatcctattgccgatgctcagaacctttcccaggaaactcaaggttctctctttcatagtccaaatcctattgtccacagtcagacttctacaacctcctctgaacaaatgcagcctccaatgtttcactctcaaagtaccattgctgtgttacagggctcttcagttcctcaagaccagcagtcaaccaacatatttctttcccagagtcccatgaataatcttcagactaacacagtagcccaagaagcattttttgcagcaccgaactcaatttctccacttcagtcaacatcaaacagtgaacaacaagctgctttccaacagcaagctccaatatcacacatccagactcctatgctttcccaagaacaggcacaacccccgcagcagggtttatttcagcctcaggtggccctgggctcccttccacctaatccaatgcctcaaagccaacaaggaaccatgttccagtcacagcactcaatagttgccatgcagagtaactctccatcccaggaacagcagcagcagcagcaacagcagcagcaacagcagcagcaacaacaacagagcattttattcagtaatcagaataccatggctacaatggcgtctccaaagcaaccaccaccaaacatgatattcaacccaaatcaaaatccaatggctaatcaggagcaacagaaccagtcaatttttcaccaacaaagtaacatggccccaatgaatcaagagcaacagcccatgcaatttcagagtcagtccacagtttcctcacttcagaacccaggtcctacccagtcggaatcatcacagacccccttgttccatagctctcctcagattcagttggtacaagggtcacctagttctcaagagcagcaagtaactctcttcttatctccagcatccatgtctgccttgcagaccagtataaatcaacaagatatgcaacagtctcctctttattcccctcagaacaacatgcctggaattcaaggagccacatcttcgcctcaaccacaggctactttatttcacaacacagcaggaggcacaatgaaccaactgcagaattctcctggctcatctcagcagacatcaggaatgttcttatttggcattcaaaataactgtagtcagcttttaacctctggaccagctacattgcctgatcagttgatggccataagtcagccaggccaaccacaaaacgagggccagccacctgtgacaacacttctttctcagcaaatgccagagaattctccactggcatcctctataaacaccaaccagaacatcgaaaagattgatttgcttgtttcattgcaaaaccaagggaacaacttgactggctccttttaactggatataaattccacgaagaaaatcctgattccaagatgtcctgagatcttgtggttccatgagaattattactttaaaaacaaaacaaaatataaaaaactgtgtttgagtaaactgatagattttactctgactgcaaaagagcacacctatgctgcttgttgcagtaactaaccaccaatgttaacatcttcatattttatattcctaataacagtgatgactgagaatctatttgagtttccagctggcagaattaattgttattattttcctaggcgcaatttccttaaacgtacagtttaaattcaaggctggaccactcagttattattgctattagaaaataatatatcatgtttacttttgttcttcattattttctttcctgcattgttttagtcaagtaatggcttttgaaaaagtaaagttcaataataactaaggctgtgatttttttcaatataaaaggcacagctgttggccaaagtgaaggaatcttttttcagttttattggagaaactgaagggtaacattctaacaagtaaactgtatgtgcagataaaagtactcttgatttaacacaaaggcagatgatacacttataaaactgggaacagctggaatgcttcttgattttattttttcagagagttgttagttctctgggtttctactaaggggtttagccataactgtgcatagaaaaataattatctgtaaaaaatgaaggggataatatatgataaattatgttctgatatcctcctacagtagtttaaattgacagaaaaatttgaatgttttcttcttaacccagtcttaggctggtattccctttttatatatatctatattacttttcacctctttttcactttactttagagaactattaatatactactggcttcatgaccctgtagcatctttggccactttaatctagggtgacctagcaatcctgcagcacagggcagagagtactgtcttaggaattattaggagttgattcctgagaaacaacacatttttccccatgaacggtgctgttctgaagtcttcaaatttttccctctaataggaaacagtataaattttaattaaaaaaaaaaggcaaactaaaatttcttgaaatatcacttctccctgatctgcagtgagtataaattcacttgtcacctcagtgctttacagtttgaagtggtcacttacctgatggttcccacaagccttaggctttacagggttgtatcattgacttaaaatgaagaattaacttgtgttacatctataaagagcaaaataacacactccagaacttggcagttgtagcattagttatacagttttgggtgttcttgccacccgtgggatgcctgcttctcactaccacctgtgtctggacacatgcttatgtctcattttccttttggcatgtggaaagctgtcaatgcagtgtaaggccaacgtgtgtgtggcttctatgtgttgagataatgttttggtatccttgtccgtttcatttattttttaagtgtacaaaaaataacctgttaattgttgaaggctacttttctgttcttttttttttttttttctatcctgtacatttagttgaactgtgcggaattgtggtgttggttttgtttacacagccagatttttccttctttttgttttgngatgatcttcctttgttctttgaatgtgctcttttgtctttttctcttttttctcatgttttcttccctccacctccacccctttctttctttctctctctgattgagaggcattgaattacgttttcagtagtacaggcttcttgccgatatgaagggaacttttcagaaagagacctactctgggtcatttaattttgaatacagttttcaatcgttcaagttttggatggtttatatctaatgtgtgtttcatttttttggaaagctatattttgtatttaggaaatggtatactattttgctatttgtactgagtgagtacattggcataaatatagaaatttatatatatacatatatataaactattcttttttgccacacatttttgtggtaaatttgtgagtttgtctgatgttctaccacaacgtggcgtctgataacagtgagggggggtggggtttgttatgtctttattgagtatttaagtatcttttgaaacaaatgacctgttcatctgtggccattccatcaggcagttagttccttgatgtcagtagtgggctaaaggcagcttactgtgtgtttgctggagctttcactcagccaagtgttagagtcaggaaacccattgaggcaatggcgtcaaatggtgtttcacaagaatgagccattcagtctttgctcactatatatttaatattttattattgttgttattgttattattaattggctttctgtattctatgccttttatttataaagacactaagaaaacccatgtttgtaattttaataacatttttcccatcttgtaatatccagagctactttataaattctctgaaccaaaagtattttcctcagtgtatctcttctcccccagcccctattgggaaaaattacccagtatagttcaggttatgaggaggatcagccacacaatccagtgcttcagtttgaaaatgtaaaattctaaccctaaagtagggttggttgaaatttcagacaaagcaaacccagcaggtataaaaagtagtataaatacaaatctgtaagttatttttgaattttctgaacttttttctaagagattacataggagactaaagaaatctatctgttcaagttctaattaggatgattgttaatactgcactgtggatgaagtggcgactggcttgtgtgctgacttctgtggtttagcaagaggtttattgttatcaaatgctaattggcaatgccaagtcactgggaccaattttctgttttataatatctaagtttagaacagaatatatacctgaactgtagtggtttgatcggatggagacagaaaacccgatttttattctcataaattttgtggttatttatacaagggctgtgctatgctaccatattcttgttcaataataataggtttgttgttttttttacattgttaaatgttccttacccctaaaggtcaatgttaagtacaacattctgaaaatacaatttggctacaaagagtattcatcttctttgaagctcagtggttgatatttgtgctaataatgcaatttcctgattactgttacaagttatagctacatatgggagagactcagtgagccagcaaaggccatagaaacaacaatttattaaatgtatttatggcagaaggacctaaataaactgtgagccaccttttcttctttatattgttacatttaagtgttcttgctttcagcaactcacattaatgcttggagcttatctctttctctctctctctctctctctctgtgtgtgtgtgtgtatgtgtgtgtgtgtgtgtgtgtgtttccttattgtcattccattatatatccacaccaacatgggtgacgataattcaaagtcatattttgcctctaagcttgatcatgttacctttatgattaaagtatcatgttatttagccaatgcaaatctgttttaaaacaaatagtttaaaaaaagaacaagtttttaagggctttattatagaagaagtattaatgaaggactttccttcctccctccctttcctcccctccctgcctcccttcttcccttccatctccccctcctccctgccttctttgtttctccttcccttattcctccctccctcctttctcccttccttcctttcttccattcatccttccttgccttttatttttattttttgtaatatcacatgtgctgtagtttggaattttattctagtgcatttcttgctcatcagaacctcagctaatctacctaggaaaaatagtatcaaaggaaatgagaaagttgtatctgagtccctccagaactaagataattctttttgaccatttaagcctttataaatgcgttttgaccatttaagcctttataaatgcttgttttaggaaagtgaatctgttagatgcatcaacaaataatgaccaggacaaaacgatttaataattaaagtctcaaatcaccatggttatacattttcaccagaaatagtaatcttacaatttttcatttttctgatgaagatttctgttccaatatctgtttcctaatagattttttaaattaattagctttcctctgctttatgaccacaggttttatccctaaccgagacagctgtcttatatctgcatgccttagactgtgtggagggactccatgaagaaagaccataggttagaaaaataactcatagtatataccctagtaagtgggttagtagaatctcataacatgtattaaaaagaggttttcttctctgcttgtttgtgtcactagagcaaaattgtagagataatgctcataatgcagtaaatatcagaataatatctacaatatcatttgtggatggtcccaggtcccagtgctctagttactttacttcttttttttttttgagatggagtcttgctctgtctctcaggctagagcagtgtgcgatctcagctcactgcagcctccacctcccaggttcaagcgattctcctgcctcagcctcccaagtagccaggattacaggcaccctccactaggcccggctaattttttttgtatttttttagtagagatggggttttgccatgttggccaggctggtttcgaactcctaacctccagtgatccacctgcctcggcgtcccaaagtgctaggattacaggcatgagccaccacatccggcctaattacttctttaatccccatttatttttatgccattctagcctcatttattaataaaattatgtttttactttctctttcaggaaattttttaaattaatattttatatctagatcnaatgctatggaaaagtgcctttttatcatttataatttcatttttcactatttccaaaaacacataaacaaatagtttcagtaggtcccagcttttactttttccatttaaaccttcttttctccatttcttccctttggcttaagaataaaagaaaaggtacattgctagaattgtttctttgggagagggtaaaagattacagaattagactgttcagcctttatataaactaaatttgtcttcatctcaaccagctaatggtaggtcttatctgaatactcatgagaattttagcatctgtgaaactccatgcaccagatgtgtgtaaatttcaggaagaaagtgttgaaagcattttctctgatgttaattagatggaaataaatcactaaaacatagtttaggtaaagcctgattatgccacttttttttaactagacagggcaaagttgtttatgttagtgtacttcttgtctatcctcagttaatttacctagacaaaaagtgtcaaaggaaatgagaaaaaggttatatctgactccctccagacctaagataattccttttgatcagatacagtcagatggagtgccttggtttttgttaattttgcctctattccagctccttaccacagcggtggtgcttaaagaaaggatcatcagcaacaggtcaggatagttctacctttgggatagggctgctttccccgtgctagtatttctgtgactgttagtggcactgaggactgcaaacttttatgcaatattcttaataccctattgatattatgcactttaatcattccaaagaagccaagaatgctgtatagtgatgattccttcctaatgaattcatcttaactatttagaatgttatgtcccttttcttttggatagccaacttggtataaatgttatatggatttttctaaaatgactatataggacttaagactttgaaatgtaatttacttataaggggaaataattatgctttagcacatcattttagaaacgtcacattttagaaacattcagcttgctaacctacatgtttgggaattcattaaaaccagttgtctatatattttgtgccatgtatataagaacattacaatatatctttttctacatatgtagtatgtgcaaccagtggttctcagagtatggttctcagcccaccagctagtatcagtatcacctgggaactagttagaaatgtaaattctttggccccatcccagacatactgagtcagaaactctggaatagggcccccgcaatctgttttcacaagccctccaggtgattctgatgcacactttaaagtttaggaaccactgggctaagactctgttgagatatagagtttttctttccactcagactgatatagttatacattgttcttcatgtaaattcagcttaacctggttatctataatcttttattggcaaaagttaattctcagtactgcctatagagatacagtgtattttatgtacatacacaattagtctaattcttgataattcagttaatttagtttggcattttcctaccacttactaaaaggtttacattaaatgactgatttaaatatataggtgcaatgttctatgtttattttaattgttatgacatttaagtagctaatataattgaccggtgctaaagtctcctgtttatccataaaatgggtacattatgggcagtgtaatacaagctttcttttcattgcctagtactttaccagcagaccacagttttgccctggctagaccaaccctcagaacaaaatcatcattccttgtatttatatttgtatctgagatagtaaacaagatggctggccaggtcaacatggcaccttaacttatttttttaataggtaaaacttcttcaaaagtagcttgctttgtataagaactaagctatcagtatagatatagctatccttggagcttatgtttcagacaagaattatttactaaaataaataataaacaagataatgcattatacaatttgggcatttctcgtttctcaagtgtatgcatcatggtaaatataaactaaccacaagataggtagattgattcatttcattttaatctccttgtgtaattcagtacctccataattgttctaatcttcttcccactgtttacaaattaccagttaattaactcgtgaaagaaaaattcacatatcagaataaaaataaatgtatactcactttataaaaatcaccactgctgtctttccttaatactagcagtggaaatgtaagtggcttactctacaaattttggtgctggcaaatacataggcaaactgttgggagctgctctagttacattcctcccttcttattccctttttctcttcctcactttattgcataacatattcctgtacccaaagcattctaccacagttctatttgactcccacttgtaataactcctttaaaaaattccatgtttaaccatatgaccctgcttgcttactcatattctccctccctctccccttcctttctctctcttccagaagtcatttgcctggtttgaaatattttgtagggattgcttattatattattttagctgatgaacctcaggacaacgtctacacacacacacatacatacacgcacacaaaatctcagctgttgaagagtgggcttggaatcagacttctgtgtccagtaaaaaactcctgcactgaagtcattgtgacttgagtagttacagactgattccagtgaacttgatctaatttcttttgatctaatgaatgtgtctgcttaccttgtttccttttaattgataagctccaagtagttgctaattttttgacaactttaaatgagtttcattcacttcttttacttaatgttttaagtatagtaccaataatttcattaacctgttctcaagtggtttagctaccattctgccatttttaatttttatttaattttatttgcttgagcacactgatcaaccactgaactgccttcttccattgtcctgcaatgatataagggttacatttttgtgtatatggctttcatagttgggatttcagagcactgataccagatattttcagtttgttctctgggggaatttcatttgcatctatgtttttagctatctgtgataacttgttaaatattaaaaagatattttgcttctattggaacatttgtatactcgcaactatatttctgtaaacagctgcagtcaaaaataaaacactgaaagttttcattttgcagtggaaaaaag

SEQ ID NO: 350860 - DNA, 335 bp, Homo sapiens
ccagctgagttgtcaacagagaagccgccagacctgcggccgctgcctgcagaccttcccgttggaggccatcactgccttcatggaccacaagaagctgggctgtcagctcttcagaggccccagccgcggccagggctcaggtgagtaaagccgggtgcagtccccctctcaagttcgagggctgggcttcctgctggaaaggggctgggctggacggcagggcactgagcactacttcccctttctcgctccccatcgggtgcagcctaggcgtggccagggcctgcccgtcctagggcagggaccagtggtggcggtggagggggggcggg

SEQ ID NO: 350861 - DNA, 2355 bp, Homo sapiens
caaagtgggcggccacacgcacaccctcgtgcaacgtgaagctcacctgatgacccaccatggccagcaggctgcggaggtaacgctcccgaagggcggctcgtgcccgctgctcctgggattccagggattcttgagctatgggacactcctggatttcaggaacctctggcctcaagggggctctgcgtccatcaggggcaaagccacggctgaagccatcagggccccggggcagccggagcacaggcacgggaatgttcactggagtttgcattgtcttggctgttgagtgaagaaaaagagcaggaagtcattacatgggcttcaaacagagcctggcgcacaggaggcactcagtgaatgcttgcaaaatgaatttttattgtaatgcatttaatgaaatagcccagattactatcaggcacctaataagaaacgtgaccgactatttttctcgcttgggggtgcgtgtgggcatgccgtgtctcagtttcacccgccctaaaacgggatcagggatagctgtttcaatgccttgtgggaactcggtgtgattaaatttggtcactaagccaaacgcacgggacactgcctagattgagttaggccgccgtcagggccccagcagggcggctcggtcccctcccatgagccccgccctggtaggcggagccacgggcccggccagcacgtgtaagagttcgcggcgggtcgccgcagtcactcacctgagcgcgcacggtccgcgcgtcctccgctcgtgcgtcctccgcccgcccgcctgcctgcctgcccgcccgctcgctcgcccggcccgcgactcatgtcccgccgcaaggccggcagcgcgccccgccgagtagagcccgcgcccgccgccaacccagacgacgagatggaaatgcaggacctcgtcatcgaactcaagcccgagccagacgcgcagccccaacaggccccaaggctggggcccttctccccgaaggaggtgtcctcggcggggcggttcggcggcgaaccccaccactcccctggccccatgcccgccggggccgccctcctcgccctcggcccgcggaacccgtggaccctgtggacgccgttgaccccgaactatcccgaccgccagccctggaccgacaaacacccagatctgttgacctgcggccgctgcctgcagaccttcccgttggaggccatcactgccttcatggaccacaagaagctgggctgtcagctcttcagaggccccagccgcggccagggctcagaacgagaggagctgaaggccttgagctgcctgcgctgtggcaaacagttcacagtggcctggaagctgctgcgtcacgcccagtgggaccacggactgtccatctaccagacagaatcagaggccccggaggccccgctcctgggcctggccgaggtggctgcagccgtgtcggcagtggtggggccagcagctgaggccaagagcccccgtgcaagtggcagcggcctcacccggcggagccccacctgtcctgtgtgcaagaagaccctcagctccttcagcaacctcaaagtgcacatgcgctcacacacaggcgagcggccctatgcttgcgaccagtgtccctacgcctgcgcccagagcagcaagctcaaccgccacaagaagacccaccggcaggtgccgccccagagccccctcatggccgacaccagccaggagcaggcctctgcagcccctccggagccggctgtccatgctgctgcccccaccagcacccttccatgcagcggtggtgagggggctggagccgccgccacagcaggtgtccaggaacccggggctcctggcagtggggctcaagccggccctggtggagacacttggggagccatcaccacggaacaaagaactgaccctgcaaacagccagaaggcatcacccaaaaagatgcccaagtcagggggcaagagccgcgggcccgggggcagctgtgagttctgcgggaagcattttaccaacagcagcaacctgacggtgcaccggcgctcacacaccggggagcgcccctacacctgtgagttctgcaactacgcctgcgcccagagcagtaagctcaaccgccaccgccgcatgcacggcatgacgcctggcagcacccgcttcgagtgcccccactgccatgtgcccttcggcctgcgagccaccctggacaaacacctgcggcagaagcaccctgaggcggccggcgaggcctgagcccaggaaagcccccctcactgtccctggtaccgctgccaacacccattgacctcctcgtttttgcccgccttctccaagtaaattttcccttttattta

SEQ ID NO: 350862 - DNA, 2568 bp, Homo sapiens
caaagtgggcggccacacgcacaccctcgtgcaacgtgaagctcacctgatgacccaccatggccagcaggctgcggaggtaacgctcccgaagggcggctcgtgcccgctgctcctgggattccagggattcttgagctatgggacactcctggatttcaggaacctctggcctcaagggggctctgcgtccatcaggggcaaagccacggctgaagccatcagggccccggggcagccggagcacaggcacgggaatgttcactggagtttgcattgtcttggctgttgagtgaagaaaaagagcaggaagtcattacatgggcttcaaacagagcctggcgcacaggaggcactcagtgaatgcttgcaaaatgaatttttattgtaatgcatttaatgaaatagcccagattactatcaggcacctaataagaaacgtgaccgactatttttctcgcttgggggtgcgtgtgggcatgccgtgtctcagtttcacccgccctaaaacgggatcagggatagctgtttcaatgccttgtgggaactcggtgtgattaaatttggtcactaagccaaacgcacgggacactgcctagattgagttaggccgccgtcagggccccagcagggcggctcggtcccctcccatgagccccgccctggtaggcggagccacgggcccggccagcacgtgtaagagttcgcggcgggtcgccgcagtcactcacctgagcgcgcacggtccgcgcgtcctccgctcgtgcgtcctccgcccgcccgcctgcctgcctgcccgcccgctcgctcgcccggcccgcgactcatgtcccgccgcaaggccggcagcgcgccccgccgagtagagcccgcgcccgccgccaacccagacgacgagatggaaatgcaggacctcgtcatcgaactcaagcccgagccagacgcgcagccccaacaggccccaaggctggggcccttctccccgaaggaggtgtcctcggcggggcggttcggcggcgaaccccaccactcccctggccccatgcccgccggggccgccctcctcgccctcggcccgcggaacccgtggaccctgtggacgccgttgaccccgaactatcccggtgagcaccccgggccctgggcccagcctcccttacctttgaccctcgggtgggacccttccctttgggcatgggcccctcgccctgccttatctccttcgccccgtcctgcccctcaggcccccttctgaccttcggtttcccctctccttcagcaccctcagcccccatcctggccccaccccacgctcaccacccgcttcctccctgcagaccgccagccctggaccgacaaacacccagatctgttgacctgcggccgctgcctgcagaccttcccgttggaggccatcactgccttcatggaccacaagaagctgggctgtcagctcttcagaggccccagccgcggccagggctcagaacgagaggagctgaaggccttgagctgcctgcgctgtggcaaacagttcacagtggcctggaagctgctgcgtcacgcccagtgggaccacggactgtccatctaccagacagaatcagaggccccggaggccccgctcctgggcctggccgaggtggctgcagccgtgtcggcagtggtggggccagcagctgaggccaagagcccccgtgcaagtggcagcggcctcacccggcggagccccacctgtcctgtgtgcaagaagaccctcagctccttcagcaacctcaaagtgcacatgcgctcacacacaggcgagcggccctatgcttgcgaccagtgtccctacgcctgcgcccagagcagcaagctcaaccgccacaagaagacccaccggcaggtgccgccccagagccccctcatggccgacaccagccaggagcaggcctctgcagcccctccggagccggctgtccatgctgctgcccccaccagcacccttccatgcagcggtggtgagggggctggagccgccgccacagcaggtgtccaggaacccggggctcctggcagtggggctcaagccggccctggtggagacacttggggagccatcaccacggaacaaagaactgaccctgcaaacagccagaaggcatcacccaaaaagatgcccaagtcagggggcaagagccgcgggcccgggggcagctgtgagttctgcgggaagcattttaccaacagcagcaacctgacggtgcaccggcgctcacacaccggggagcgcccctacacctgtgagttctgcaactacgcctgcgcccagagcagtaagctcaaccgccaccgccgcatgcacggcatgacgcctggcagcacccgcttcgagtgcccccactgccatgtgcccttcggcctgcgagccaccctggacaaacacctgcggcagaagcaccctgaggcggccggcgaggcctgagcccaggaaagcccccctcactgtccctggtaccgctgccaacacccattgacctcctcgtttttgcccgccttctccaagtaaattttcccttttattta

SEQ ID NO: 350863 - DNA, 398 bp, Homo sapiens
gttcactggagtttgcattgtcttggctgttgagtgaagaaaaagagcaggaagtcattacatggtaagcatggggctaatggaggagggaggagtggaagcagaggctggtctaccaggcagctccactgcacctgccccagactgatccaccctcctaaaatctgtgccatcgtcccccaatggcttggatcagaaacaaaagtgtcacatgcacaaaaacatgagccccgtgaaggcaaggacctttgtctgcttttataatgtttttatctcaacttataggcaataaatatttgccaaaagatgaacctggccaggcatggtggctcatgcctgtaatcccagccctttgggaggccaaggcaggaggatcactttgaagctgggagtttgag

SEQ ID NO: 350864 - DNA, 313 bp, Homo sapiens
gattacaggcgtgagccactgtgcctggactaacttgtcctttttcttattaggctcttcctgtctctgcacctgaactgtgagccccttgcaagacaggaccctgcagatagaccaaggatgtgaaccagggctactcagtctggacactattgacatttggggctggataattatctgctatgttgtgggggctgtccaacgcataggtgtagggtttgagcagcatcctagcctctgcctcctattaatagatgccagtagcatcccatcttcaagttgtgacagccaaaaatgtcaccactggtgaaca

SEQ ID NO: 350865 - DNA, 638 bp, Homo sapiens
caaagtgggcggccacacgcacaccctcgtgcaacgtgaagctcacctgatgacccaccatggccagcaggctgcggaggtaacgctcccgaagggcggctcgtgcccgctgctcctgggattccagggattcttgagctatgggacactcctggatttcaggaacctctggcctcaagggggctctgcgtccatcaggggcaaagccacggctgaagccatcagggccccggggcagccggagcacaggcacgggaatgttcactggagtttgcattgtcttggctgttgagtgaagaaaaagagcaggaagtcattacatggctcttcctgtctctgcacctgaactgtgagccccttgcaagacaggaccctgcagatagaccaaggatgtgaaccagggctactcagtctggacactattgacatttggggctggataattatctgctatgttgtgggggctgtccaacgcataggtgtagggtttgagcagcatcctagcctctgcctcctattaatagatgccagtagcatcccatcttcaagttgtgacagccaaaaatgtcaccactggtgaacagtgaattggtgaatgtgaattgcatctcaatacagtttttttttaaagtctccat

SEQ ID NO: 350866 - DNA, 2726 bp, Homo sapiens
caaagtgggcggccacacgcacaccctcgtgcaacgtgaagctcacctgatgacccaccatggccagcaggctgcggaggtaacgctcccgaagggcggctcgtgcccgctgctcctgggattccagggattcttgagctatgggacactcctggatttcaggaacctctggcctcaagggggctctgcgtccatcaggggcaaagccacggctgaagccatcagggccccggggcagccggagcacaggcacgggaatgttcactggagtttgcattgtcttggctgttgagtgaagaaaaagagcaggaagtcattacatgggcttcaaacagagcctggcgcacaggaggcactcagtgaatgcttgcaaaatgaatttttattgtaatgcatttaatgaaatagcccagattactatcaggcacctaataagaaacgtgaccgactatttttctcgcttgggggtgcgtgtgggcatgccgtgtctcagtttcacccgccctaaaacgggatcagggatagctgtttcaatgccttgtgggaactcggtgtgattaaatttggtcactaagccaaacgcacgggacactgcctagattgagttaggccgccgtcagggccccagcagggcggctcggtcccctcccatgagccccgccctggtaggcggagccacgggcccggccagcacgtgtaagagttcgcggcgggtcgccgcagtcactcacctgagcgcgcacggtccgcgcgtcctccgctcgtgcgtcctccgcccgcccgcctgcctgcctgcccgcccgctcgctcgcccggcccgcgactcatgtcccgccgcaaggccggcagcgcgccccgccgagtagagcccgcgcccgccgccaacccagacgacgagatggaaatgcaggacctcgtcatcgaactcaagcccgagccagacgcgcagccccaacaggccccaaggctggggcccttctccccgaaggaggtgtcctcggcggggcggttcggcggcgaaccccaccactcccctggccccatgcccgccggggccgccctcctcgccctcggcccgcggaacccgtggaccctgtggacgccgttgaccccgaactatcccgaccgccagccctggaccgacaaacacccagatctgttgacctgcggccgctgcctgcagaccttcccgttggaggccatcactgccttcatggaccacaagaagctgggctgtcagctcttcagaggccccagccgcggccagggctcagaacgagaggagctgaaggccttgagctgcctgcgctgtggcaaacagttcacagtggcctggaagctgctgcgtcacgcccagtgggaccacggactgtccatctaccagacagaatcagaggccccggaggccccgctcctgggcctggccgaggtggctgcagccgtgtcggcagtggtggggccagcagctgaggccaagagcccccgtgcaagtggcagcggcctcacccggcggagccccacctgtcctgtgtgcaagaagaccctcagctccttcagcaacctcaaagtgcacatgcgctcacacacaggcgagcggccctatgcttgcgaccagtgtccctacgcctgcgcccagagcagcaagctcaaccgccacaagaagacccaccggcaggtgccgccccagagccccctcatggccgacaccagccaggagcaggcctctgcagcccctccggagccggctgtccatgctgctgcccccaccagcacccttccatgcagcggtggtgagggggctggagccgccgccacagcaggtgtccaggaacccggggctcctggcagtggggctcaagccggccctggtggagacacttggggagccatcaccacggaacaaagaactgaccctgcaaacagccagaaggcatcacccaaaaagatgcccaagtcagggggcaagagccgcgggcccgggggcagctgtgagttctgcgggaagcattttaccaacagcagcaacctgacggtgcaccggcgctcacacaccggggagcgcccctacacctgtgagttctgcaactacgcctgcgcccagagcagtaagctcaaccgccaccgccgcatgcacggcatgacgcctggcagcacccgcttcgagtgcccccactgccatgtgcccttcggcctgcgagccaccctggacaaacacctgcggcagaagcaccctgaggcggccggcgaggcctgagcccaggaaagcccccctcactgtccctggtaccgctgccaacacccattgacctcctcgtttttgcccgccttctccaagtaaattttcccttttatttaaacacaccacatcaaaccctaccctacgacgcttgtcacaacgcacaagccacagccccaacacaccccgccacccacgtcacaaacccatccgaccagcttccccttcccgccgcatgcacccatcgcaccacccaccacttcctaccacagcaaacgcagtcactcccccccgccgccatctactgcagacccaggcgcagctctcccgcggccacccaagaagaggggcgctctcacctgctcaacgccgcggcgcaccatacgtcgacgagaaccaccaaccagcgtccggacgccctcaactagcgggccatccgcacaccgagatcgcgacacacacagtcctctctatgcctcacacgacaccc

SEQ ID NO: 350867 - DNA, 1466 bp, Homo sapiens
caaagtgggcggccacacgcacaccctcgtgcaacgtgaagctcacctgatgacccaccatggccagcaggctgcggaggtaacgctcccgaagggcggctcgtgcccgctgctcctgggattccagggattcttgagctatgggacactcctggatttcaggaacctctggcctcaagggggctctgcgtccatcaggggcaaagccacggctgaagccatcagggccccggggcagccggagcacaggcacgggaatgttcactggagtttgcattgtcttggctgttgagtgaagaaaaagagcaggaagtcattacatgggcttcaaacagagcctggcgcacaggaggcactcagtgaatgcttgcaaaatgaatttttattgtaatgcatttaatgaaatagcccagattactatcaggcacctaataagaaacgtgaccgactatttttctcgcttgggggtgcgtgtgggcatgccgtgtctcagtttcacccgccctaaaacgggatcagggatagctgtttcaatgccttgtgggaactcggtgtgattaaatttggtcactaagccaaacgcacgggacactgcctagattgagttaggccgccgtcagggccccagcagggcggctcggtcccctcccatgagccccgccctggtaggcggagccacgggcccggccagcacgtgtaagagttcgcggcgggtcgccgcagtcactcacctgagcgcgcacggtccgcgcgtcctccgctcgtgcgtcctccgcccgcccgcctgcctgcctgcccgcccgctcgctcgcccggcccgcgactcatgtcccgccgcaaggccggcagcgcgccccgccgagtagagcccgcgcccgccgccaacccagacgacgagatggaaatgcaggacctcgtcatcgaactcaagcccgagccagacgcgcagccccaacaggccccaaggctggggcccttctccccgaaggaggtgtcctcggcggggcggttcggcggcgaaccccaccactcccctggccccatgcccgccggggccgccctcctcgccctcggcccgcggaacccgtggaccctgtggacgccgttgaccccgaactatcccgaccgccagccctggaccgacaaacacccagatctgttgacctgcggccgctgcctgcagaccttcccgttggaggccatcactgccttcatggaccacaagaagctgggctgtcagctcttcagaggccccagccgcggccagggctcaggtgagtaaagccgggtgcagtccccctctcaagttcgagggctgggcttcctgctggaaaggggctgggctggacggcagggcactgagcactacttcccctttctcgctccccatcgggtgcagcctaggcgtggccagggcctgcccgtcctagggcagggaccagtggtggcggtggagggggggcggg

SEQ ID NO: 350868 - DNA, 2161 bp, Homo sapiens
tcccacttttcccaaacaaagctcccggcaactttctccctcgcagcgccccgcccgcccgcggctccccagccccaggccgggaggcccagatgggggaaccccgggctggggccgccctggacgatggcagcggctggacgggcagtgaggaaggcagtgaggagggtaccggcggcagtgagggggctgggggtgacgggggcccggatgcagagggggtgtggagcccagacattgagcagagcttccaggaggccctggccatctatccaccctgcggccgccggaaaataattttgtctgatgaaggcaagatgtatggtcggaatgaactgatcgcccgctacatcaagctgagaacggggaagacccgaactcgaaaacaggtttctagtcacatccaggttttggcccgaaggaaatcaagggaaatccagtccaagttgaaggaccaggtttccaaggacaaggctttccagacaatggcaaccatgtcctctgcccagctcatctccgcgccttctctgcaggccaaactgggtcccactggtcctcaggcctctgagcttttccagttttggtctggaggatctgggcccccctggaatgttccagatgtgaagccattctcacagacaccgttcaccttgtcactgactcccccatctactgacctcccagggtacgagcccccccaagccctctcacccctgcccccacctaccccatcgcccccagcctggcaggctcggggcctgggcaccgcccggttgcagctggtagagttctcagccttcgtggaaccgccagatgcagttgattcttaccagaggcacctgttcgtgcacatcagccagcactgccccagccccggagcgccgccgctcgagagtgtggacgtccggcagatctacgacaaattccctgagaaaaagggtggcctccgagagctatatgatcgtggccccccccatgccttcttcctggtcaagttctgggcggacctgaactggggcccaagtggtgaggaggcaggggccggtggcagcatcagcagtggtggcttctacggagtgagcagccagtatgagagcctggaacacatgaccctcacctgttcctccaaggtctgctcttttggcaagcaggtggtggagaaggtggagacggaacgggcccagctggaggacggcagatttgtgtaccgcctgctgcgctcgcccatgtgcgagtacctggtgaatttcttgcacaagttgcggcagctgcctgagcgatacatgatgaacagcgtcctggaaaacttcaccatcctccaggtggtgacaaacagagacacccaggaactgctgctctgcaccgcctatgtcttcgaggtctccaccagcgagcgtggggcccagcatcacatttaccgcctggtcagggactgaagggggaccccaaaactggctcaccccccagaacaccctcctcccagggagggtcctccagctcacctcatgcttcttatttggggagagggctgtgatgtaaaggggttgacctcagaggcctaagcaactggggccatcccccccattagaggggcccccaaaacttggttggagagctgaacaggctgggactgaggaaaggataaaccccgatattgggacctcacagtgggtgtctgaaaggacagatcactccggagtatcagggattgtggggacaggagtgagacaaccccccaggtacagcactggcttttcttttcagcccctgacaggccacccccactcctctgcatgtcttggagagcgctagttacacattggcttgtcccctttactttttcccagccacccctccccctgaaatttctgcccctctctaccaccctcactccatgacctgtgagatcacaaagtgaagatgaaccctttctgtgcaggagcagagccaggtgggccctggacattttttttttttttaatataacgagatatttataagtgggtgctagggtcttgactttatctccgctgcacaagcagtgtgttgaactttctaatctcatccctctcctaagtgagccctgagctagacggtttccttcctcccctctcaaagtttgtttgtttgtgttctgacagaggataaagctattttacca

SEQ ID NO: 350869 - DNA, 800 bp, Homo sapiens
tcccacttttcccaaacaaagctcccggcaactttctccctcgcagcgccccgcccgcccgcggctccccagccccaggccgggaggtaggaaggcgccggcgggagtcggggatcctgctttggggtgtgcccagatgggggaaccccgggctggggccgccctggacgatggcagcggctggacgggcagtgaggaaggcagtgaggagggtaccggcggcagtgagggggctgggggtgacgggggcccggatgcagagggggtgtggagcccagacattgagcagagcttccaggaggccctggccatctatccaccctgcggccgccggaaaataattttgtctgatgaaggcaagatgtatggtcggaatgaactgatcgcccgctacatcaagctgagaacggggaagacccgaactcgaaaacaggtttctagtcacatccaggttttggcccgaaggaaatcaagggaaatccagtccaagttgaaggaccaggtttccaaggacaaggctttccagacaatggcaaccatgtcctctgcccagctcatctccgcgccttctctgcaggccaaactgggtcccactggtcctcaggcctctgagcttttccagttttggtctggaggatctgggcccccctggaatgttccagatgtgaagccattctcacagacaccgttcaccttgtcactgactcccccatctactgacctcccaggaagaaactccttcccagaagccccccagcagatttcccctaacgtctcattggctaggactgtgtcacatg

SEQ ID NO: 350870 - DNA, 630 bp, Homo sapiens
gggttttgcgggtataattacattcaggatctcaggatactgcattatctgtgtgacccctaaatctgatgacaagtgtctgttttttgtttttgtttttgagacagagcctcgctctgtcacccaggctggagtgctgtggtgtgatctcggctcactgcaacctccgcctcccaggttcaagcaattctctgcctcagcctcccgagtaaatgtgattacaggcaggcgcctgccagcacacccagctgattttagtatttttagtagagatggggtttcaccatcttggccaggctggtcttgaattcctgacctcgtgatccacccacttcagcttcccaaagttctgggattacaggcgtgagccaccgcacccggctgacaagtgtccttctaagaaacacacagaggagaagacacagaagaggagagcaccatgtgatggtagacacagaaattggagttctacagccacaagccaaggaactcctggagccaccaggagatggaagatgcaaagaactgattttctctcagagcctctggagggagtgtggccctggtgacaccttgattttggacttctggcctacagaaccatgtgagaatacatttctgttgttctaa

SEQ ID NO: 350871 - DNA, 4002 bp, Homo sapiens
gcccctgtcccccagcttgtggttctgtgggtctctcctggtctcggcctcagctgctgccctgagtctctgtccctgccctttctaggcccagatgggggaaccccgggctggggccgccctggacgatggcagcggctggacgggcagtgaggaaggcagtgaggagggtaccggcggcagtgagggggctgggggtgacgggggcccggatgcagagggggtgtggagcccagacattgagcagagcttccaggaggccctggccatctatccaccctgcggccgccggaaaataattttgtctgatgaaggcaagatgtatggtcggaatgaactgatcgcccgctacatcaagctgagaacggggaagacccgaactcgaaaacaggtttctagtcacatccaggttttggcccgaaggaaatcaagggaaatccagtccaagttgaaggaccaggtttccaaggacaaggctttccagacaatggcaaccatgtcctctgcccagctcatctccgcgccttctctgcaggccaaactgggtcccactggtcctcaggcctctgagcttttccagttttggtctggaggatctgggcccccctggaatgttccagatgtgaagccattctcacagacaccgttcaccttgtcactgactcccccatctactgacctcccagggtacgagcccccccaagccctctcacccctgcccccacctaccccatcgcccccagcctggcaggctcggggcctgggcaccgcccggttgcagctggtagagttctcagccttcgtggaaccgccagatgcagttgattcttaccagaggcacctgttcgtgcacatcagccagcactgccccagccccggagcgccgccgctcgagagtgtggacgtccggcagatctacgacaaattccctgagaaaaagggtggcctccgagagctatatgatcgtggccccccccatgccttcttcctggtcaagttctgggcggacctgaactggggcccaagtggtgaggaggcaggggccggtggcagcatcagcagtggtggcttctacggagtgagcagccagtatgagagcctggaacacatgaccctcacctgttcctccaaggtctgctcttttggcaagcaggtggtggagaaggtggagacggaacgggcccagctggaggacggcagatttgtgtaccgcctgctgcgctcgcccatgtgcgagtacctggtgaatttcttgcacaagttgcggcagctgcctgagcgatacatgatgaacagcgtcctggaaaacttcaccatcctccaggtggtgacaaacagagacacccaggaactgctgctctgcaccgcctatgtcttcgaggtctccaccagcgagcgtggggcccagcatcacatttaccgcctggtcagggactgaagggggaccccaaaactggctcaccccccagaacaccctcctcccagggagggtcctccagctcacctcatgcttcttatttggggagagggctgtgatgtaaaggggttgacctcagaggcctaagcaactggggccatcccccccattagaggggcccccaaaacttggttggagagctgaacaggctgggactgaggaaaggataaaccccgatattgggacctcacagtgggtgtctgaaaggacagatcactccggagtatcagggattgtggggacaggagtgagacaaccccccaggtacagcactggcttttcttttcagcccctgacaggccacccccactcctctgcatgtcttggagagcgctagttacacattggcttgtcccctttactttttcccagccacccctccccctgaaatttctgcccctctctaccaccctcactccatgacctgtgagatcacaaagtgaagatgaaccctttctgtgcaggagcagagccaggtgggccctggacattttttttttttttaatataacgagatatttataagtgggtgctagggtcttgactttatctccgctgcacaagcagtgtgttgaactttctaatctcatccctctcctaagtgagccctgagctagacggtttccttcctcccctctcaaagtttgtttgtttgtgttctgacagaggataaagctattttaccaaaaacgcaggggatttatttgaggtttgggtgaaaaataatcttgtgggtggtggtaggccgacagatggggacaggaagctgtggacgaaagccccaggtcccgtgggagaggtgacagcagcaggggcacgcagccacgtgggtccccaggggaatgtgaaggcggagggctccaggcgaactggggattaaacaaatatttacaggcagcagggaagtgcccagcgcacgtgacgggggcggggcgggactttggggagggcggggcctaacggtatcgagcgagccggttgtagacgtggtccaggtttctgcacaggaatatcgagagcgtcatgaacccgagctatagagaaaggagatgaggcgtgagccaccgcacccggctgacaagtgtccttctaagaaacacacagaggagaagacacagaagaggagagcaccatgtgatggtagacacagaaattggagttctacagccacaagccaaggaactcctggagccaccaggagatggaagatgcaaagaactgattttctctcagagcctctggagggagtgtggccctggtgacaccttgattttggacttctggcctacagaaccatgcacacaggaggacttcatttcccaggtctccttgcagtgaagttgaggccatgtgactggtcttgggccaatggaatgggtgcagaagggacacagcccatttctagactcagcctgaaatgtcctccataatccttactctttctcccttcactcactggctgcaggaagctgagaattatccttggacttacataaagcattttggactttatgtaagtaacaacctgttgtattaagctactaagattttacggttgtttgttaaatcagctaaccttaaacatcctaacaactacaaatagaatacctgttactgcatacataaaaatacaaaaattagctggatgtggtcccacctgtagtcccagctactcgggaggctgaggcaggagaattgcttgaacctgggaggcggaggttgtggtgagctgagatcgcaccactgcactgcagcctgggcaacagagcaggactctatctcaaaaaaaaaacacaataaacatttcttacctactgtagtttttgtgggtcaggaatctgggagcagcttagttggatgatttctgctcacagtgttttatgaggttgcagtcaagatgttggctggggctgtagtcatctggagatttaactacggctggaggatccacttcaccatggttcactcacctggtgctggttgctggcaggaaatttcagctcttctcttatatggatctcttcacagattgcttgagtgtcctcaccgtatggtgactggcttcctttacagaaatcagttgaagggaatgggcaagtaagaaacagcaatgctttttatgacctagtcctgaagttccccaccattacttatgttcattggaagccagttgctaaggagagcctgcactcaaagattggggaaatagactttatctttcaaagtgttgaagaatttgcagacgtattttaaaaccaccacacaatccatcaacacatcatgtcggctctattcttgaaatagatccagaatttgaccacttttcaccatctccattgctattacccagatctaatcaacaccatcacttgcctggactagagatttcctcctcactgggctctctgcttctatctttagcccattgctatgatttggctgtgtccccacccaaaatctcatcttgaattataatcttcataatccccatgtgtcaaaggagagaccaggtggaggtaactgaa

SEQ ID NO: 350872 - DNA, 2811 bp, Homo sapiens
ctccctcacacccaggagtccaggcctccagcccccgctccctcagacccaggagtccaggccccagatcctcctccctcagtcctaggagtccgggccccagcccctcctccctcagactcaggagttcaggccccagatcctcctccctcagacccaggaataccccccagctcctcttccctcagacccaggagtccaggtccccagcccctcctccctcagacccagtggtccagagtcccagccctctcagcttcaagtcccttgagggtggggtttgggggaagcttgctgagttctgtgttcctccaggcccagatgggggaaccccgggctggggccgccctggacgatggcagcggctggacgggcagtgaggaaggcagtgaggagggtaccggcggcagtgagggggctgggggtgacgggggcccggatgcagagggggtgtggagcccagacattgagcagagcttccaggaggccctggccatctatccaccctgcggccgccggaaaataattttgtctgatgaaggcaagatgtatggtcggaatgaactgatcgcccgctacatcaagctgagaacggggaagacccgaactcgaaaacaggtttctagtcacatccaggttttggcccgaaggaaatcaagggaaatccagtccaagttgaaggaccaggtttccaaggacaaggctttccagacaatggcaaccatgtcctctgcccagctcatctccgcgccttctctgcaggccaaactgggtcccactggtcctcaggcctctgagcttttccagttttggtctggaggatctgggcccccctggaatgttccagatgtgaagccattctcacagacaccgttcaccttgtcactgactcccccatctactgacctcccagggtacgagcccccccaagccctctcacccctgcccccacctaccccatcgcccccagcctggcaggctcggggcctgggcaccgcccggttgcagctggtagagttctcagccttcgtggaaccgccagatgcagttgattcttaccagaggcacctgttcgtgcacatcagccagcactgccccagccccggagcgccgccgctcgagagtgtggacgtccggcagatctacgacaaattccctgagaaaaagggtggcctccgagagctatatgatcgtggccccccccatgccttcttcctggtcaagttctgggcggacctgaactggggcccaagtggtgaggaggcaggggccggtggcagcatcagcagtggtggcttctacggagtgagcagccagtatgagagcctggaacacatgaccctcacctgttcctccaaggtctgctcttttggcaagcaggtggtggagaaggtggagacggaacgggcccagctggaggacggcagatttgtgtaccgcctgctgcgctcgcccatgtgcgagtacctggtgaatttcttgcacaagttgcggcagctgcctgagcgatacatgatgaacagcgtcctggaaaacttcaccatcctccaggtggtgacaaacagagacacccaggaactgctgctctgcaccgcctatgtcttcgaggtctccaccagcgagcgtggggcccagcatcacatttaccgcctggtcagggactgaagggggaccccaaaactggctcaccccccagaacaccctcctcccagggagggtcctccagctcacctcatgcttcttatttggggagagggctgtgatgtaaaggggttgacctcagaggcctaagcaactggggccatcccccccattagaggggcccccaaaacttggttggagagctgaacaggctgggactgaggaaaggataaaccccgatattgggacctcacagtgggtgtctgaaaggacagatcactccggagtatcagggattgtggggacaggagtgagacaaccccccaggtacagcactggcttttcttttcagcccctgacaggccacccccactcctctgcatgtcttggagagcgctagttacacattggcttgtcccctttactttttcccagccacccctccccctgaaatttctgcccctctctaccaccctcactccatgacctgtgagatcacaaagtgaagatgaaccctttctgtgcaggagcagagccaggtgggccctggacattttttttttttttaatataacgagatatttataagtgggtgctagggtcttgactttatctccgctgcacaagcagtgtgttgaactttctaatctcatccctctcctaagtgagccctgagctagacggtttccttcctcccctctcaaagtttgtttgtttgtgttctgacagaggataaagctattttaccaaaaacgcaggggatttatttgaggtttgggtgaaaaataatcttgtgggtggtggtaggccgacagatggggacaggaagctgtggacgaaagccccaggtcccgtgggagaggtgacagcagcaggggcacgcagccacgtgggtccccaggggaatgtgaaggcggagggctccaggcgaactggggattaaacaaatatttacaggcagcagggaagtgcccagcgcacgtgacgggggcggggcgggactttggggagggcggggcctaacggtatcgagcgagccggttgtagacgtggtccaggtttctgcacaggaatatcgagagcgtcatgaacccgagctatagagaaaggagatgaggtcagagaagtcgaaggggtgctggcgagacgggggtgatgcccacccgggcg

SEQ ID NO: 350873 - DNA, 3730 bp, Homo sapiens
ctccctcacacccaggagtccaggcctccagcccccgctccctcagacccaggagtccaggccccagatcctcctccctcagtcctaggagtccgggccccagcccctcctccctcagactcaggagttcaggccccagatcctcctccctcagacccaggaataccccccagctcctcttccctcagacccaggagtccaggtccccagcccctcctccctcagacccagtggtccagagtcccagccctctcagcttcaagtcccttgagggtggggtttgggggaagcttgctgagttctgtgttcctccaggcccagatgggggaaccccgggctggggccgccctggacgatggcagcggctggacgggcagtgaggaaggcagtgaggagggtaccggcggcagtgagggggctgggggtgacgggggcccggatgcagagggggtgtggagcccagacattgagcagagcttccaggaggccctggccatctatccaccctgcggccgccggaaaataattttgtctgatgaaggcaagatgtatggtcggaatgaactgatcgcccgctacatcaagctgagaacggggaagacccgaactcgaaaacaggtttctagtcacatccaggttttggcccgaaggaaatcaagggaaatccagtccaagttgaaggaccaggtttccaaggacaaggctttccagacaatggcaaccatgtcctctgcccagctcatctccgcgccttctctgcaggccaaactgggtcccactggtcctcaggcctctgagcttttccagttttggtctggaggatctgggcccccctggaatgttccagatgtgaagccattctcacagacaccgttcaccttgtcactgactcccccatctactgacctcccagggtacgagcccccccaagccctctcacccctgcccccacctaccccatcgcccccagcctggcaggctcggggcctgggcaccgcccggttgcagctggtagagttctcagccttcgtggaaccgccagatgcagttgattcttaccagaggcacctgttcgtgcacatcagccagcactgccccagccccggagcgccgccgctcgagagtgtggacgtccggcagatctacgacaaattccctgagaaaaagggtggcctccgagagctatatgatcgtggccccccccatgccttcttcctggtcaagttctgggcggacctgaactggggcccaagtggtgaggaggcaggggccggtggcagcatcagcagtggtggcttctacggagtgagcagccagtatgagagcctggaacacatgaccctcacctgttcctccaaggtctgctcttttggcaagcaggtggtggagaaggtggagacggaacgggcccagctggaggacggcagatttgtgtaccgcctgctgcgctcgcccatgtgcgagtacctggtgaatttcttgcacaagttgcggcagctgcctgagcgatacatgatgaacagcgtcctggaaaacttcaccatcctccaggtggtgacaaacagagacacccaggaactgctgctctgcaccgcctatgtcttcgaggtctccaccagcgagcgtggggcccagcatcacaaagtgaagatgaaccctttctgtgcaggagcagagccaggtgggccctggacattttttttttttttaatataacgagatatttataagtgggtgctagggtcttgactttatctccgctgcacaagcagtgtgttgaactttctaatctcatccctctcctaagtgagccctgagctagacggtttccttcctcccctctcaaagtttgtttgtttgtgttctgacagaggataaagctattttaccaaaaacgcaggggatttatttgaggtttgggtgaaaaataatcttgtgggtggtggtaggccgacagatggggacaggaagctgtggacgaaagccccaggtcccgtgggagaggtgacagcagcaggggcacgcagccacgtgggtccccaggggaatgtgaaggcggagggctccaggcgaactggggattaaacaaatatttacaggcagcagggaagtgcccagcgcacgtgacgggggcggggcgggactttggggagggcggggcctaacggtatcgagcgagccggttgtagacgtggtccaggtttctgcacaggaatatcgagagcgtcatgaacccgagctatagagaaaggagatgaggcgtgagccaccgcacccggctgacaagtgtccttctaagaaacacacagaggagaagacacagaagaggagagcaccatgtgatggtagacacagaaattggagttctacagccacaagccaaggaactcctggagccaccaggagatggaagatgcaaagaactgattttctctcagagcctctggagggagtgtggccctggtgacaccttgattttggacttctggcctacagaaccatgcacacaggaggacttcatttcccaggtctccttgcagtgaagttgaggccatgtgactggtcttgggccaatggaatgggtgcagaagggacacagcccatttctagactcagcctgaaatgtcctccataatccttactctttctcccttcactcactggctgcaggaagctgagaattatccttggacttacataaagcattttggactttatgtaagtaacaacctgttgtattaagctactaagattttacggttgtttgttaaatcagctaaccttaaacatcctaacaactacaaatagaatacctgttactgcatacataaaaatacaaaaattagctggatgtggtcccacctgtagtcccagctactcgggaggctgaggcaggagaattgcttgaacctgggaggcggaggttgtggtgagctgagatcgcaccactgcactgcagcctgggcaacagagcaggactctatctcaaaaaaaaaacacaataaacatttcttacctactgtagtttttgtgggtcaggaatctgggagcagcttagttggatgatttctgctcacagtgttttatgaggttgcagtcaagatgttggctggggctgtagtcatctggagatttaactacggctggaggatccacttcaccatggttcactcacctggtgctggttgctggcaggaaatttcagctcttctcttatatggatctcttcacagattgcttgagtgtcctcaccgtatggtgactggcttcctttacagaaatcagttgaagggaatgggcaagtaagaaacagcaatgctttttatgacctagtcctgaagttccccaccattacttatgttcattggaagccagttgctaaggagagcctgcactcaaagattggggaaatagactttatctttcaaagtgttgaagaatttgcagacgtattttaaaaccaccacacaatccatcaacacatcatgtcggctctattcttgaaatagatccagaatttgaccacttttcaccatctccattgctattacccagatctaatcaacaccatcacttgcctggactagagatttcctcctcactgggctctctgcttctatctttagcccattgctatgatttggctgtgtccccacccaaaatctcatcttgaattataatcttcataatccccatgtgtcaaaggagagaccaggtggaggtaactgaa

SEQ ID NO: 350874 - DNA, 985 bp, Homo sapiens
ctccctcacacccaggagtccaggcctccagcccccgctccctcagacccaggagtccaggccccagatcctcctccctcagtcctaggagtccgggccccagcccctcctccctcagactcaggagttcaggccccagatcctcctccctcagacccaggaataccccccagctcctcttccctcagacccaggagtccaggtccccagcccctcctccctcagacccagtggtccagagtcccagccctctcagcttcaagtcccttgagggtggggtttgggggaagcttgctgagttctgtgttcctccaggcccagatgggggaaccccgggctggggccgccctggacgatggcagcggctggacgggcagtgaggaaggcagtgaggagggtaccggcggcagtgagggggctgggggtgacgggggcccggatgcagagggggtgtggagcccagacattgagcagagcttccaggaggccctggccatctatccaccctgcggccgccggaaaataattttgtctgatgaaggcaagatgtatggtcggaatgaactgatcgcccgctacatcaagctgagaacggggaagacccgaactcgaaaacaggtttctagtcacatccaggttttggcccgaaggaaatcaagggaaatccagtccaagttgaaggaccaggtttccaaggacaaggctttccagacaatggcaaccatgtcctctgcccagctcatctccgcgccttctctgcaggccaaactgggtcccactggtcctcaggcctctgagcttttccagttttggtctggaggatctgggcccccctggaatgttccagatgtgaagccattctcacagacaccgttcaccttgtcactgactcccccatctactgacctcccaggaagaaactccttcccagaagccccccagcagatttcccctaacgtctcattggctaggactgtgtcacatg

SEQ ID NO: 350875 - DNA, 1832 bp, Homo sapiens
gggttttgcgggtataattacattcaggatctcaggatactgcattatctgtgtgacccctaaatctgatgacaagtgtctgttttttgtttttgtttttgagacagagcctcgctctgtcacccaggctggagtgctgtggtgtgatctcggctcactgcaacctccgcctcccaggttcaagcaattctctgcctcagcctcccgagtaaatgtgattacaggcaggcgcctgccagcacacccagctgattttagtatttttagtagagatggggtttcaccatcttggccaggctggtcttgaattcctgacctcgtgatccacccacttcagcttcccaaagttctgggattacaggcgtgagccaccgcacccggctgacaagtgtccttctaagaaacacacagaggagaagacacagaagaggagagcaccatgtgatggtagacacagaaattggagttctacagccacaagccaaggaactcctggagccaccaggagatggaagatgcaaagaactgattttctctcagagcctctggagggagtgtggccctggtgacaccttgattttggacttctggcctacagaaccatgcacacaggaggacttcatttcccaggtctccttgcagtgaagttgaggccatgtgactggtcttgggccaatggaatgggtgcagaagggacacagcccatttctagactcagcctgaaatgtcctccataatccttactctttctcccttcactcactggctgcaggaagctgagaattatccttggacttacataaagcattttggactttatgtaagtaacaacctgttgtattaagctactaagattttacggttgtttgttaaatcagctaaccttaaacatcctaacaactacaaatagaatacctgttactgcatacataaaaatacaaaaattagctggatgtggtcccacctgtagtcccagctactcgggaggctgaggcaggagaattgcttgaacctgggaggcggaggttgtggtgagctgagatcgcaccactgcactgcagcctgggcaacagagcaggactctatctcaaaaaaaaaacacaataaacatttcttacctactgtagtttttgtgggtcaggaatctgggagcagcttagttggatgatttctgctcacagtgttttatgaggttgcagtcaagatgttggctggggctgtagtcatctggagatttaactacggctggaggatccacttcaccatggttcactcacctggtgctggttgctggcaggaaatttcagctcttctcttatatggatctcttcacagattgcttgagtgtcctcaccgtatggtgactggcttcctttacagaaatcagttgaagggaatgggcaagtaagaaacagcaatgctttttatgacctagtcctgaagttccccaccattacttatgttcattggaagccagttgctaaggagagcctgcactcaaagattggggaaatagactttatctttcaaagtgttgaagaatttgcagacgtattttaaaaccaccacacaatccatcaacacatcatgtcggctctattcttgaaatagatccagaatttgaccacttttcaccatctccattgctattacccagatctaatcaacaccatcacttgcctggactagagatttcctcctcactgggctctctgcttctatctttagcccattgctatgatttggctgtgtccccacccaaaatctcatcttgaattataatcttcataatccccatgtgtcaaaggagagaccaggtggaggtaactgaa

SEQ ID NO: 350876 - DNA, 1753 bp, Homo sapiens
gcactctctctctttttttttttgagatggagtctcgctctgtcgcccaggctggagtgcagtggcaagatctcggctcactgcaacctctgcctcccgggttcaagtgattctcctgcctcagcctcccgagtagctgggattacaggcacgccccaccacgcctggctaatttttgtatttttagtagagatggggtttcaccatgttggccaggttggtcttgaactccgacctcaagtgatccacctgcctaggcttcccaaagttctgggattacaggcgtgagccaccgcacccggctgacaagtgtccttctaagaaacacacagaggagaagacacagaagaggagagcaccatgtgatggtagacacagaaattggagttctacagccacaagccaaggaactcctggagccaccaggagatggaagatgcaaagaactgattttctctcagagcctctggagggagtgtggccctggtgacaccttgattttggacttctggcctacagaaccatgcacacaggaggacttcatttcccaggtctccttgcagtgaagttgaggccatgtgactggtcttgggccaatggaatgggtgcagaagggacacagcccatttctagactcagcctgaaatgtcctccataatccttactctttctcccttcactcactggctgcaggaagctgagaattatccttggacttacataaagcattttggactttatgtaagtaacaacctgttgtattaagctactaagattttacggttgtttgttaaatcagctaaccttaaacatcctaacaactacaaatagaatacctgttactgcatacataaaaatacaaaaattagctggatgtggtcccacctgtagtcccagctactcgggaggctgaggcaggagaattgcttgaacctgggaggcggaggttgtggtgagctgagatcgcaccactgcactgcagcctgggcaacagagcaggactctatctcaaaaaaaaaacacaataaacatttcttacctactgtagtttttgtgggtcaggaatctgggagcagcttagttggatgatttctgctcacagtgttttatgaggttgcagtcaagatgttggctggggctgtagtcatctggagatttaactacggctggaggatccacttcaccatggttcactcacctggtgctggttgctggcaggaaatttcagctcttctcttatatggatctcttcacagattgcttgagtgtcctcaccgtatggtgactggcttcctttacagaaatcagttgaagggaatgggcaagtaagaaacagcaatgctttttatgacctagtcctgaagttccccaccattacttatgttcattggaagccagttgctaaggagagcctgcactcaaagattggggaaatagactttatctttcaaagtgttgaagaatttgcagacgtattttaaaaccaccacacaatccatcaacacatcatgtcggctctattcttgaaatagatccagaatttgaccacttttcaccatctccattgctattacccagatctaatcaacaccatcacttgcctggactagagatttcctcctcactgggctctctgcttctatctttagcccattgctatgatttggctgtgtccccacccaaaatctcatcttgaattataatcttcataatccccatgtgtcaaaggagagaccaggtggaggtaactgaa

SEQ ID NO: 350877 - DNA, 388 bp, Homo sapiens
gtttctcaggtccatgagccacacttgtgctcagtggccacgtggtctgtggtcagtagccacatgtgggcactgggtaccgtattggatggcacagatttccatccaatagaacatttccatccctggaaagttctattggccagtgctgcctccccaccccgactttggcctcctgtcccatctcctgagtgttggtcattttcttcccaccctcccaacccctcagcctcttcttcctccaaattccttgtcttctgcgtcttctccctgccttccaagacttggtttctcttctctcctctttctttttattttttttttgaaatggagtcttgctctgtcacccaggagtataatggcgtaatctcggctcactgcaacatct

SEQ ID NO: 350878 - DNA, 330 bp, Homo sapiens
ctggtcttgggccaatggaatgggtgcagaagggacacagcccatttctagactcagcctgaaatgtcctccataatccttactctttctcccttcactcactggctgcaggaagctgagaattatccttggacttacataaagcattttggactttatgtaagtaacaacctgttgtattaagctactaagattttacggttgtttgttaaatcagctaaccttaaacatcctaacaactacaaatagaatacctgttactgcatacactatatatatcaaaacattattatgggccaggtgaggtggctcatgcctgtaattccagca

SEQ ID NO: 350879 - DNA, 4229 bp, Homo sapiens
ctccctcacacccaggagtccaggcctccagcccccgctccctcagacccaggagtccaggccccagatcctcctccctcagtcctaggagtccgggccccagcccctcctccctcagactcaggagttcaggccccagatcctcctccctcagacccaggaataccccccagctcctcttccctcagacccaggagtccaggtccccagcccctcctccctcagacccagtggtccagagtcccagccctctcagcttcaagtcccttgagggtggggtttgggggaagcttgctgagttctgtgttcctccaggcccagatgggggaaccccgggctggggccgccctggacgatggcagcggctggacgggcagtgaggaaggcagtgaggagggtaccggcggcagtgagggggctgggggtgacgggggcccggatgcagagggggtgtggagcccagacattgagcagagcttccaggaggccctggccatctatccaccctgcggccgccggaaaataattttgtctgatgaaggcaagatgtatggtcggaatgaactgatcgcccgctacatcaagctgagaacggggaagacccgaactcgaaaacaggtttctagtcacatccaggttttggcccgaaggaaatcaagggaaatccagtccaagttgaaggaccaggtttccaaggacaaggctttccagacaatggcaaccatgtcctctgcccagctcatctccgcgccttctctgcaggccaaactgggtcccactggtcctcaggcctctgagcttttccagttttggtctggaggatctgggcccccctggaatgttccagatgtgaagccattctcacagacaccgttcaccttgtcactgactcccccatctactgacctcccagggtacgagcccccccaagccctctcacccctgcccccacctaccccatcgcccccagcctggcaggctcggggcctgggcaccgcccggttgcagctggtagagttctcagccttcgtggaaccgccagatgcagttgattcttaccagaggcacctgttcgtgcacatcagccagcactgccccagccccggagcgccgccgctcgagagtgtggacgtccggcagatctacgacaaattccctgagaaaaagggtggcctccgagagctatatgatcgtggccccccccatgccttcttcctggtcaagttctgggcggacctgaactggggcccaagtggtgaggaggcaggggccggtggcagcatcagcagtggtggcttctacggagtgagcagccagtatgagagcctggaacacatgaccctcacctgttcctccaaggtctgctcttttggcaagcaggtggtggagaaggtggagacggaacgggcccagctggaggacggcagatttgtgtaccgcctgctgcgctcgcccatgtgcgagtacctggtgaatttcttgcacaagttgcggcagctgcctgagcgatacatgatgaacagcgtcctggaaaacttcaccatcctccaggtggtgacaaacagagacacccaggaactgctgctctgcaccgcctatgtcttcgaggtctccaccagcgagcgtggggcccagcatcacatttaccgcctggtcagggactgaagggggaccccaaaactggctcaccccccagaacaccctcctcccagggagggtcctccagctcacctcatgcttcttatttggggagagggctgtgatgtaaaggggttgacctcagaggcctaagcaactggggccatcccccccattagaggggcccccaaaacttggttggagagctgaacaggctgggactgaggaaaggataaaccccgatattgggacctcacagtgggtgtctgaaaggacagatcactccggagtatcagggattgtggggacaggagtgagacaaccccccaggtacagcactggcttttcttttcagcccctgacaggccacccccactcctctgcatgtcttggagagcgctagttacacattggcttgtcccctttactttttcccagccacccctccccctgaaatttctgcccctctctaccaccctcactccatgacctgtgagatcacaaagtgaagatgaaccctttctgtgcaggagcagagccaggtgggccctggacattttttttttttttaatataacgagatatttataagtgggtgctagggtcttgactttatctccgctgcacaagcagtgtgttgaactttctaatctcatccctctcctaagtgagccctgagctagacggtttccttcctcccctctcaaagtttgtttgtttgtgttctgacagaggataaagctattttaccaaaaacgcaggggatttatttgaggtttgggtgaaaaataatcttgtgggtggtggtaggccgacagatggggacaggaagctgtggacgaaagccccaggtcccgtgggagaggtgacagcagcaggggcacgcagccacgtgggtccccaggggaatgtgaaggcggagggctccaggcgaactggggattaaacaaatatttacaggcagcagggaagtgcccagcgcacgtgacgggggcggggcgggactttggggagggcggggcctaacggtatcgagcgagccggttgtagacgtggtccaggtttctgcacaggaatatcgagagcgtcatgaacccgagctatagagaaaggagatgaggcgtgagccaccgcacccggctgacaagtgtccttctaagaaacacacagaggagaagacacagaagaggagagcaccatgtgatggtagacacagaaattggagttctacagccacaagccaaggaactcctggagccaccaggagatggaagatgcaaagaactgattttctctcagagcctctggagggagtgtggccctggtgacaccttgattttggacttctggcctacagaaccatgcacacaggaggacttcatttcccaggtctccttgcagtgaagttgaggccatgtgactggtcttgggccaatggaatgggtgcagaagggacacagcccatttctagactcagcctgaaatgtcctccataatccttactctttctcccttcactcactggctgcaggaagctgagaattatccttggacttacataaagcattttggactttatgtaagtaacaacctgttgtattaagctactaagattttacggttgtttgttaaatcagctaaccttaaacatcctaacaactacaaatagaatacctgttactgcatacataaaaatacaaaaattagctggatgtggtcccacctgtagtcccagctactcgggaggctgaggcaggagaattgcttgaacctgggaggcggaggttgtggtgagctgagatcgcaccactgcactgcagcctgggcaacagagcaggactctatctcaaaaaaaaaacacaataaacatttcttacctactgtagtttttgtgggtcaggaatctgggagcagcttagttggatgatttctgctcacagtgttttatgaggttgcagtcaagatgttggctggggctgtagtcatctggagatttaactacggctggaggatccacttcaccatggttcactcacctggtgctggttgctggcaggaaatttcagctcttctcttatatggatctcttcacagattgcttgagtgtcctcaccgtatggtgactggcttcctttacagaaatcagttgaagggaatgggcaagtaagaaacagcaatgctttttatgacctagtcctgaagttccccaccattacttatgttcattggaagccagttgctaaggagagcctgcactcaaagattggggaaatagactttatctttcaaagtgttgaagaatttgcagacgtattttaaaaccaccacacaatccatcaacacatcatgtcggctctattcttgaaatagatccagaatttgaccacttttcaccatctccattgctattacccagatctaatcaacaccatcacttgcctggactagagatttcctcctcactgggctctctgcttctatctttagcccattgctatgatttggctgtgtccccacccaaaatctcatcttgaattataatcttcataatccccatgtgtcaaaggagagaccaggtggaggtaactgaa

SEQ ID NO: 350880 - DNA, 3654 bp, Homo sapiens
tcccacttttcccaaacaaagctcccggcaactttctccctcgcagcgccccgcccgcccgcggctccccagccccaggccgggaggtcggaatgaactgatcgcccgctacatcaagctgagaacggggaagacccgaactcgaaaacaggtttctagtcacatccaggttttggcccgaaggaaatcaagggaaatccagtccaagttgaaggcctctgagcttttccagttttggtctggaggatctgggcccccctggaatgttccagatgtgaagccattctcacagacaccgttcaccttgtcactgactcccccatctactgacctcccagggtacgagcccccccaagccctctcacccctgcccccacctaccccatcgcccccagcctggcaggctcggggcctgggcaccgcccggttgcagctggtagagttctcagccttcgtggaaccgccagatgcagttgattcttaccagaggcacctgttcgtgcacatcagccagcactgccccagccccggagcgccgccgctcgagagtgtggacgtccggcagatctacgacaaattccctgagaaaaagggtggcctccgagagctatatgatcgtggccccccccatgccttcttcctggtcaagttctgggcggacctgaactggggcccaagtggtgaggaggcaggggccggtggcagcatcagcagtggtggcttctacggagtgagcagccagtatgagagcctggaacacatgaccctcacctgttcctccaaggtctgctcttttggcaagcaggtggtggagaaggtggagacggaacgggcccagctggaggacggcagatttgtgtaccgcctgctgcgctcgcccatgtgcgagtacctggtgaatttcttgcacaagttgcggcagctgcctgagcgatacatgatgaacagcgtcctggaaaacttcaccatcctccaggtggtgacaaacagagacacccaggaactgctgctctgcaccgcctatgtcttcgaggtctccaccagcgagcgtggggcccagcatcacatttaccgcctggtcagggactgaagggggaccccaaaactggctcaccccccagaacaccctcctcccagggagggtcctccagctcacctcatgcttcttatttggggagagggctgtgatgtaaaggggttgacctcagaggcctaagcaactggggccatcccccccattagaggggcccccaaaacttggttggagagctgaacaggctgggactgaggaaaggataaaccccgatattgggacctcacagtgggtgtctgaaaggacagatcactccggagtatcagggattgtggggacaggagtgagacaaccccccaggtacagcactggcttttcttttcagcccctgacaggccacccccactcctctgcatgtcttggagagcgctagttacacattggcttgtcccctttactttttcccagccacccctccccctgaaatttctgcccctctctaccaccctcactccatgacctgtgagatcacaaagtgaagatgaaccctttctgtgcaggagcagagccaggtgggccctggacattttttttttttttaatataacgagatatttataagtgggtgctagggtcttgactttatctccgctgcacaagcagtgtgttgaactttctaatctcatccctctcctaagtgagccctgagctagacggtttccttcctcccctctcaaagtttgtttgtttgtgttctgacagaggataaagctattttaccaaaaacgcaggggatttatttgaggtttgggtgaaaaataatcttgtgggtggtggtaggccgacagatggggacaggaagctgtggacgaaagccccaggtcccgtgggagaggtgacagcagcaggggcacgcagccacgtgggtccccaggggaatgtgaaggcggagggctccaggcgaactggggattaaacaaatatttacaggcagcagggaagtgcccagcgcacgtgacgggggcggggcgggactttggggagggcggggcctaacggtatcgagcgagccggttgtagacgtggtccaggtttctgcacaggaatatcgagagcgtcatgaacccgagctatagagaaaggagatgaggcgtgagccaccgcacccggctgacaagtgtccttctaagaaacacacagaggagaagacacagaagaggagagcaccatgtgatggtagacacagaaattggagttctacagccacaagccaaggaactcctggagccaccaggagatggaagatgcaaagaactgattttctctcagagcctctggagggagtgtggccctggtgacaccttgattttggacttctggcctacagaaccatgcacacaggaggacttcatttcccaggtctccttgcagtgaagttgaggccatgtgactggtcttgggccaatggaatgggtgcagaagggacacagcccatttctagactcagcctgaaatgtcctccataatccttactctttctcccttcactcactggctgcaggaagctgagaattatccttggacttacataaagcattttggactttatgtaagtaacaacctgttgtattaagctactaagattttacggttgtttgttaaatcagctaaccttaaacatcctaacaactacaaatagaatacctgttactgcatacataaaaatacaaaaattagctggatgtggtcccacctgtagtcccagctactcgggaggctgaggcaggagaattgcttgaacctgggaggcggaggttgtggtgagctgagatcgcaccactgcactgcagcctgggcaacagagcaggactctatctcaaaaaaaaaacacaataaacatttcttacctactgtagtttttgtgggtcaggaatctgggagcagcttagttggatgatttctgctcacagtgttttatgaggttgcagtcaagatgttggctggggctgtagtcatctggagatttaactacggctggaggatccacttcaccatggttcactcacctggtgctggttgctggcaggaaatttcagctcttctcttatatggatctcttcacagattgcttgagtgtcctcaccgtatggtgactggcttcctttacagaaatcagttgaagggaatgggcaagtaagaaacagcaatgctttttatgacctagtcctgaagttccccaccattacttatgttcattggaagccagttgctaaggagagcctgcactcaaagattggggaaatagactttatctttcaaagtgttgaagaatttgcagacgtattttaaaaccaccacacaatccatcaacacatcatgtcggctctattcttgaaatagatccagaatttgaccacttttcaccatctccattgctattacccagatctaatcaacaccatcacttgcctggactagagatttcctcctcactgggctctctgcttctatctttagcccattgctatgatttggctgtgtccccacccaaaatctcatcttgaattataatcttcataatccccatgtgtcaaaggagagaccaggtggaggtaactgaa

SEQ ID NO: 350881 - DNA, 1095 bp, Homo sapiens
ctccctcacacccaggagtccaggcctccagcccccgctccctcagacccaggagtccaggccccagatcctcctccctcagtcctaggagtccgggccccagcccctcctccctcagactcaggagttcaggccccagatcctcctccctcagacccaggaataccccccagctcctcttccctcagacccaggagtccaggtccccagcccctcctccctcagacccagtggtccagagtcccagccctctcagcttcaagtcccttgagggtggggtttgggggaagcttgctgagttctgtgttcctccaggcccagatgggggaaccccgggctggggccgccctggacgatggcagcggctggacgggcagtgaggaaggcagtgaggagggtaccggcggcagtgagggggctgggggtgacgggggcccggatgcagagggggtgtggagcccagacattgagcagagcttccaggaggccctggccatctatccaccctgcggccgccggaaaataattttgtctgatgaaggcaagatgtatggtcggaatgaactgatcgcccgctacatcaagctgagaacggggaagacccgaactcgaaaacaggtttctagtcacatccaggttttggcccgaaggaaatcaagggaaatccagtccaagttgaaggaccaggtttccaaggacaaggctttccagacaatggcaaccatgtcctctgcccagctcatctccgcgccttctctgcaggccaaactgggtcccactggtcctcaggcctctgagcttttccagttttggtctggaggatctgggcccccctggaatgttccagagttcagaaggaagaaaatgtttcccagaggagtataatggcgtaatctcggctcactgcaacatctgcctcccgggttcaagcagttctcctggcccagccccctgaatagctcggattacaggcgcgcaccaccacactctgctaatttttgtatttttagtagagatgggatttcaccatgttggccaggctggtctcgaactcctgacctcaagtgatctgcccgcctcaacctcctgaagtgc

SEQ ID NO: 350882 - DNA, 688 bp, Homo sapiens
ctccctcacacccaggagtccaggcctccagcccccgctccctcagacccaggagtccaggccccagatcctcctccctcagtcctaggagtccgggccccagcccctcctccctcagactcaggagttcaggccccagatcctcctccctcagacccaggaataccccccagctcctcttccctcagacccaggagtccaggtccccagcccctcctccctcagacccagtggtccagagtcccagccctctcagcttcaagtcccttgagggtggggtttgggggaagcttgctgagttctgtgttcctccaggcccagatgggggaaccccgggctggggccgccctggacgatggcagcggctggacgggcagtgaggaaggcagtgaggagggtaccggcggcagtgagggggctgggggtgacgggggcccggatgcagagggggtgtggagcccagacattgagcagagcttccaggcctctgagcttttccagttttggtctggaggatctgggcccccctggaatgttccagatgtgaagccattctcacagacaccgttcaccttgtcactgactcccccatctactgacctcccagcggcgaggggctcgtaggggggccggaagagtagcggagaagggggcgccaggcagggtagggcggggaagaggtgacgag

SEQ ID NO: 350883 - DNA, 195 bp, Homo sapiens
gtcggaatgaactgatcgcccgctacatcaagctgagaacggggaagacccgaactcgaaaacaggtctcggaatggacttgtgggcttctgtctgggatgggccggtcttcttagggtcatcctcgcatgggcaggttcaggttcaaggaagaagctgcttcctgtgcgttcatctgtcttctcggcatgtgtg

SEQ ID NO: 350884 - DNA, 2029 bp, Homo sapiens
  misc_feature (22)..(22): n is a, c, g, or t
agcggatggcgagggagcggcngccgctgcgggccgggccgggccggggctgaggccgagcgagccgcggggcccgcgcagccccggccggagcccaccatgcggcggctgcggcgcctggcgcacctggtgctcttctgccccttctccaagcgcctgcagggccggctcccaggcctcagggtccgctgcatcttcctggcctggctgggcgtctttgcaggcagctggctggtgtacgtgcactactcgtcctactcggagcgctgtcgcggccatgtctgccaggtggtcatttgtgaccagtaccgcaaggggatcatctcgggctccgtctgccaggacctgtgtgagctgcatatggtggagtggaggacctgcctctcggtggccccgggccagcaggtgtacagcgggctctggcgggacaaggatgtaaccatcaagtgtggcattgaggagaccctcgactccaaggcccggtcggatgcggccccccggcgggagctggtactgtttgacaagcccacccggggcacctccatcaaggaattccgggagatgaccctcggcttcctcaaggcgaacctgggagacctgccttccctgccggcgctggttggccaggtcctgctcatggctgacttcaacaaggacaaccgggtgtccctggcggaagccaagtccgtgtgggccctgctgcagcgtaacgagttcctgctgctgctgtccctgcaggagaaggagcacgcctccagactgctgggctactgtggggacctctacctcaccgagggcgtgccgcatggcgcctggcacgcggccgcccttccacccctgttgcgcccactgctgccgcctgccctgcagggtgctctccagcagtggctggggcctgcgtggccttggcgggccaagatcgccatcggcctgctggagttcgtggaggagctcttccacggctcttacgggactttctacatgtgtgagaccacactggccaacgtgggctacacagccacctacgacttcaagatggccgacctgcagcaggtggcacccgaggccaccgtgcgccgcttcctgcagggccgccgctgcgagcacagcaccgactgcacctacgggcgcgactgcagggccccgtgtgacaggctcatgaggcagtgcaagggcgacctcatccagcccaacctggccaaggtgtgcgcactgctacggggctacctgctgcctggcgcgcccgccgacctccgcgaggagctgggcacacagctgcgcacctgtaccacgctgagcgggctggccagccaggtggaggcccatcactcgctggtgctcagccacctcaagactctgctctggaagaagatctccaacaccaagtactcttgatggggcagtgaggggcctggccacccttcctggagctggccaggtgccagggtccaaccctccctcaaggaatcctgtcagaagatgtgaaatgcaactgtgttgcaaaatcactcccctaccgtcagggctctggattccagcaccacagacatgagaccccagctcggagcaaaggcggacatggacatcccggcaggagagtcctccaagggggtttgttactctgaagaacgtaatgtcaataaacagcttttatgtaatgcccagggctgagcaccctgagcccccatcgatgctgtgtgtgggacccttcgccccgctgtggatccacccagcccaggcactcaggctggggttgagcccctgaatccttcctggcgaggcagccctcaggtgttagtccaaggtgaggtctattgcagagctgcctgcccttcaacccacacacacctctgaagccgccagggcagttccccaaacacagcggcttctgaaacagtcaatgaccagtaccccccaaacctgggcattacataaaagctgatttatgacattacgttcttcagagtaacaaacccctggaggactctcctgccgggatgtccatcagtaagggtaagctggctgaaca

SEQ ID NO: 350885 - DNA, 2412 bp, Homo sapiens
  misc_feature (22)..(22): n is a, c, g, or t
agcggatggcgagggagcggcngccgctgcgggccgggccgggccggggctgaggccgagcgagccgcggggcccgcgcagccccggccggagcccaccatgcggcggctgcggcgcctggcgcacctggtgctcttctgccccttctccaagcgcctgcagggccggctcccaggcctcagggtccgctgcatcttcctggcctggctgggcgtctttgcaggcagctggctggtgtacgtgcactactcgtcctactcggagcgctgtcgcggccatgtctgccaggtggtcatttgtgaccagtaccgcaaggggatcatctcgggctccgtctgccaggacctgtgtgagctgcatatggtggagtggaggacctgcctctcggtggccccgggccagcaggtgtacagcgggctctggcgggacaaggatgtaaccatcaagtgtggcattgaggagaccctcgactccaaggcccggtcggatgcggccccccggcgggagctggtactgtttgacaagcccacccggggcacctccatcaaggaattccgggagatgaccctcggcttcctcaaggcgaacctgggagacctgccttccctgccggcgctggttggccaggtcctgctcatggctgacttcaacaaggacaaccgggtgtccctggcggaagccaagtccgtgtgggccctgctgcagcgtaacgagttcctgctgctgctgtccctgcaggagaaggagcacgcctccagactgctgggctactgtggggacctctacctcaccgagggcgtgccgcatggcgcctggcacgcggccgcccttccacccctgttgcgcccactgctgccgcctgccctgcagggtgctctccagcagtggctggggcctgcgtggccttggcgggccaagatcgccatcggcctgctggagttcgtggaggagctcttccacggctcttacgggactttctacatgtgtgagaccacactggccaacgtgggctacacagccacctacgacttcaagatggccgacctgcagcaggtggcacccgaggccaccgtgcgccgcttcctgcagggccgccgctgcgagcacagcaccgactgcacctacgggcgcgactgcagggccccgtgtgacaggctcatgaggcagtgcaagggcgacctcatccagcccaacctggccaaggtgtgcgcactgctacggggctacctgctgcctggcgcgcccgccgacctccgcgaggagctgggcacacagctgcgcacctgtaccacgctgagcgggctggccagccaggtggaggcccatcactcgctggtgctcagccacctcaagactctgctctggaagaagatctccaacaccaagtactcttgatggggcagtgaggggcctggccacccttcctggagctggccaggtgccagggtccaaccctccctcaaggagagtcctccaagggggtttgttactctgaagaacgtaatgtcaataaacagcttttatgtaatgcccagggctgagcaccctgagcccccatcgatgctgtgtgtgggacccttcgccccgctgtggatccacccagcccaggcactcaggctggggttgagcccctgaatccttcctggcgaggcagccctcaggtgttagtccaaggtgaggtctattgcagagctgcctgcccttcaacccacacacacctctgaagccgccagggcagttccccaaacacagcggcttctgaaacagtcaatgaccagtaccccccaaacctgggctgtgcacaacagaccaagaaaaaggtgttccagtaagaaaacagatatatgcggtattttaaaaactgattttacaaaatccagccatgagatgtacaactcattccctaggaaacagcccaggaatggccatcttctccagccccgtacgctctccccagtagcccagggcacccagcaaccatcccctaggagaacaggcaaggaccctcgtgggaagatcccaccacagcaacacctttcttcagggcgggctctctccgcaatgtgtgagtcaagacaatccattccattcaagaccaatttactctcaaattttgccaacacagaaatattatccttaaagaaatgtgcatttaaatcttttaattcacttcatcctgtattttaaaataaatgttttccatatagattttccccttgggggggaaaagaattcagggtcttaggttccaggcagttcaaaaacagccacgcggttcttttttctccaccagaataccacaatagcagaacttaagaatcgggatatgaaaagggaggcgtggtcctggcagtggcccctggccggcaggaatacacagcaacacccaggcaggggcagcggctgccccca

SEQ ID NO: 350886 - DNA, 2492 bp, Homo sapiens
ccatcccccagcccctgggcatgagccctgccagggaaggagcctctccagggctgggggcaagggttgggggcgccggtgggctggcagctgaggtcgaggggaggctcctgcagtcaagggccgtgtgtccagcagggcaggtgccccgaatggagaccagggcttgtggaaaggggccgcttcccagggcttcagccagtgcgtgccctctgccctgtgccgattctcatcctcagggaagctctgaggcttctctgcccaggtgcccacccccgagctccccaggtgcacccaaggctgccaggaggcgggaggtctgtctggcagcagccacacaggccagcagagtgagctgacacattgctggctgcgtcctccacccgtgtagctgtgggctgggacccctaacctggcagatgtgctggtctggccggcagaccaccccgccaggaggaccaggtaaaggccaggtcgtgctcccagacatcaaatcaactggcttttcctttcttttggtcccaaacgccaggcgaacctgggagacctgccttccctgccggcgctggttggccaggtcctgctcatggctgacttcaacaaggacaaccgggtgtccctggcggaagccaagtccgtgtgggccctgctgcagcgtaacgagttcctgctgctgctgtccctgcaggagaaggagcacgcctccagactgctgggctactgtggggacctctacctcaccgagggcgtgccgcatggcgcctggcacgcggccgcccttccacccctgttgcgcccactgctgccgcctgccctgcagggtgctctccagcagtggctggggcctgcgtggccttggcgggccaagatcgccatcggcctgctggagttcgtggaggagctcttccacggctcttacgggactttctacatgtgtgagaccacactggccaacgtgggctacacagccacctacgacttcaagatggccgacctgcagcaggtggcacccgaggccaccgtgcgccgcttcctgcagggccgccgctgcgagcacagcaccgactgcacctacgggcgcgactgcagggccccgtgtgacaggctcatgaggcagtgcaagggcgacctcatccagcccaacctggccaaggtgtgcgcactgctacggggctacctgctgcctggcgcgcccgccgacctccgcgaggagctgggcacacagctgcgcacctgtaccacgctgagcgggctggccagccaggtggaggcccatcactcgctggtgctcagccacctcaagactctgctctggaagaagatctccaacaccaagtactcttgatggggcagtgaggggcctggccacccttcctggagctggccaggtgccagggtccaaccctccctcaaggaatcctgtcagaagatgtgaaatgcaactgtgttgcaaaatcactcccctaccgtcagggctctggattccagcaccacagacatgagaccccagctcggagcaaaggcggacatggacatcccggcaggagagtcctccaagggggtttgttactctgaagaacgtaatgtcaataaacagcttttatgtaatgcccagggctgagcaccctgagcccccatcgatgctgtgtgtgggacccttcgccccgctgtggatccacccagcccaggcactcaggctggggttgagcccctgaatccttcctggcgaggcagccctcaggtgttagtccaaggtgaggtctattgcagagctgcctgcccttcaacccacacacacctctgaagccgccagggcagttccccaaacacagcggcttctgaaacagtcaatgaccagtaccccccaaacctgggctgtgcacaacagaccaagaaaaaggtgttccagtaagaaaacagatatatgcggtattttaaaaactgattttacaaaatccagccatgagatgtacaactcattccctaggaaacagcccaggaatggccatcttctccagccccgtacgctctccccagtagcccagggcacccagcaaccatcccctaggagaacaggcaaggaccctcgtgggaagatcccaccacagcaacacctttcttcagggcgggctctctccgcaatgtgtgagtcaagacaatccattccattcaagaccaatttactctcaaattttgccaacacagaaatattatccttaaagaaatgtgcatttaaatcttttaattcacttcatcctgtattttaaaataaatgttttccatatagattttccccttgggggggaaaagaattcagggtcttaggttccaggcagttcaaaaacagccacgcggttcttttttctccaccagaataccacaatagcagaacttaagaatcgggatatgaaaagggaggcgtggtcctggcagtggcccctggccggcaggaatacacagcaacacccaggcaggggcagcggctgccccca

SEQ ID NO: 350887 - DNA, 2542 bp, Homo sapiens
  misc_feature (22)..(22): n is a, c, g, or t
agcggatggcgagggagcggcngccgctgcgggccgggccgggccggggctgaggccgagcgagccgcggggcccgcgcagccccggccggagcccaccatgcggcggctgcggcgcctggcgcacctggtgctcttctgccccttctccaagcgcctgcagggccggctcccaggcctcagggtccgctgcatcttcctggcctggctgggcgtctttgcaggcagctggctggtgtacgtgcactactcgtcctactcggagcgctgtcgcggccatgtctgccaggtggtcatttgtgaccagtaccgcaaggggatcatctcgggctccgtctgccaggacctgtgtgagctgcatatggtggagtggaggacctgcctctcggtggccccgggccagcaggtgtacagcgggctctggcgggacaaggatgtaaccatcaagtgtggcattgaggagaccctcgactccaaggcccggtcggatgcggccccccggcgggagctggtactgtttgacaagcccacccggggcacctccatcaaggaattccgggagatgaccctcggcttcctcaaggcgaacctgggagacctgccttccctgccggcgctggttggccaggtcctgctcatggctgacttcaacaaggacaaccgggtgtccctggcggaagccaagtccgtgtgggccctgctgcagcgtaacgagttcctgctgctgctgtccctgcaggagaaggagcacgcctccagactgctgggctactgtggggacctctacctcaccgagggcgtgccgcatggcgcctggcacgcggccgcccttccacccctgttgcgcccactgctgccgcctgccctgcagggtgctctccagcagtggctggggcctgcgtggccttggcgggccaagatcgccatcggcctgctggagttcgtggaggagctcttccacggctcttacgggactttctacatgtgtgagaccacactggccaacgtgggctacacagccacctacgacttcaagatggccgacctgcagcaggtggcacccgaggccaccgtgcgccgcttcctgcagggccgccgctgcgagcacagcaccgactgcacctacgggcgcgactgcagggccccgtgtgacaggctcatgaggcagtgcaagggcgacctcatccagcccaacctggccaaggtgtgcgcactgctacggggctacctgctgcctggcgcgcccgccgacctccgcgaggagctgggcacacagctgcgcacctgtaccacgctgagcgggctggccagccaggtggaggcccatcactcgctggtgctcagccacctcaagactctgctctggaagaagatctccaacaccaagtactcttgatggggcagtgaggggcctggccacccttcctggagctggccaggtgccagggtccaaccctccctcaaggaatcctgtcagaagatgtgaaatgcaactgtgttgcaaaatcactcccctaccgtcagggctctggattccagcaccacagacatgagaccccagctcggagcaaaggcggacatggacatcccggcaggagagtcctccaagggggtttgttactctgaagaacgtaatgtcaataaacagcttttatgtaatgcccagggctgagcaccctgagcccccatcgatgctgtgtgtgggacccttcgccccgctgtggatccacccagcccaggcactcaggctggggttgagcccctgaatccttcctggcgaggcagccctcaggtgttagtccaaggtgaggtctattgcagagctgcctgcccttcaacccacacacacctctgaagccgccagggcagttccccaaacacagcggcttctgaaacagtcaatgaccagtaccccccaaacctgggctgtgcacaacagaccaagaaaaaggtgttccagtaagaaaacagatatatgcggtattttaaaaactgattttacaaaatccagccatgagatgtacaactcattccctaggaaacagcccaggaatggccatcttctccagccccgtacgctctccccagtagcccagggcacccagcaaccatcccctaggagaacaggcaaggaccctcgtgggaagatcccaccacagcaacacctttcttcagggcgggctctctccgcaatgtgtgagtcaagacaatccattccattcaagaccaatttactctcaaattttgccaacacagaaatattatccttaaagaaatgtgcatttaaatcttttaattcacttcatcctgtattttaaaataaatgttttccatatagattttccccttgggggggaaaagaattcagggtcttaggttccaggcagttcaaaaacagccacgcggttcttttttctccaccagaataccacaatagcagaacttaagaatcgggatatgaaaagggaggcgtggtcctggcagtggcccctggccggcaggaatacacagcaacacccaggcaggggcagcggctgccccca

SEQ ID NO: 350888 - DNA, 1841 bp, Homo sapiens
  misc_feature (22)..(22): n is a, c, g, or t
  misc_feature (1697)..(1698): n is a, c, g, or t
  misc_feature (1713)..(1713): n is a, c, g, or t
  misc_feature (1721)..(1721): n is a, c, g, or t
  misc_feature (1724)..(1724): n is a, c, g, or t
  misc_feature (1729)..(1729): n is a, c, g, or t
  misc_feature (1731)..(1731): n is a, c, g, or t
agcggatggcgagggagcggcngccgctgcgggccgggccgggccggggctgaggccgagcgagccgcggggcccgcgcagccccggccggagcccaccatgcggcggctgcggcgcctggcgcacctggtgctcttctgccccttctccaagcgcctgcagggccggctcccaggcctcagggtccgctgcatcttcctggcctggctgggcgtctttgcaggcagctggctggtgtacgtgcactactcgtcctactcggagcgctgtcgcggccatgtctgccaggtggtcatttgtgaccagtaccgcaaggggatcatctcgggctccgtctgccaggacctgtgtgagctgcatatggtggagtggaggacctgcctctcggtggccccgggccagcaggtgtacagcgggctctggcgggacaaggatgtaaccatcaagtgtggcattgaggagaccctcgactccaaggcccggtcggatgcggccccccggcgggagctggtactgtttgacaagcccacccggggcacctccatcaaggaattccgggagatgaccctcggcttcctcaaggcgaacctgggagacctgccttccctgccggcgctggttggccaggtcctgctcatggctgacttcaacaaggacaaccgggtgtccctggcggaagccaagtccgtgtgggccctgctgcagcgtaacgagttcctgctgctgctgtccctgcaggagaaggagcacgcctccagactgctgggctactgtggggacctctacctcaccgagggcgtgccgcatggcgcctggcacgcggccgcccttccacccctgttgcgcccactgctgccgcctgccctgcagggtgctctccagcagtggctggggcctgcgtggccttggcgggccaagatcgccatcggcctgctggagttcgtggaggagctcttccacggctcttacgggactttctacatgtgtgagaccacactggccaacgtgggctacacagccacctacgacttcaagatggccgacctgcagcaggtggcacccgaggccaccgtgcgccgcttcctgcagggccgccgctgcgagcacagcaccgactgcacctacgggcgcgactgcagggccccgtgtgacaggctcatgaggcagtgcaagggcgacctcatccagcccaacctggccaaggtgtgcgcactgctacggggctacctgctgcctggcgcgcccgccgacctccgcgaggagctgggcacacagctgcgcacctgtaccacgctgagcgggctggccagccaggtggaggcccatcactcgctggtgctcagccacctcaagactctgctctggaagaagatctccaacaccaagtactcttgatggggcagtgaggggcctggccacccttcctggagctggccaggtgccagggtccaaccctccctcaaggaatcctgtcagaagatgtgaaatgcaactgtgttgcaaaatcactcccctaccgtcagggctctggattccagcaccacagacatgagaccccagctcggagcaaaggcggacatggacatcccggcaggagagtcctccaagggggtttgttactctgaagaacgtaatgtcaataaacagcttttatgtaatgcccagggctgagcaccctgagcccccatcgaaaaaanncacacccaaaacaancaacaganaanaccananacaaaccacaggagggggggtggacaggggacggcgccaccccccggaaggatcggcgcagggggacggggagggagagggcgacgggcgacgcacgccgggcgcggccg

SEQ ID NO: 350889 - DNA, 2271 bp, Homo sapiens
ggctagtacgaggctggggttagcattgtgaccagtaccgcaaggggatcatctcgggctccgtctgccaggacctgtgtgagctgcatatggtggagtggaggacctgcctctcggtggccccgggccagcaggtgtacagcgggctctggcgggacaaggatgtaaccatcaagtgtggcattgaggagaccctcgactccaaggcccggtcggatgcggccccccggcgggagctggtactgtttgacaagcccacccggggcacctccatcaaggaattccgggagatgaccctcggcttcctcaaggcgaacctgggagacctgccttccctgccggcgctggttggccaggtcctgctcatggctgacttcaacaaggacaaccgggtgtccctggcggaagccaagtccgtgtgggccctgctgcagcgtaacgagttcctgctgctgctgtccctgcaggagaaggagcacgcctccagactgctgggctactgtggggacctctacctcaccgagggcgtgccgcatggcgcctggcacgcggccgcccttccacccctgttgcgcccactgctgccgcctgccctgcagggtgctctccagcagtggctggggcctgcgtggccttggcgggccaagatcgccatcggcctgctggagttcgtggaggagctcttccacggctcttacgggactttctacatgtgtgagaccacactggccaacgtgggctacacagccacctacgacttcaagatggccgacctgcagcaggtggcacccgaggccaccgtgcgccgcttcctgcagggccgccgctgcgagcacagcaccgactgcacctacgggcgcgactgcagggccccgtgtgacaggctcatgaggcagtgcaagggcgacctcatccagcccaacctggccaaggtgtgcgcactgctacggggctacctgctgcctggcgcgcccgccgacctccgcgaggagctgggcacacagctgcgcacctgtaccacgctgagcgggctggccagccaggtggaggcccatcactcgctggtgctcagccacctcaagactctgctctggaagaagatctccaacaccaagtactcttgatggggcagtgaggggcctggccacccttcctggagctggccaggtgccagggtccaaccctccctcaaggaatcctgtcagaagatgtgaaatgcaactgtgttgcaaaatcactcccctaccgtcagggctctggattccagcaccacagacatgagaccccagctcggagcaaaggcggacatggacatcccggcaggagagtcctccaagggggtttgttactctgaagaacgtaatgtcaataaacagcttttatgtaatgcccagggctgagcaccctgagcccccatcgatgctgtgtgtgggacccttcgccccgctgtggatccacccagcccaggcactcaggctggggttgagcccctgaatccttcctggcgaggcagccctcaggtgttagtccaaggtgaggtctattgcagagctgcctgcccttcaacccacacacacctctgaagccgccagggcagttccccaaacacagcggcttctgaaacagtcaatgaccagtaccccccaaacctgggctgtgcacaacagaccaagaaaaaggtgttccagtaagaaaacagatatatgcggtattttaaaaactgattttacaaaatccagccatgagatgtacaactcattccctaggaaacagcccaggaatggccatcttctccagccccgtacgctctccccagtagcccagggcacccagcaaccatcccctaggagaacaggcaaggaccctcgtgggaagatcccaccacagcaacacctttcttcagggcgggctctctccgcaatgtgtgagtcaagacaatccattccattcaagaccaatttactctcaaattttgccaacacagaaatattatccttaaagaaatgtgcatttaaatcttttaattcacttcatcctgtattttaaaataaatgttttccatatagattttccccttgggggggaaaagaattcagggtcttaggttccaggcagttcaaaaacagccacgcggttcttttttctccaccagaataccacaatagcagaacttaagaatcgggatatgaaaagggaggcgtggtcctggcagtggcccctggccggcaggaatacacagcaacacccaggcaggggcagcggctgccccca

SEQ ID NO: 350890 - DNA, 2448 bp, Homo sapiens
gcggggctgcccctgcagccgacagccccatcctgcagccaccaatggcatgacccagggccccggcactgcctgtgtgaggggctggcagctttccaactgcagcaagtggaggcccctgccagcttcgggcctgtgggcaggggctcagtggggcaggggtgtggctgccccgcccggcacgcctgcacctgtctcctcagtgtgaccagtaccgcaaggggatcatctcgggctccgtctgccaggacctgtgtgagctgcatatggtggagtggaggacctgcctctcggtggccccgggccagcaggtgtacagcgggctctggcgggacaaggatgtaaccatcaagtgtggcattgaggagaccctcgactccaaggcccggtcggatgcggccccccggcgggagctggtactgtttgacaagcccacccggggcacctccatcaaggaattccgggagatgaccctcggcttcctcaaggcgaacctgggagacctgccttccctgccggcgctggttggccaggtcctgctcatggctgacttcaacaaggacaaccgggtgtccctggcggaagccaagtccgtgtgggccctgctgcagcgtaacgagttcctgctgctgctgtccctgcaggagaaggagcacgcctccagactgctgggctactgtggggacctctacctcaccgagggcgtgccgcatggcgcctggcacgcggccgcccttccacccctgttgcgcccactgctgccgcctgccctgcagggtgctctccagcagtggctggggcctgcgtggccttggcgggccaagatcgccatcggcctgctggagttcgtggaggagctcttccacggctcttacgggactttctacatgtgtgagaccacactggccaacgtgggctacacagccacctacgacttcaagatggccgacctgcagcaggtggcacccgaggccaccgtgcgccgcttcctgcagggccgccgctgcgagcacagcaccgactgcacctacgggcgcgactgcagggccccgtgtgacaggctcatgaggcagtgcaagggcgacctcatccagcccaacctggccaaggtgtgcgcactgctacggggctacctgctgcctggcgcgcccgccgacctccgcgaggagctgggcacacagctgcgcacctgtaccacgctgagcgggctggccagccaggtggaggcccatcactcgctggtgctcagccacctcaagactctgctctggaagaagatctccaacaccaagtactcttgatggggcagtgaggggcctggccacccttcctggagctggccaggtgccagggtccaaccctccctcaaggaatcctgtcagaagatgtgaaatgcaactgtgttgcaaaatcactcccctaccgtcagggctctggattccagcaccacagacatgagaccccagctcggagcaaaggcggacatggacatcccggcaggagagtcctccaagggggtttgttactctgaagaacgtaatgtcaataaacagcttttatgtaatgcccagggctgagcaccctgagcccccatcgatgctgtgtgtgggacccttcgccccgctgtggatccacccagcccaggcactcaggctggggttgagcccctgaatccttcctggcgaggcagccctcaggtgttagtccaaggtgaggtctattgcagagctgcctgcccttcaacccacacacacctctgaagccgccagggcagttccccaaacacagcggcttctgaaacagtcaatgaccagtaccccccaaacctgggctgtgcacaacagaccaagaaaaaggtgttccagtaagaaaacagatatatgcggtattttaaaaactgattttacaaaatccagccatgagatgtacaactcattccctaggaaacagcccaggaatggccatcttctccagccccgtacgctctccccagtagcccagggcacccagcaaccatcccctaggagaacaggcaaggaccctcgtgggaagatcccaccacagcaacacctttcttcagggcgggctctctccgcaatgtgtgagtcaagacaatccattccattcaagaccaatttactctcaaattttgccaacacagaaatattatccttaaagaaatgtgcatttaaatcttttaattcacttcatcctgtattttaaaataaatgttttccatatagattttccccttgggggggaaaagaattcagggtcttaggttccaggcagttcaaaaacagccacgcggttcttttttctccaccagaataccacaatagcagaacttaagaatcgggatatgaaaagggaggcgtggtcctggcagtggcccctggccggcaggaatacacagcaacacccaggcaggggcagcggctgccccca

SEQ ID NO: 350891 - DNA, 1544 bp, Homo sapiens
gtgcgtttagggcgaagacggagttgtaaacttcttaaaattcctctctcgacacttcggtaattcctctttcgagactaaagctctttttgtatgcgtgtgtgtcaagcgtatgccccgggattctcctccgcttccttttctcggtcttccttcttgctttagggaccggaagagtccttgaaccaaaatagctcggcgggcacttccggggccggcgcccagagttccgggagggtgcaggcaggagagggaaaggcagcagcggcggcagctggaggatgaagaaggagcatgtgcttcactgccagttctccgcgtggtacccgttcttccgaggcgttaccatcaagagtgtcattcttccacttcctcagaatgtgaaggattatttactcgatgatggaactctggtggtttcaggaagggatgatccaccaacacattctcagccagacagtgatgatgaagcagaagaaatacagtggtctgatgatgagaacacagccacgcttacggcaccagaatttcctgagtttgccactaaagtccaggaagctatcaattccctcgggggcagtgtctttcctaagcttaattggagtgccccaagggatgcgtattggatagcaatgaatagttctctgaaatgtaaaaccctcagcgacatctttctgcttttcaagagttccgatttcatcactcgtgacttcactcagccgtttattcattgtactgatgattctccagatccatgtatagaatatgagctcgttctccgaaaatggtgtgaattgattcctggggctgagtttcgatgttttgtcaaggaaaacaagcttattggtatttctcaaagagactacacacaatactatgatcatatttctaaacaaaaggaagaaattcgcagatgcatacaagactttttcaagaaacacatacagtacaaattcttagatgaagactttgtgttcgatatatacagagacagtagggggaaggtgtggctcattgactttaatccatttggtgaagtcacagattcactgctgttcacctgggaagaactgatatctgagaacaacttaaacggcgattttagtgaagttgacgctcaagagcaggattccccagctttccgttgcacaaacagtgaagtgacagtccagcccagcccctatttgagttaccggctacccaaggactttgtagacctctctactggggaggacgctcacaagctaatagacttccttaagctgaagagaaatcagcaggaggacgactgatgagcgtgctggaactggagaagaggaggccccgccccaccgctccgggagctgctcatcagccgcaacttcctgccgaccctgatgcgggtgggccgagcagtgtggacatcagccgctttttatattcatgtacattcacctggggaaaaaaacggagggactttgctacttgtaaaaataacataataaatagatcttaaacataggaaaaccatactgttctgataataaaatgctttctatgaaata

SEQ ID NO: 350892 - DNA, 2067 bp, Homo sapiens
  misc_feature (676)..(676): n is a, c, g, or t
  misc_feature (1154)..(1154): n is a, c, g, or t
  misc_feature (1364)..(1364): n is a, c, g, or t
  misc_feature (1470)..(1470): n is a, c, g, or t
  misc_feature (1475)..(1475): n is a, c, g, or t
  misc_feature (1488)..(1488): n is a, c, g, or t
  misc_feature (1518)..(1518): n is a, c, g, or t
  misc_feature (1522)..(1522): n is a, c, g, or t
  misc_feature (1529)..(1529): n is a, c, g, or t
  misc_feature (1536)..(1536): n is a, c, g, or t
  misc_feature (1563)..(1563): n is a, c, g, or t
  misc_feature (1570)..(1570): n is a, c, g, or t
  misc_feature (1578)..(1578): n is a, c, g, or t
gctttactgggtcccttctctcttcattcacagggggccctccctttagatctctgtctattcagacaggcggccctttctcagatgggatatagacagatgatcttttgaaataagtgagaagatttttaagattagaataatatgaagaatatctttctggccgggcgacgtggcttatgtctgtaatcccagcactttgggaggctgaggtgaggggattgcttgaacccaagagttcaagaccagcctgggcaacatggcgagaccctgtctcgaagaaaatacaaaaattagctgcatgtggtggtgcatgcctgtagtcccaggtactgaggaggctgaggcaggaggatcctttgagcccaggaggtcgaggctgcagtgagccgtgatcacaccagtgcactgcagcctgggcaacagcatgagaccctgtctcagaataaaaaagtgtttctttctcagaagacagagtacagaagatgtttgtttttgttttttctctctctgtgctacaggggaaggtgtggctcattgactttaatccatttggtgaagtcacagattcactgctgttcacctgggaagaactgatatctgagaacaacttaaacggcgattttagtgaagttgacgctcaagagcaggtacaacatttttaagacagatacantgtaaacctttccagtctactgactgactgcttgttcttcagacgcataggtaggcggcaatggccaggacccttgggaagcgcagagtgtaacacagctttactaatagctaacctgcccatggtggtggtcaaagaagggggccccacttaactttatatacagaagtcaggatcatctgatcagtttttttagttctttttctgagcttcttctgtcacacccacctggaggaatcttggtcccagatcagctcatgcatctgttccttctgaccccagccccagctgctgaggccgacagagaagttacacacgtgcagcccagcggattcctgtcagctttctcctccatttccacggtgactggctcacgccttgatgcttctcagtctcccatcattccttccttcctctcagcagatgatttaacttgctgtttcccggaaaagggaacccactgatgagaattccctcngttgatttctcatcacacctacaagcttgtccgtcccttcctgagtctaatctcccccctccatacacttgtgtccccctctgtcatctccccactctggacactgtgtcctcctctgtcacctcccccctcagtacactgtgtcttcctctctcacctccccctcaggacactgtgtcctcctctctctcacctccccctcaggacacngtcctcctctctcacctcccactctggacactgtgtcctctctcaccgcccactccggacactgtgtcctcctctctctcacctccccctcaggacactgtcctcntctcncacctcccactcnggacactgtgtcctcctctctcacctcccnctcnggacacngtgtccncctctctcacctccccctcaggacacngtgtccncctctctnacctccccctcaggacactgtgtcctcctcctctttctccagatgccctctgctctttttgcaattcttcctctctatcaactctgtccatccggatttagtcatgttcagatacctcccatccgaaaaaaacaaaacattgttcaacccggtttcttcacccagccactctctcctttcctgccagcttcacagccagactttcctgaaacaactttgtagtgctgttttctgcccataaaagtaacatgtccaagacgggcggatcaggaagtcagggtatcgagaccatcctggctaacacggtgaaaacctgtctctactaaaaatacaaaaaaaaaattagccaggcgtggtggcgggcgcctgtagtcccagctacttgggaggctgcggcaggagaatggcatgaatccgggaggcagagcttgcagtgagccgagattgtgccactgcactccagcctgggcgacagggcaagactgtctc

SEQ ID NO: 350893 - DNA, 921 bp, Homo sapiens
  misc_feature (889)..(889): n is a, c, g, or t
  misc_feature (891)..(891): n is a, c, g, or t
acagctctgatccactcaacaccaccaactctactctcgcgcgacccctcacggcatacaacccaccactatacagagttccggagcgcaccatcccagtccgccgtttaccacacaactctctcccgcgccccgggcccgccctaatcgtctcccaactcctaggtcgctctcggtcccgggcgcataagtccgcgttacttgcagcgtactcgccacattcagtaatatacacgccgcgcccgacaccgccgctaatccccttttccaacaaagacagccaattacggcacgcgcccagacctgttttccaagcgccccacccagtcccaattctcacatttcaggcttggggtcgtaataaccaaaaaccataggggccaggtttggtctcttggccttgcaccactttggtaatactcacattcccccctgttccctctgagcagcctctatattttatacaacattcacccgccccttttaagtaaagttcccgctcaagagcgattccccagctttccgttgcacaaacagtgaagtgacagtccagcccagcccctatttgagttaccggctacccaaggactttgtagacctctctactggggaggacgctcacaagctaatagacttccttaagctgaagagaaatcagcaggaggacgactgatgagcgtgctggaactggagaagaggaggccccgccccaccgctccgggagctgctcatcagccgcaacttcctgccgaccctgatgcgggtgggccgagcagtgtggacatcagccgctttttatattcatgtacattcacctggggaaaaaaacggagggactttgctacttgtaaaaataacataataaatagatagctgatgcggcaagccncnttccctcccctcccaccacgcatcctcccc

SEQ ID NO: 350894 - DNA, 539 bp, Homo sapiens
atgtgaatatttatatttttgtgtggatttctgtgtaggagtttttgtatgtatggaagaaagagaagaaaatactcaaatacctgaggataatttgctcaggagtcaaagtgataaactagtttaatgaattaaagcatggttttccatgacaatttttaattacatcctttgccaagacctctagaaaattacacctgctgagcagatatcccaaggagcatgtgctattttaagatccccttggttttctttgacagaagagaaatcagcaggaggacgactgatgagcgtgctggaactggagaagaggaggccccgccccaccgctccgggagctgctcatcagccgcaacttcctgccgaccctgatgcgggtgggccgagcagtgtggacatcagccgctttttatattcatgtacattcacctggggaaaaaaacggagggactttgctacttgtaaaaataacataataaatagatcttaaacataggaaaaccatactgttctgataataaaatgctttctatgaaata

SEQ ID NO: 350895 - DNA, 2191 bp, Homo sapiens
gtgcgtttagggcgaagacggagttgtaaacttcttaaaattcctctctcgacacttcggtaattcctctttcgagactaaagctctttttgtatgcgtgtgtgtcaagcgtatgccccgggattctcctccgcttccttttctcggtcttccttcttgctttagggaccggaagagtccttgaaccaaaatagctcggcgggcacttccggggccggcgcccagagttccgggagggtgcaggcaggagagggaaaggcagcagcggcggcagctggaggatgaagaaggagcatgtgcttcactgccagttctccgcgtggtacccgttcttccgaggcgttaccatcaagagtgtcattcttccacttcctcagaatgtgaaggattatttactcgatgatggaactctggtggtttcaggaagggatgatccaccaacacattctcagccagacagtgatgatgaagcagaagaaatacagtggtctgatgatgagaacacagccacgcttacggcaccagaatttcctgagtttgccactaaagtccaggaagctatcaattccctcgggggcagtgtctttcctaagcttaattggagtgccccaagggatgcgtattggatagcaatgaatagttctctgaaatgtaaaaccctcagcgacatctttctgcttttcaagagttccgatttcatcactcgtgacttcactcagccgtttattcattgtactgatgattctccagatccatgtatagaatatgagctcgttctccgaaaatggtgtgaattgattcctggggctgagtttcgatgttttgtcaaggaaaacaagcttattggtatttctcaaagagactacacacaatactatgatcatatttctaaacaaaaggaagaaattcgcagatgcatacaagactttttcaagaaacacatacagtacaaattcttagatgaagactttgtgttcgatatatacagagacagtagggggaaggtgtggctcattgactttaatccatttggtgaagtcacagattcactgctgttcacctgggaagaactgatatctgagaacaacttaaacggcgattttagtgaagttgacgctcaagagcaggattccccagctttccgttgcacaaacagtgaagtgacagtccagcccagcccctatttgagttaccggctacccaaggactttgtagacctctctactggggaggacgctcacaagctaatagacttccttaagctgaagagaaatcagcaggaggacgactgatgagcgtgctggaactggagaagaggaggccccgccccaccgctccgggagctgctcatcagccgcaacttcctgccgaccctgatgcgggtgggccgagcagtgtggacatcagccgctttttatattcatgtacattcacctggggaaaaaaacggagggactttgctacttgtaaaaataacataataaatagatcttaaacataggaaaaccatactgttctgataataaaatgctttctatgaaataaaaaaaaaaaaaaaaaacttgggggcttttatggcaggggtgcgcggaaacgacgcaggttactgtgaacgtgcacccctgtggcccattatccggttttcccgtgaccccagtcttctcttgttctcacacgctgctagaatctgccgcggctccccccttatagggagcccgcaattaaaattcgcgaataaggccggtttaccccgcttaagtctcccccccacaaaaaaccgctcaactacatgatcaaacaacacatccgagtcaccagagtcaatcaatagaccggacgggagtttctcgcaccccacttctgcttctcccaccaaatacgtccggctgctcgcgtacacaccacatttttcaaccctttgtcgtccctctacttaaccaactctcctcttatccacgccccacaatctatacttactcagctcgacacgtcgctgatcacacttcttatccgacctccctatactcaccgccgactttcttactcactctttctaccctaccgcctcgctcacccgacaaagcacaacacactaagaaacactcctagctaaaccccacttcaattacaccaaatctccagtaacacacaccgactcacattcaaaccaagtaaatactacacacacaac

SEQ ID NO: 350896 - DNA, 1617 bp, Homo sapiens
gtgcgtttagggcgaagacggagttgtaaacttcttaaaattcctctctcgacacttcggtaattcctctttcgagactaaagctctttttgtatgcgtgtgtgtcaagcgtatgccccgggattctcctccgcttccttttctcggtcttccttcttgctttagggaccggaagagtccttgaaccaaaatagctcggcgggcacttccggggccggcgcccagagttccgggagggtgcaggcaggagagggaaaggcagcagcggcggcagctggaggatgaagaaggagcatgtgcttcactgccagttctccgcgtggtacccgttcttccgaggcgttaccatcaagagtgtcattcttccacttcctcagaatgtgaaggattatttactcgatgatggaactctggtggtttcaggaagggatgatccaccaacacattctcagccagacagtgatgatgaagcagaagaaatacagtggtctgatgatgagaacacagccacgcttacggcaccagaatttcctgagtttgccactaaagtccaggaagctatcaattccctcgggggcagtgtctttcctaagcttaattggagtgccccaagggatgcgtattggatagcaatgaatagttctctgaaatgtaaaaccctcagcgacatctttctgcttttcaagagttccgatttcatcactcgtgacttcactcagccgtttattcattgtactgatgattctccagatccatgtatagaatatgagctcgttctccgaaaatggtgtgaattgattcctggggctgagtttcgatgttttgtcaaggaaaacaagcttattggtatttctcaaagagactacacacaatactatgatcatatttctaaacaaaaggaagaaattcgcagatgcatacaagactttttcaagaaacacatacagtacaaattcttagatgaagacttcttactctgtcagccaggctggagtgcagtggtgcgatcgcggctcgtgcagcttccacctcccgggttcagttgtgttcgatatatacagagacagtagggggaaggtgtggctcattgactttaatccatttggtgaagtcacagattcactgctgttcacctgggaagaactgatatctgagaacaacttaaacggcgattttagtgaagttgacgctcaagagcaggattccccagctttccgttgcacaaacagtgaagtgacagtccagcccagcccctatttgagttaccggctacccaaggactttgtagacctctctactggggaggacgctcacaagctaatagacttccttaagctgaagagaaatcagcaggaggacgactgatgagcgtgctggaactggagaagaggaggccccgccccaccgctccgggagctgctcatcagccgcaacttcctgccgaccctgatgcgggtgggccgagcagtgtggacatcagccgctttttatattcatgtacattcacctggggaaaaaaacggagggactttgctacttgtaaaaataacataataaatagatcttaaacataggaaaaccatactgttctgataataaaatgctttctatgaaata

SEQ ID NO: 350897 - DNA, 1703 bp, Homo sapiens
  misc_feature (1494)..(1494): n is a, c, g, or t
  misc_feature (1496)..(1497): n is a, c, g, or t
  misc_feature (1502)..(1502): n is a, c, g, or t
  misc_feature (1507)..(1507): n is a, c, g, or t
  misc_feature (1515)..(1515): n is a, c, g, or t
  misc_feature (1524)..(1524): n is a, c, g, or t
  misc_feature (1526)..(1526): n is a, c, g, or t
gtgcgtttagggcgaagacggagttgtaaacttcttaaaattcctctctcgacacttcggtaattcctctttcgagactaaagctctttttgtatgcgtgtgtgtcaagcgtatgccccgggattctcctccgcttccttttctcggtcttccttcttgctttagggaccggaagagtccttgaaccaaaatagctcggcgggcacttccggggccggcgcccagagttccgggagggtgcaggcaggagagggaaaggcagcagcggcggcagctggaggatgaagaaggagcatgtgcttcactgccagttctccgcgtggtacccgttcttccgaggcgttaccatcaagagtgtcattcttccacttcctcagaatgtgaaggattatttactcgatgatggaactctggtggtttcaggaagggatgatccaccaacacattctcagccagacagtgatgatgaagcagaagaaatacagtggtctgatgatgagaacacagccacgcttacggcaccagaatttcctgagtttgccactaaagtccaggaagctatcaattccctcgggggcagtgtctttcctaagcttaattggagtgccccaagggatgcgtattggatagcaatgaatagttctctgaaatgtaaaaccctcagcgacatctttctgcttttcaagagttccgatttcatcactcgtgacttcactcagccgtttattcattgtactgatgattctccagatccatgtatagaatatgagctcgttctccgaaaatggtgtgaattgattcctggggctgagtttcgatgttttgtcaaggaaaacaagcttattggtatttctcaaagagactacacacaatactatgatcatatttctaaacaaaaggaagaaattcgcagatgcatacaagactttttcaagaaacacatacagtacaaattcttagatgaagactttgtgttcgatatatacagagacagtagggggaaggtgtggctcattgactttaatccatttggtgaagtcacagattcactgctgttcacctgggaagaactgatatctgagaacaacttaaacggcgattttagtgaagttgacgctcaagagcaggattccccagctttccgttgcacaaacagtgaagtgacagtccagcccagcccctatttgagttaccggctacccaaggactttgtagacctctctactggggaggacgctcacaagctaatagacttccttaagctgaagagaaatcagcaggaggacgactgatgagcgtgctggaactggagaagaggaggccccgccccaccgctccgggagctgctcatcagccgcaacttcctgccgaccctgatgcgggtgggccgagcagtgtggacatcagccgctttttatattcatgtacattcacctggggaaaaaaacggagggactttgctacttgtaaaaataacataataaatagatcttngnnacctntgttngtataaangtttttgananaaaaaagggggggttaaataccgagggcaggtacgtaccaggtttgtaaggggacaagggggttaaaaagcaggggggtaaactgtgggaaaagaggggttggaggcacacttggggtggagccaagaaaatgataatagatgagcatgggtgttaggttaattaattaataatatg

SEQ ID NO: 350898 - DNA, 1406 bp, Homo sapiens
gtgcgtttagggcgaagacggagttgtaaacttcttaaaattcctctctcgacacttcggtaattcctctttcgagactaaagctctttttgtatgcgtgtgtgtcaagcgtatgccccgggattctcctccgcttccttttctcggtcttccttcttgctttagggaccggaagagtccttgaaccaaaatagctcggcgggcacttccggggccggcgcccagagttccgggagggtgcaggcaggagagggaaaggcagcagcggcggcagctggaggatgaagaaggagcatgtgcttcactgccagttctccgcgtggtacccgttcttccgaggcgttaccatcaagagtgtcattcttccacttcctcagaatgtgaaggattatttactcgatgatggaactctggtggtttcaggaagggatgatccaccaacacattctcagccagacagtgatgatgaagcagaagaaatacagtggtctgatgatgagaacacagccacgcttacggcaccagaatttcctgagtttgccactaaagtccaggaagctatcaattccctcgggggcagtgtctttcctaagcttaattggagtgccccaagggatgcgtattggatagcaatgaatagttctctgaaatgtaaaaccctcagcgacatctttctgcttttcaagagttccgatttcatcactcgtgacttcactcagccgtttattcattgtactgatgattctccagatccatgtatagaatatgagctcgttctccgaaaatggtgtgaattgattcctggggctgagtttcgatgttttgtcaaggaaaacaagcttattggtatttctcaaagagactacacacaatactatgatcatatttctaaacaaaaggaagaaattcgcagatgcatacaagactttttcaagaaacacatacagtacaaattcttagatgaagactttgtgttcgatatatacagagacagtagggggaaggtgtggctcattgactttaatccatttggtgaagtcacagattcactgctgttcacctgggaagaactgatatctgagaacaacttaaacggcgattttagtgaagttgacgctcaagagcagaagagaaatcagcaggaggacgactgatgagcgtgctggaactggagaagaggaggccccgccccaccgctccgggagctgctcatcagccgcaacttcctgccgaccctgatgcgggtgggccgagcagtgtggacatcagccgctttttatattcatgtacattcacctggggaaaaaaacggagggactttgctacttgtaaaaataacataataaatagatcttaaacataggaaaaccatactgttctgataataaaatgctttctatgaaata

SEQ ID NO: 350899 - DNA, 1125 bp, Homo sapiens
  misc_feature (329)..(329): n is a, c, g, or t
agcataataagaagtgagatgaagtaagcagatctgaggattagagcactactgaggtctctggaaatagaaatcgcctagaattcgttacctcaccatgaggcacgctctaatcctgctcgctggaggatttcttccctatctcaatgctgacctggggacgagaaagactgtagaatctgaatgagtggtacatcatgaatgtgtgaagctcgatcagggatgagtgctggcgtgcctgttgtgaggagcttgcagcaagtgcaatccacatcgttgcatgttttcaatctacgccgtgccatccagttgctactgatgattctccnagatccatgtatagaatatgagctcgttctccgaaaatggtgtgaattgattcctggggctgagtttcgatgttttgtcaaggaaaacaagcttattggtatttctcaaagagactacacacaatactatgatcatatttctaaacaaaaggaagaaattcgcagatgcatacaagactttttcaagaaacacatacagtacaaattcttagatgaagactttgtgttcgatatatacagagacagtagggggaaggtgtggctcattgactttaatccatttggtgaagtcacagattcactgctgttcacctgggaagaactgatatctgagaacaacttaaacggcgattttagtgaagttgacgctcaagagcaggattccccagctttccgttgcacaaacagtgaagtgacagtccagcccagcccctatttgagttaccggctacccaaggactttgtagacctctctactggggaggacgctcacaagctaatagacttccttaagctgaagagaaatcagcaggaggacgactgatgagcgtgctggaactggagaagaggaggccccgccccaccgctccgggagctgctcatcagccgcaacttcctgccgaccctgatgcgggtgggccgagcagtgtggacatcagccgctttttatattcatgtacattcacctggggaaaaaaacggagggactttgctacttgtaaaaataacataataaatagatcttaaacataggaaaaccatactgttctgataataaaatgctttctatgaaata

SEQ ID NO: 350900 - DNA, 1415 bp, Homo sapiens
gtgcgtttagggcgaagacggagttgtaaacttcttaaaattcctctctcgacacttcggtaattcctctttcgagactaaagctctttttgtatgcgtgtgtgtcaagcgtatgccccgggattctcctccgcttccttttctcggtcttccttcttgctttagggaccggaagagtccttgaaccaaaatagctcggcgggcacttccggggccggcgcccagagttccgggagggtgcaggcaggagagggaaaggcagcagcggcggcagctggaggatgaagaaggagcatgtgcttcactgccagttctccgcgtggtacccgttcttccgaggcgttaccatcaagagtgtcattcttccacttcctcagaatgtgaaggattatttactcgatgatggaactctggtggtttcaggaagggatgatccaccaacacattctcagccagacagtgatgatgaagcagaagaaatacagtggtctgatgatgagaacacagccacgcttacggcaccagaatttcctgagtttgccactaaagtccaggaagctatcaattccctcgggggcagtgtctttcctaagcttaattggagtgccccaagggatgcgtattggatagcaatgaatagttctctgaaatgtaaaaccctcagcgacatctttctgcttttcaagagttccgatttcatcactcgtgacttcactcagccgtttattcattgtactgatgattctccagatccatgtatagaatatgagctcgttctccgaaaatggtgtgaattgattcctggggctgagtttcgatgttttgtcaaggaaaacaagcttattggtatttctcaaagagactacacacaatactatgatcatatttctaaacaaaaggaagaaattcgcagatgcatacaagactttttcaagaaacacatacagtacaaattcttagatgaagactttgtgttcgatatatacagagacagtagggattccccagctttccgttgcacaaacagtgaagtgacagtccagcccagcccctatttgagttaccggctacccaaggactttgtagacctctctactggggaggacgctcacaagctaatagacttccttaagctgaagagaaatcagcaggaggacgactgatgagcgtgctggaactggagaagaggaggccccgccccaccgctccgggagctgctcatcagccgcaacttcctgccgaccctgatgcgggtgggccgagcagtgtggacatcagccgctttttatattcatgtacattcacctggggaaaaaaacggagggactttgctacttgtaaaaataacataataaatagatcttaaacataggaaaaccatactgttctgataataaaatgctttctatgaaata

SEQ ID NO: 350901 - DNA, 1714 bp, Homo sapiens
gctttactgggtcccttctctcttcattcacagggggccctccctttagatctctgtctattcagacaggcggccctttctcagatgggatatagacagatgatcttttgaaataagtgagaagatttttaagattagaataatatgaagaatatctttctggccgggcgacgtggcttatgtctgtaatcccagcactttgggaggctgaggtgaggggattgcttgaacccaagagttcaagaccagcctgggcaacatggcgagaccctgtctcgaagaaaatacaaaaattagctgcatgtggtggtgcatgcctgtagtcccaggtactgaggaggctgaggcaggaggatcctttgagcccaggaggtcgaggctgcagtgagccgtgatcacaccagtgcactgcagcctgggcaacagcatgagaccctgtctcagaataaaaaagtgtttctttctcagaagacagagtacagaagatgtttgtttttgttttttctctctctgtgctacaggggaaggtgtggctcattgactttaatccatttggtgaagtcacagattcactgctgttcacctgggaagaactgatatctgagaacaacttaaacggcgattttagtgaagttgacgctcaagagcaggattccccagctttccgttgcacaaacagtgaagtgacagtccagcccagcccctatttgagttaccggctacccaaggactttgtagacctctctactggggaggacgctcacaagctaatagacttccttaagctgaagagaaatcagcaggaggacgactgatgagcgtgctggaactggagaagaggaggccccgccccaccgctccgggagctgctcatcagccgcaacttcctgccgaccctgatgcgggtgggccgagcagtgtggacatcagccgctttttatattcatgtacattcacctggggaaaaaaacggagggactttgctacttgtaaaaataacataataaatagatcttaaacataggaaaaccatactgttctgataataaaatgctttctatgaaataaaaaaaaaaaaaaaaaacttgggggcttttatggcaggggtgcgcggaaacgacgcaggttactgtgaacgtgcacccctgtggcccattatccggttttcccgtgaccccagtcttctcttgttctcacacgctgctagaatctgccgcggctccccccttatagggagcccgcaattaaaattcgcgaataaggccggtttaccccgcttaagtctcccccccacaaaaaaccgctcaactacatgatcaaacaacacatccgagtcaccagagtcaatcaatagaccggacgggagtttctcgcaccccacttctgcttctcccaccaaatacgtccggctgctcgcgtacacaccacatttttcaaccctttgtcgtccctctacttaaccaactctcctcttatccacgccccacaatctatacttactcagctcgacacgtcgctgatcacacttcttatccgacctccctatactcaccgccgactttcttactcactctttctaccctaccgcctcgctcacccgacaaagcacaacacactaagaaacactcctagctaaaccccacttcaattacaccaaatctccagtaacacacaccgactcacattcaaaccaagtaaatactacacacacaac

SEQ ID NO: 350902 - DNA, 527 bp, Homo sapiens
gtgcgtttagggcgaagacggagttgtaaacttcttaaaattcctctctcgacacttcggtaattcctctttcgagactaaagctctttttgtatgcgtgtgtgtcaagcgtatgccccgggattctcctccgcttccttttctcggtcttccttcttgctttagggaccggaagagtccttgaaccaaaatagctcggcgggcacttccggggccggcgcccagagttccgggagggtgcaggcaggagagggaaaggcagcagcggcggcagctggaggatgaagaaggagcatgtgcttcactgccagttctccgcgtggtacccgttcttccgaggcgttaccatcaagagtgtcattcttccacttcctcagaatgtgaaggattatttactcgatgatggaactctggtggtttcaggaaggtaaagtattttagaaaaaaatttcttaaactttatcataaagaaacacataaaatgaatgaattagcttaggcaccattctttccctttagctcttttt

SEQ ID NO: 350903 - DNA, 1438 bp, Homo sapiens
gtgcgtttagggcgaagacggagttgtaaacttcttaaaattcctctctcgacacttcgggaccggaagagtccttgaaccaaaatagctcggcgggcacttccggggccggcgcccagagttccgggagggtgcaggcaggagagggaaaggcagcagcggcggcagctggaggatgaagaaggagcatgtgcttcactgccagttctccgcgtggtacccgttcttccgaggcgttaccatcaagagtgtcattcttccacttcctcagaatgtgaaggattatttactcgatgatggaactctggtggtttcaggaagggatgatccaccaacacattctcagccagacagtgatgatgaagcagaagaaatacagtggtctgatgatgagaacacagccacgcttacggcaccagaatttcctgagtttgccactaaagtccaggaagctatcaattccctcgggggcagtgtctttcctaagcttaattggagtgccccaagggatgcgtattggatagcaatgaatagttctctgaaatgtaaaaccctcagcgacatctttctgcttttcaagagttccgatttcatcactcgtgacttcactcagccgtttattcattgtactgatgattctccagatccatgtatagaatatgagctcgttctccgaaaatggtgtgaattgattcctggggctgagtttcgatgttttgtcaaggaaaacaagcttattggtatttctcaaagagactacacacaatactatgatcatatttctaaacaaaaggaagaaattcgcagatgcatacaagactttttcaagaaacacatacagtacaaattcttagatgaagactttgtgttcgatatatacagagacagtagggggaaggtgtggctcattgactttaatccatttggtgaagtcacagattcactgctgttcacctgggaagaactgatatctgagaacaacttaaacggcgattttagtgaagttgacgctcaagagcaggattccccagctttccgttgcacaaacagtgaagtgacagtccagcccagcccctatttgagttaccggctacccaaggactttgtagacctctctactggggaggacgctcacaagctaatagacttccttaagctgaagagaaatcagcaggaggacgactgatgagcgtgctggaactggagaagaggaggccccgccccaccgctccgggagctgctcatcagccgcaacttcctgccgaccctgatgcgggtgggccgagcagtgtggacatcagccgctttttatattcatgtacattcacctggggaaaaaaacggagggactttgctacttgtaaaaataacataataaatagatcttaaacataggaaaaccatactgttctgataataaaatgctttctatgaaata

SEQ ID NO: 350904 - DNA, 1577 bp, Homo sapiens
gtgcgtttagggcgaagacggagttgtaaacttcttaaaattcctctctcgacacttcggtaattcctctttcgagactaaagctctttttgtatgcgtgtgtgtcaagcgtatgccccgggattctcctccgcttccttttctcggtcttccttcttgctttagggaccggaagagtccttgaaccaaaatagctcggcgggcacttccggggccggcgcccagagttccgggagggtgcaggcaggagagggaaaggcagcagcggcggcagctggaggatgaagaaggagcatgtgcttcactgccagttctccgcgtggtacccgttcttccgaggcgttaccatcaagagtgtcattcttccacttcctcagaatgtgaaggattatttactcgatgatggaactctggtggtttcaggaagggatgatccaccaacacattctcagccagacagtgatgatgaagcagaagaaatacagtggtctgatgatgagaacacagccacgcttacggcaccagaatttcctgagtttgccactaaagtccaggaagctatcaattccctcgggggcagtgtctttcctaagcttaattggagtgccccaagggatgcgtattggatagcaatgaatagttctctgaaatgtaaaaccctcagcgacatctttctgcttttcaagagttccgatttcatcactcgtgacttcactcagccgtttattcattgtactgatgattctccagatccatgtatagaatatgagctcgttctccgaaaatggtgtgaattgattcctggggctgagtttcgatgttttgtcaaggaaaacaagcttattggtatttctcaaagagactacacacaatactatgatcatatttctaaacaaaaggaagaaattcgcagatgcatacaagactttttcaagaaacacatacagtacaaattcttagatgaagactttgtgttcgatatatacagagacagtagggggaaggtgtggctcattgactttaatccatttggtgaagtcacagattcactgctgttcacctgggaagaactgatatctgagaacaacttaaacggcgattttagtgaagttgacgctcaagagcaggattccccagctttccgttgcacaaacagtgaagtgacagtccagcccagcccctatttgagttaccggctacccaaggactttgtagacctctctactggggaggacgctcacaagctaatagacttccttaagctgaagagaaatcagcaggaggacgactgatgagcgtgctggaactggagaagaggaggccccgccccaccgctccgggagctgctcatcagccgcaacttcctgccgaccctgatgcgggtgggccgagcagtgtggacatcagccgctttttatattcatgtacattcacctggggaaaaaaacggagggactttgctacttgtaaaaataacataataaatagatcttaaacataggaaaaccatactgttctgataataaaatgctttctatgaaataaaaacaaaataggcggacggccaaagatatccg

SEQ ID NO: 350905 - DNA, 2675 bp, Homo sapiens
gtgcgtttagggcgaagacggagttgtaaacttcttaaaattcctctctcgacacttcggtaattcctctttcgagactaaagctctttttgtatgcgtgtgtgtcaagcgtatgccccgggattctcctccgcttccttttctcggtcttccttcttgctttagggaccggaagagtccttgaaccaaaatagctcggcgggcacttccggggccggcgcccagagttccgggagggtgcaggcaggagagggaaaggcagcagcggcggcagctggaggatgaagaaggagcatgtgcttcactgccagttctccgcgtggtacccgttcttccgaggcgttaccatcaagagtgtcattcttccacttcctcagaatgtgaaggattatttactcgatgatggaactctggtggtttcaggaagggatgatccaccaacacattctcagccagacagtgatgatgaagcagaagaaatacagtggtctgatgatgagaacacagccacgcttacggcaccagaatttcctgagtttgccactaaagtccaggaagctatcaattccctcgggggcagtgtctttcctaagcttaattggagtgccccaagggatgcgtattggatagcaatgaatagttctctgaaatgtaaaaccctcagcgacatctttctgcttttcaagagttccgatttcatcactcgtgacttcactcagccgtttattcattgtactgatgattctccagatccatgtatagaatatgagctcgttctccgaaaatggtgtgaattgattcctggggctgagtttcgatgttttgtcaaggaaaacaagcttattggtatttctcaaagagactacacacaatactatgatcatatttctaaacaaaaggaagaaattcgcagatgcatacaagactttttcaagaaacacatacagtacaaattcttagatgaagactttgtgttcgatatatacagagacagtagggggaaggtgtggctcattgactttaatccatttggtgaagtcacagattcactgctgttcacctgggaagaactgatatctgagaacaacttaaacggcgattttagtgaagttgacgctcaagagcaggattccccagctttccgttgcacaaacagtgaagtgacagtccagcccagcccctatttgagttaccggctacccaaggactttgtagacctctctactggggaggacgctcacaagctaatagacttccttaagctgaagagaaatcagcaggaggacgactgatgagcgtgctggaactggagaagaggaggccccgccccaccgctccgggagctgctcatcagccgcaacttcctgccgaccctgatgcgggtgggccgagcagtgtggacatcagccgctttttatattcatgtacattcacctggggaaaaaaacggagggactttgctacttgtaaaaataacataataaatagatcttaaacataggaaaaccatactgttctgataataaaatgctttctatgaaatacaaaaaaaaaaaaaaacaacaaaagaaaaaaaaaaaaacaaaaaaaaagaggggggcccgcccacgaagatatccccccggggggcgccccaggtgtagcgcgtgtcccccgagttttgtgtggccaccaggggggccccccaagggaggagacccggcttacaataacaaacagctaggcaacgtgggcgccgcgtgtataacaaacaccccgtcgtggcaccggggagcaacacagcggtacaccaccgagggcgcaacacttggcggaagcgaggaccaccgccctaccacactctaggagaggggagccacaacaaaataggtgggcacaccaacaccaccctaacaagacggagacttccagagccgccccccaggggcgcacaatcataccaacaaacagcacaagaggggtacgataacggcggtcgtcaaacacaacaaccccgaacaataagcgtccgccgcacgggagctgcgacaaaatctagcgcggccacacccccgcgaatctcgcgaatcgcggaaaaacacaaatttaacaccacgggggcgcgcggcagaccgacacacgtatcgtcccaacgaacacgacacccacgtacgcacgcagcagagcagcgacaaaagcacaaaaagaatacagaagagggagaggccacggggaaggggcataggcggacacataacatacagcacggacgacgacacacgccaagacaaccagaaccggactacgaacaagcagaaccggaccgccgcccgagcccgccgcacgccgaaaaagcccgggagcgctagccagagcccagagcgcagactagggaagcggagggcggaggacgcagggacaacccgcctggagcacgagccgcaggcagcacagacaccgcacgagggcgccgcaagggagaggaacgcggcgacagagacgccaacggacccgcgcggcggccagcgcaaggacgcgcgacgagcacgaatgagcagacggcgagcacgcgccgcgcaccgccgagacactcgggggctggcacagcgcgagggcaagaagcgccagggcgaagagggcgagaggcgcgcagtccgcaacggccgagagcggcagcgagcgggaagaagacaggc

SEQ ID NO: 350906 - DNA, 1448 bp, Homo sapiens
gtgcgtttagggcgaagacggagttgtaaacttcttaaaattcctctctcgacacttcggtaattcctctttcgagactaaagctctttttgtatgcgtgtgtgtcaagcgtatgccccgggattctcctccgcttccttttctcggtcttccttcttgctttagggaccggaagagtccttgaaccaaaatagctcggcgggcacttccggggccggcgcccagagttccgggagggtgcaggcaggagagggaaaggcagcagcggcggcagctggaggatgaagaaggagcatgtgcttcactgccagttctccgcgtggtacccgttcttccgaggcgttaccatcaagagtgtcattcttccacttcctcagaatgtgaaggattatttactcgatgatggaactctggtggtttcaggaagggatgatccaccaacacattctcagccagacagtgatgatgaagcagaagaaatacagtggtctgatgatgagaacacagccacgcttacggatgcgtattggatagcaatgaatagttctctgaaatgtaaaaccctcagcgacatctttctgcttttcaagagttccgatttcatcactcgtgacttcactcagccgtttattcattgtactgatgattctccagatccatgtatagaatatgagctcgttctccgaaaatggtgtgaattgattcctggggctgagtttcgatgttttgtcaaggaaaacaagcttattggtatttctcaaagagactacacacaatactatgatcatatttctaaacaaaaggaagaaattcgcagatgcatacaagactttttcaagaaacacatacagtacaaattcttagatgaagactttgtgttcgatatatacagagacagtagggggaaggtgtggctcattgactttaatccatttggtgaagtcacagattcactgctgttcacctgggaagaactgatatctgagaacaacttaaacggcgattttagtgaagttgacgctcaagagcaggattccccagctttccgttgcacaaacagtgaagtgacagtccagcccagcccctatttgagttaccggctacccaaggactttgtagacctctctactggggaggacgctcacaagctaatagacttccttaagctgaagagaaatcagcaggaggacgactgatgagcgtgctggaactggagaagaggaggccccgccccaccgctccgggagctgctcatcagccgcaacttcctgccgaccctgatgcgggtgggccgagcagtgtggacatcagccgctttttatattcatgtacattcacctggggaaaaaaacggagggactttgctacttgtaaaaataacataataaatagatcttaaacataggaaaaccatactgttctgataataaaatgctttctatgaaata

SEQ ID NO: 350907 - DNA, 2544 bp, Homo sapiens
  misc_feature (1153)..(1153): n is a, c, g, or t
  misc_feature (1631)..(1631): n is a, c, g, or t
  misc_feature (1841)..(1841): n is a, c, g, or t
  misc_feature (1947)..(1947): n is a, c, g, or t
  misc_feature (1952)..(1952): n is a, c, g, or t
  misc_feature (1965)..(1965): n is a, c, g, or t
  misc_feature (1995)..(1995): n is a, c, g, or t
  misc_feature (1999)..(1999): n is a, c, g, or t
  misc_feature (2006)..(2006): n is a, c, g, or t
  misc_feature (2013)..(2013): n is a, c, g, or t
  misc_feature (2040)..(2040): n is a, c, g, or t
  misc_feature (2047)..(2047): n is a, c, g, or t
  misc_feature (2055)..(2055): n is a, c, g, or t
gtgcgtttagggcgaagacggagttgtaaacttcttaaaattcctctctcgacacttcggtaattcctctttcgagactaaagctctttttgtatgcgtgtgtgtcaagcgtatgccccgggattctcctccgcttccttttctcggtcttccttcttgctttagggaccggaagagtccttgaaccaaaatagctcggcgggcacttccggggccggcgcccagagttccgggagggtgcaggcaggagagggaaaggcagcagcggcggcagctggaggatgaagaaggagcatgtgcttcactgccagttctccgcgtggtacccgttcttccgaggcgttaccatcaagagtgtcattcttccacttcctcagaatgtgaaggattatttactcgatgatggaactctggtggtttcaggaagggatgatccaccaacacattctcagccagacagtgatgatgaagcagaagaaatacagtggtctgatgatgagaacacagccacgcttacggcaccagaatttcctgagtttgccactaaagtccaggaagctatcaattccctcgggggcagtgtctttcctaagcttaattggagtgccccaagggatgcgtattggatagcaatgaatagttctctgaaatgtaaaaccctcagcgacatctttctgcttttcaagagttccgatttcatcactcgtgacttcactcagccgtttattcattgtactgatgattctccagatccatgtatagaatatgagctcgttctccgaaaatggtgtgaattgattcctggggctgagtttcgatgttttgtcaaggaaaacaagcttattggtatttctcaaagagactacacacaatactatgatcatatttctaaacaaaaggaagaaattcgcagatgcatacaagactttttcaagaaacacatacagtacaaattcttagatgaagactttgtgttcgatatatacagagacagtagggggaaggtgtggctcattgactttaatccatttggtgaagtcacagattcactgctgttcacctgggaagaactgatatctgagaacaacttaaacggcgattttagtgaagttgacgctcaagagcaggtacaacatttttaagacagatacantgtaaacctttccagtctactgactgactgcttgttcttcagacgcataggtaggcggcaatggccaggacccttgggaagcgcagagtgtaacacagctttactaatagctaacctgcccatggtggtggtcaaagaagggggccccacttaactttatatacagaagtcaggatcatctgatcagtttttttagttctttttctgagcttcttctgtcacacccacctggaggaatcttggtcccagatcagctcatgcatctgttccttctgaccccagccccagctgctgaggccgacagagaagttacacacgtgcagcccagcggattcctgtcagctttctcctccatttccacggtgactggctcacgccttgatgcttctcagtctcccatcattccttccttcctctcagcagatgatttaacttgctgtttcccggaaaagggaacccactgatgagaattccctcngttgatttctcatcacacctacaagcttgtccgtcccttcctgagtctaatctcccccctccatacacttgtgtccccctctgtcatctccccactctggacactgtgtcctcctctgtcacctcccccctcagtacactgtgtcttcctctctcacctccccctcaggacactgtgtcctcctctctctcacctccccctcaggacacngtcctcctctctcacctcccactctggacactgtgtcctctctcaccgcccactccggacactgtgtcctcctctctctcacctccccctcaggacactgtcctcntctcncacctcccactcnggacactgtgtcctcctctctcacctcccnctcnggacacngtgtccncctctctcacctccccctcaggacacngtgtccncctctctnacctccccctcaggacactgtgtcctcctcctctttctccagatgccctctgctctttttgcaattcttcctctctatcaactctgtccatccggatttagtcatgttcagatacctcccatccgaaaaaaacaaaacattgttcaacccggtttcttcacccagccactctctcctttcctgccagcttcacagccagactttcctgaaacaactttgtagtgctgttttctgcccataaaagtaacatgtccaagacgggcggatcaggaagtcagggtatcgagaccatcctggctaacacggtgaaaacctgtctctactaaaaatacaaaaaaaaaattagccaggcgtggtggcgggcgcctgtagtcccagctacttgggaggctgcggcaggagaatggcatgaatccgggaggcagagcttgcagtgagccgagattgtgccactgcactccagcctgggcgacagggcaagactgtctc

SEQ ID NO: 350908 - DNA, 1067 bp, Homo sapiens
gctttactgggtcccttctctcttcattcacagggggccctccctttagatctctgtctattcagacaggcggccctttctcagatgggatatagacagatgatcttttgaaataagtgagaagatttttaagattagaataatatgaagaatatctttctggccgggcgacgtggcttatgtctgtaatcccagcactttgggaggctgaggtgaggggattgcttgaacccaagagttcaagaccagcctgggcaacatggcgagaccctgtctcgaagaaaatacaaaaattagctgcatgtggtggtgcatgcctgtagtcccaggtactgaggaggctgaggcaggaggatcctttgagcccaggaggtcgaggctgcagtgagccgtgatcacaccagtgcactgcagcctgggcaacagcatgagaccctgtctcagaataaaaaagtgtttctttctcagaagacagagtacagaagatgtttgtttttgttttttctctctctgtgctacaggggaaggtgtggctcattgactttaatccatttggtgaagtcacagattcactgctgttcacctgggaagaactgatatctgagaacaacttaaacggcgattttagtgaagttgacgctcaagagcaggattccccagctttccgttgcacaaacagtgaagtgacagtccagcccagcccctatttgagttaccggctacccaaggactttgtagacctctctactggggaggacgctcacaagctaatagacttccttaagctgaagagaaatcagcaggaggacgactgatgagcgtgctggaactggagaagaggaggccccgccccaccgctccgggagctgctcatcagccgcaacttcctgccgaccctgatgcgggtgggccgagcagtgtggacatcagccgctttttatattcatgtacattcacctggggaaaaaaacggagggactttgctacttgtaaaaataacataataaatagatcttaaacataggaaaaccatactgttctgataataaaatgctttctatgaaata

SEQ ID NO: 350909 - DNA, 883 bp, Homo sapiens
gtgcgtttagggcgaagacggagttgtaaacttcttaaaattcctctctcgacacttcggtaattcctctttcgagactaaagctctttttgtatgcgtgtgtgtcaagcgtatgccccgggattctcctccgcttccttttctcggtcttccttcttgctttagggaccggaagagtccttgaaccaaaatagctcggcgggcacttccggggccggcgcccagagttccgggagggtgcaggcaggagagggaaaggcagcagcggcggcagctggaggatgaagaaggagcatgtgcttcactgccagttctccgcgtggtacccgttcttccgaggcgttaccatcaagagtgtcattcttccacttcctcagaatgtgaaggattatttactcgatgatggaactctggtggtttcaggaagggatgatccaccaacacattctcagccagacagtgatgatgaagcagaagaaatacagtggtctgatgatgagaacacagccacgcttacggcaccagaatttcctgagtttgccactaaagtccaggaagctatcaattccctcgggggcagtgtctttcctaagcttaattggagtgccccaagggatgcgtattggatagcaatgaatagttctctgaaatgtaaaaccctcagcgacatctttctgcttttcaagagttcactttcacattctgcccttacttagctgctctttcttttctcgttcctccctatttcatgcctcctccccctcttgctccgccatatcctccattcttcccctgtccgcatctccctccttctcctctccctcttctctctctttctctcccgttctctcctttctcctccccctctcttccctcccttttc

SEQ ID NO: 350910 - DNA, 7931 bp, Homo sapiens
  misc_feature (86)..(86): n is a, c, g, or t
gcgcactcgggcacgcgctcggaagtcgggggtcggcgcggagtgcaggctgctcccggggtaggtgagggaagcgcggaggcggngcgcgggggcagtggtcggcgagcagcgcggtcctcgctaggggcgcccacccgtcagtctctccggcgcgagccgccgccaccgcccgcgccggagtcaggcccctgggcccccaggctcaagcagcgaagcggcctccgggggacgccgctaggcgagaggaacgcgccggtgcccttgccttcgccgtgacccagcgtgcgggcggcgggatgagagggagccatcgggccgcgccggccctgcggccccgggggcggctctggcccgtgctggccgtgctggcggcggccgccgcggcgggctgtgcccaggcagccatggacgagtgcacggacgagggcgggcggccgcagcgctgcatgcccgagttcgtcaacgccgctttcaacgtgactgtggtggccaccaacacgtgtgggactccgcccgaggaatactgtgtgcagaccggggtgaccggggtcaccaagtcctgtcacctgtgcgacgccgggcagccccacctgcagcacggggcagccttcctgaccgactacaacaaccaggccgacaccacctggtggcaaagccagaccatgctggccggggtgcagtaccccagctccatcaacctcacgctgcacctgggaaaagcttttgacatcacctatgtgcgtctcaagttccacaccagccgcccggagagctttgccatttacaagcgcacacgggaagacgggccctggattccttaccagtactacagtggttcctgcgagaacacctactccaaggcaaaccgcggcttcatcaggacaggaggggacgagcagcaggccttgtgtactgatgaattcagtgacatttctcccctcactgggggcaacgtggccttttctaccctggaaggaaggcccagcgcctataactttgacaatagccctgtgctgcaggaatgggtaactgccactgacatcagagtaactcttaatcgcctgaacacttttggagatgaagtgtttaacgatcccaaagttctcaagtcctattattatgccatctctgattttgctgtaggtggcagatgtaaatgtaatggacacgcaagcgagtgtatgaagaacgaatttgataagctggtgtgtaattgcaaacataacacatatggagtagactgtgaaaagtgtcttcctttcttcaatgaccggccgtggaggagggcaactgcggaaagtgccagtgaatgcctgccctgtgattgcaatggtcgatcccaggaatgctacttcgaccctgaactctatcgttccactggccatgggggccactgtaccaactgccaggataacacagatggcgcccactgtgagaggtgccgagagaacttcttccgccttggcaacaatgaagcctgctcttcatgccactgtagtcctgtgggctctctaagcacacagtgtgatagttacggcagatgcagctgtaagccaggagtgatgggggacaaatgtgaccgttgccagcctggattccattctctcactgaagcaggatgcaggccatgctcttgtgatccctctggcagcatagatgaatgtaatgttgaaacaggaagatgtgtttgcaaagacaatgtcgaaggcttcaattgtgaaagatgcaaacctggattttttaatctggaatcatctaatcctcggggttgcacaccctgcttctgctttgggcattcttctgtctgtacaaacgctgttggctacagtgtttattctatctcctctacctttcagattgatgaggatgggtggcgtgcggaacagagagatggctctgaagcatctctcgagtggtcctctgagaggcaagatatcgccgtgatctcagacagctactttcctcggtacttcattgctcctgcaaagttcttgggcaagcaggtgttgagttatggtcagaacctctccttctcctttcgagtggacaggcgagatactcgcctctctgccgaagaccttgtgcttgagggagctggcttaagagtatctgtacccttgatcgctcagggcaattcctatccaagtgagaccactgtgaagtatgtcttcaggctccatgaagcaacagattacccttggaggcctgctcttaccccttttgaatttcagaagctcctaaacaacttgacctctatcaagatacgtgggacatacagtgagagaagtgctggatatttggatgatgtcaccctggcaagtgctcgtcctgggcctggagtccctgcaacttgggtggagtcctgcacctgtcctgtgggatatggagggcagttttgtgagatgtgcctctcaggttacagaagagaaactcctaatcttggaccatacagtccatgtgtgctttgcgcctgcaatggacacagcgagacctgtgatcctgagacaggtgtttgtaactgcagagacaatacggctggcccgcactgtgagaagtgcagtgatgggtactatggagattcaactgcaggcacctcctccgattgccaaccctgtccgtgtcctggaggttcaagttgtgctgttgttcccaagacaaaggaggtggtgtgcaccaactgtcctactggcaccactggtaagagatgtgagctctgtgatgatggctactttggagaccccctgggtagaaacggccctgtgagactttgccgcctgtgccagtgcagtgacaacatcgatcccaacgcagttggaaattgcaatcgcttgacgggagaatgcctgaagtgcatctataacactgctggcttctattgtgaccggtgcaaagacggattttttggaaatcccctggctcccaatccagcagacaaatgcaaagcctgcaattgcaatccgtatgggaccatgaagcagcagagcagctgtaaccccgtgacggggcagtgtgaatgtttgcctcacgtgactggccaggactgtggtgcttgtgaccctggattctacaatctgcagagtgggcaaggctgtgagaggtgtgactgccatgccttgggctccaccaatgggcagtgtgacatccgcaccggccagtgtgagtgccagcccggcatcactggtcagcactgtgagcgctgtgaggtcaaccactttgggtttggacctgaaggctgcaaaccctgtgactgtcatcctgagggatctctttcacttcagtgcaaagatgatggtcgctgtgaatgcagagaaggctttgtgggaaatcgctgtgaccagtgtgaagaaaactatttctacaatcggtcttggcctggctgccaggaatgtccagcttgttaccggctggtaaaggataaggttgctgatcatagagtgaagctccaggaattagagagtctcatagcaaaccttggaactggggatgagatggtgacagatcaagccttcgaggatagactaaaggaagcagagagggaagttatggacctccttcgtgaggcccaggatgtcaaagatgttgaccagaatttgatggatcgcctacagagagtgaataacactctgtccagccaaattagccgtttacagaatatccggaataccattgaagagactggaaacttggctgaacaagcgcgtgcccatgtagagaacacagagcggttgattgaaatcgcatccagagaacttgagaaagcaaaagtcgctgctgccaatgtgtcagtcactcagccagaatctacaggggacccaaacaacatgactcttttggcagaagaggctcgaaagcttgctgaacgtcataaacaggaagctgatgacattgttcgagtggcaaagacagccaatgatacgtcaactgaggcatacaacctgcttctgaggacactggcaggagaaaatcaaacagcatttgagattgaagagcttaataggaagtatgaacaagcgaagaacatctcacaggatctggaaaaacaagctgcccgagtacatgaggaggccaaaagggccggtgacaaagctgtggagatctatgccagcgtggctcagctgagccctttggactctgagacactggagaatgaagcaaataacataaagatggaagctgagaatctggaacaactgattgaccagaaattaaaagattatgaggacctcagagaagatatgagagggaaggaacttgaagtcaagaaccttctggagaaaggcaagactgaacagcagaccgcagaccaactcctagcccgagctgatgctgccaaggccctcgctgaagaagctgcaaagaagggacgggataccttacaagaagctaatgacattctcaacaacctgaaagattttgataggcgcgtgaacgataacaagacggccgcagaggaggcactaaggaagattcctgccatcaaccagaccatcactgaagccaatgaaaagaccagagaagcccagcaggccctgggcagtgctgcggcggatgccacagaggccaagaacaaggcccatgaggcggagaggatcgcaagcgctgtccaaaagaatgccaccagcaccaaggcagaagctgaaagaacttttgcagaagttacagatctggataatgaggtgaacaatatgttgaagcaactgcaggaagcagaaaaagagctaaagagaaaacaagatgacgctgaccaggacatgatgatggcagggatggcttcacaggctgctcaagaagccgagatcaatgccagaaaagccaaaaactctgttactagcctcctcagcattattaatgacctcttggagcagctggggcagctggatacagtggacctgaataagctaaacgagattgaaggcaccctaaacaaagccaaagatgaaatgaaggtcagcgatcttgataggaaagtgtctgacctggagaatgaagccaagaagcaggaggctgccatcatggactataaccgagatatcgaggagatcatgaaggacattcgcaatctggaggacatcaggaagaccttaccatctggctgcttcaacaccccgtccattgaaaagccctagtgtctttagggctggaaggcagcatccctctgacaggggggcagttgtgaggccacagagtgccttgacacaaagattacatttttcagacccccactcctctgctgctgtccatcactgtccttttgaaccaggaaaagtcacagagtttaaagagaagcaaattaaacatcctgaatcgggaacaaagggttttatctaataaagtgtctcttccattcacgttgctaccttacccacactttcccttctgatttgcgtgaggacgtggcatcctacgttactgtacagtggcataagcacatcgtgtgagcccatgtatgctggggtagagcaagtagccctcccctgtctcatcgataccagcagaacctcctcagtctcagtactcttgtttctatgaaggaaaagtttggctactaacagtagcattgtgatggccagtatatccagtccatggataaagaaaatgcatctgcatctcctgcccctcttccttctaagcaaaaggaaataaacatcctgtgccaaaggtattggtcatttagaatgtcggtagccatccatcagtgcttttagttattatgagtgtaggacactgagccatccgtgggtcaggatgcaattatttataaaagtctccaggtgaacatggctgaagatttttctagtatattaataattgactaggaagatgaactttttttcagatctttgggcagctgataatttaaatctggatgggcagcttgcactcaccaatagaccaaaagacatcttttgatattcttataaatggaacttacacagaagaaatagggatatgataaccactaaagttttgttttcaaaatcaaactaattcttacagcttttttattagttagtcttggaactagtgttaagtatctggcagagaacagttaatccctaaggtcttgacaaaacagaagaaaaacaagcctcctcgtcctagtcttttctagcaaagggataaaacttagatggcagcttgtactgtcagaatcccgtgtatccatttgttcttctgttggagagatgagacatttgacccttagctccagttttcttctgatgtttccatcttccagaatccctcaaaaaacattgtttgccaaatcctggtggcaaatacttgcactcagtatttcacacagctgccaacgctatcgagttcctgcactttgtgatttaaatccactctaaaccttccctctaagtgtagagggaagacccttacgtggagtttcctagtgggcttctcaacttttgatcctcagctctgtggttttaagaccacagtgtgacagttccctgccacacacccccttcctcctaccaacccacctttgagattcatatatagcctttaacactatgcaactttgtactttgcgtagcaggggcggggtggggggaaagaaactattatctgacacactggtgctattaattatttcaaatttatatttttgtgtgaatgttttgtgttttgtttatcatgattatagaataaggaatttatgtaaatatacttagtcctatttctagaatgacactctgttcactttgctcaatttttcctcttcactggcacaatgtatctgaatacctccttccctcccttctagaattctttggattgtactccaaagaattgtgccttgtgtttgcagcatctccattctctaaaattaatataattgctttcctccacacccagccactgtaaagaggtaacttgggtcctcttccattgcagtcctgatgatcctaacctgcagcacggtggttttacaatgttccagagcaggaacgccaggttgacaagctatggtaggattaggaaagtttgctgaagaggatctttgacgccacagtgggactagccaggaatgagggagaaatgccctttttggcaattgttggagctggataggtaagttttataagggagtacattttgactgagcacttagggcatcaggaacagtgctacttactggtgggtagactgggagaggtggtgtaacttagttcttgatgatcccacttcctgtttccatctgcttgggatataccagagtttaccacaagtgttttgacgatatactcctgagctttcactctgctgcttctcccaggcctcttctactatggcaggagatgtggtgtgctgttgcaaagttttcacgtcatcgtttcctggctagttcatttcattaagtggctacatcctaacatatgcatttggtcaaggttgcagaagaggactgaagattgactgccaagctagtttgggtgaagttcactccagcaagtctcaggccacaatggggtggtttggtttggtttccttttaactttctttttgttatttgcttttctcctccacctgtgtggtatattttttaagcagaattttattttttaaaataaaaggttctttacaagatgataccttaattacactcccgcaacacagccattattttattgtctagctccagttatctgtattttatgtaatgtaattgacaggatggctgctgcagaatgctggttgacacagggattattatactgctatttttccctgaatttttttcctttgaattccaactgtggaccttttatatgtgccttcactttagctgtttgccttaatctctacagccttgctctccagggtggttaataaaatgcaacacttggcatttttatgttttaagaaaaacagtattttatttataataaaatctgaatatttgtaacccttta

SEQ ID NO: 350911 - DNA, 5363 bp, Homo sapiens
  misc_feature (86)..(86): n is a, c, g, or t
gcgcactcgggcacgcgctcggaagtcgggggtcggcgcggagtgcaggctgctcccggggtaggtgagggaagcgcggaggcggngcgcgggggcagtggtcggcgagcagcgcggtcctcgctaggggcgcccacccgtcagtctctccggcgcgagccgccgccaccgcccgcgccggagtcaggcccctgggcccccaggctcaagcagcgaagcggcctccgggggacgccgctaggcgagaggaacgcgccggtgcccttgccttcgccgtgacccagcgtgcgggcggcgggatgagagggagccatcgggccgcgccggccctgcggccccgggggcggctctggcccgtgctggccgtgctggcggcggccgccgcggcgggctgtgcccaggcagccatggacgagtgcacggacgagggcgggcggccgcagcgctgcatgcccgagttcgtcaacgccgctttcaacgtgactgtggtggccaccaacacgtgtgggactccgcccgaggaatactgtgtgcagaccggggtgaccggggtcaccaagtcctgtcacctgtgcgacgccgggcagccccacctgcagcacggggcagccttcctgaccgactacaacaaccaggccgacaccacctggtggcaaagccagaccatgctggccggggtgcagtaccccagctccatcaacctcacgctgcacctgggaaaagcttttgacatcacctatgtgcgtctcaagttccacaccagccgcccggagagctttgccatttacaagcgcacacgggaagacgggccctggattccttaccagtactacagtggttcctgcgagaacacctactccaaggcaaaccgcggcttcatcaggacaggaggggacgagcagcaggccttgtgtactgatgaattcagtgacatttctcccctcactgggggcaacgtggccttttctaccctggaaggaaggcccagcgcctataactttgacaatagccctgtgctgcaggaatgggtaactgccactgacatcagagtaactcttaatcgcctgaacacttttggagatgaagtgtttaacgatcccaaagttctcaagtcctattattatgccatctctgattttgctgtaggtggcagatgtaaatgtaatggacacgcaagcgagtgtatgaagaacgaatttgataagctggtgtgtaattgcaaacataacacatatggagtagactgtgaaaagtgtcttcctttcttcaatgaccggccgtggaggagggcaactgcggaaagtgccagtgaatgcctgccctgtgattgcaatggtcgatcccaggaatgctacttcgaccctgaactctatcgttccactggccatgggggccactgtaccaactgccaggataacacagatggcgcccactgtgagaggtgccgagagaacttcttccgccttggcaacaatgaagcctgctcttcatgccactgtagtcctgtgggctctctaagcacacagtgtgatagttacggcagatgcagctgtaagccaggagtgatgggggacaaatgtgaccgttgccagcctggattccattctctcactgaagcaggatgcaggccatgctcttgtgatccctctggcagcatagatgaatgtaatgttgaaacaggaagatgtgtttgcaaagacaatgtcgaaggcttcaattgtgaaagatgcaaacctggattttttaatctggaatcatctaatcctcggggttgcacaccctgcttctgctttgggcattcttctgtctgtacaaacgctgttggctacagtgtttattctatctcctctacctttcagattgatgaggatgggtggcgtgcggaacagagagatggctctgaagcatctctcgagtggtcctctgagaggcaagatatcgccgtgatctcagacagctactttcctcggtacttcattgctcctgcaaagttcttgggcaagcaggtgttgagttatggtcagaacctctccttctcctttcgagtggacaggcgagatactcgcctctctgccgaagaccttgtgcttgagggagctggcttaagagtatctgtacccttgatcgctcagggcaattcctatccaagtgagaccactgtgaagtatgtcttcaggctccatgaagcaacagattacccttggaggcctgctcttaccccttttgaatttcagaagctcctaaacaacttgacctctatcaagatacgtgggacatacagtgagagaagtgctggatatttggatgatgtcaccctggcaagtgctcgtcctgggcctggagtccctgcaacttgggtggagtcctgcacctgtcctgtgggatatggagggcagttttgtgagatgtgcctctcaggttacagaagagaaactcctaatcttggaccatacagtccatgtgtgctttgcgcctgcaatggacacagcgagacctgtgatcctgagacaggtgtttgtaactgcagagacaatacggctggcccgcactgtgagaagtgcagtgatgggtactatggagattcaactgcaggcacctcctccgattgccaaccctgtccgtgtcctggaggttcaagttgtgctgttgttcccaagacaaaggaggtggtgtgcaccaactgtcctactggcaccactggtaagagatgtgagctctgtgatgatggctactttggagaccccctgggtagaaacggccctgtgagactttgccgcctgtgccagtgcagtgacaacatcgatcccaacgcagttggaaattgcaatcgcttgacgggagaatgcctgaagtgcatctataacactgctggcttctattgtgaccggtgcaaagacggattttttggaaatcccctggctcccaatccagcagacaaatgcaaagcctgcaattgcaatccgtatgggaccatgaagcagcagagcagctgtaaccccgtgacggggcagtgtgaatgtttgcctcacgtgactggccaggactgtggtgcttgtgaccctggattctacaatctgcagagtgggcaaggctgtgagaggtgtgactgccatgccttgggctccaccaatgggcagtgtgacatccgcaccggccagtgtgagtgccagcccggcatcactggtcagcactgtgagcgctgtgaggtcaaccactttgggtttggacctgaaggctgcaaaccctgtgactgtcatcctgagggatctctttcacttcagtgcaaagatgatggtcgctgtgaatgcagagaaggctttgtgggaaatcgctgtgaccagtgtgaagaaaactatttctacaatcggtcttggcctggctgccaggaatgtccagcttgttaccggctggtaaaggataaggttgctgatcatagagtgaagctccaggaattagagagtctcatagcaaaccttggaactggggatgagatggtgacagatcaagccttcgaggatagactaaaggaagcagagagggaagttatggacctccttcgtgaggcccaggatgtcaaagatgttgaccagaatttgatggatcgcctacagagagtgaataacactctgtccagccaaattagccgtttacagaatatccggaataccattgaagagactggaaacttggctgaacaagcgcgtgcccatgtagagaacacagagcggttgattgaaatcgcatccagagaacttgagaaagcaaaagtcgctgctgccaatgtgtcagtcactcagccagaatctacaggggacccaaacaacatgactcttttggcagaagaggctcgaaagcttgctgaacgtcataaacaggaagctgatgacattgttcgagtggcaaagacagccaatgatacgtcaactgaggcatacaacctgcttctgaggacactggcaggagaaaatcaaacagcatttgagattgaagagcttaataggaagtatgaacaagcgaagaacatctcacaggatctggaaaaacaagctgcccgagtacatgaggaggccaaaagggccggtgacaaagctgtggagatctatgccagcgtggctcagctgagccctttggactctgagacactggagaatgaagcaaataacataaagatggaagctgagaatctggaacaactgattgaccagaaattaaaagattatgaggacctcagagaagatatgagagggaaggaacttgaagtcaagaaccttctggagaaaggcaagactgaacagcagaccgcagaccaactcctagcccgagctgatgctgccaaggccctcgctgaagaagctgcaaagaagggacgggataccttacaagaagctaatgacattctcaacaacctgaaagattttgataggcgcgtgaacgataacaagacggccgcagaggaggcactaaggaagattcctgccatcaaccagaccatcactgaagccaatgaaaagaccagagaagcccagcaggccctgggcagtgctgcggcggatgccacagaggccaagaacaaggcccatgaggcggagaggatcgcaagcgctgtccaaaagaatgccaccagcaccaaggcagaagctgaaagaacttttgcagaagttacagatctggataatgaggtgaacaatatgttgaagcaactgcaggaagcagaaaaagagctaaagagaaaacaagatgacgctgaccaggacatgatgatggcagggatggcttcacaggctgctcaagaagccgagatcaatgccagaaaagccaaaaactctgttactagcctcctcagcattattaatgacctcttggagcagctggggcagctggatacagtggacctgaataagctaaacgagattgaaggcaccctaaacaaagccaaagatgaaatgaaggtcagcgatcttgataggaaagtgtctgacctggagaatgaagccaagaagcaggaggctgccatcatggactataaccgagatatcgaggagatcatgaaggacattcgcaatctggaggacatcaggaagaccttaccatctggctgcttcaacaccccgtccattgaaaagccctagtgtctttagggctggaaggcagcatccctctgacaggggggcagttgtgaggccacagagtgccttgacacaaagattacatttttcagacccccactcctctgctgctgtccatcactgtccttttgaaccaggaaaagtcacagagtttaaagagaagcaaattaaacatcctgaatcgggaacaaagggttttatctaataaagtgtctcttccattcacgttgctacctt

SEQ ID NO: 350912 - DNA, 972 bp, Homo sapiens
  misc_feature (86)..(86): n is a, c, g, or t
gcgcactcgggcacgcgctcggaagtcgggggtcggcgcggagtgcaggctgctcccggggtaggtgagggaagcgcggaggcggngcgcgggggcagtggtcggcgagcagcgcggtcctcgctaggggcgcccacccgtcagtctctccggcgcgagccgccgccaccgcccgcgccggagtcaggcccctgggcccccaggctcaagcagcgaagcggcctccgggggacgccgctaggcgagaggaacgcgccggtgcccttgccttcgccgtgacccagcgtgcgggcggcgggatgagagggagccatcgggccgcgccggccctgcggccccgggggcggctctggcccgtgctggccgtgctggcggcggccgccgcggcgggctgtgcccaggcagccatggacgagtgcacggacgagggcgggcggccgcagcgctgcatgcccgagttcgtcaacgccgctttcaacgtgactgtggtggccaccaacacgtgtgggactccgcccgaggaatactgtgtgcagaccggggtgaccggggtcaccaagtcctgtcacctgtgcgacgccgggcagccccacctgcagcacggggcagccttcctgaccgactacaacaaccaggccgacaccacctggtggcaaagccagaccatgctggccggggtgcagtaccccagctccatcaacctcacgctgcacctggatgacacgtggaataaattgcacattaaaatgtctgacatgaaaatcagaagagcttaagttcattccacagaagccttttgttagaatcttcaaaggatgagaaccaggatgaagaagagtttacagtagggaagtatttctcaactgtaattgtacataaaaattgcctatggtgctttaaaaaaatacagagtctggggacacatgttctcgggatctcctaagggctgtcacagaccataaagtttaagaa

SEQ ID NO: 350913 - DNA, 372 bp, Homo sapiens
agctgggtgcagtcacccctagacttggatgtggagtgagtacccctgttgactttaacatctgtgtgtgtcttaaagaagactgctacttttctggtttattgtctatgcctacagatgacacgtggaataaattgcacattaaaatgtctgacatgaaaatcagaagagcttaagttcattccacagaagccttttgttagaatcttcaaaggatgagaaccaggatgaagaagagtttacagtagggaagtatttctcaactgtaattgtacataaaaattgcctatggtgctttaaaaaaatacagagtctggggacacatgttctcgggatctcctaagggctgtcacagaccataaagtttaagaa

SEQ ID NO: 350914 - DNA, 761 bp, Homo sapiens
  misc_feature (86)..(86): n is a, c, g, or t
gcgcactcgggcacgcgctcggaagtcgggggtcggcgcggagtgcaggctgctcccggggtaggtgagggaagcgcggaggcggngcgcgggggcagtggtcggcgagcagcgcggtcctcgctaggggcgcccacccgtcagtctctccggcgcgagccgccgccaccgcccgcgccggagtcaggcccctgggcccccaggctcaagcagcgaagcggcctccgggggacgccgctaggcgagaggaacgcgccggtgcccttgccttcgccgtgacccagcgtgcgggcggcgggatgagagggagccatcgggccgcgccggccctgcggccccgggggcggctctggcccgtgctggccgtgctggcggcggccgccgcggcgggctgtgcccaggcagccatggacgagtgcacggacgagggcgggcggccgcagcgctgcatgcccgagttcgtcaacgccgctttcaacgtgactgtggtggccaccaacacgtgtgggactccgcccgaggaatactgtgtgcagaccggggtgaccggggtcaccaagtcctgtcacctgtgcgacgccgggcagccccacctgcagcacggggcagccttcctgaccgactacaacaaccaggccgacaccacctggtggcaaagccagaccatgctggccggggtgcagtaccccagctccatcaacctcacgctgcacctggtttcagctacttgggaggctgaggcagagggatcattcgagcta

SEQ ID NO: 350915 - DNA, 7723 bp, Homo sapiens
  misc_feature (86)..(86): n is a, c, g, or t
gcgcactcgggcacgcgctcggaagtcgggggtcggcgcggagtgcaggctgctcccggggtaggtgagggaagcgcggaggcggngcgcgggggcagtggtcggcgagcagcgcggtcctcgctaggggcgcccacccgtcagtctctccggcgcgagccgccgccaccgcccgcgccggagtcaggcccctgggcccccaggctcaagcagcgaagcggcctccgggggacgccgctaggcgagaggaacgcgccggtgcccttgccttcgccgtgacccagcgtgcgggcggcgggatgagagggagccatcgggccgcgccggccctgcggccccgggggcggctctggcccgtgctggccgtgctggcggcggccgccgcggcgggctgtgcccaggcagccatggacgagtgcacggacgagggcgggcggccgcagcgctgcatgcccgagttcgtcaacgccgctttcaacgtgactgtggtggccaccaacacgtgtgggactccgcccgaggaatactgtgtgcagaccggggtgaccggggtcaccaagtcctgtcacctgtgcgacgccgggcagccccacctgcagcacggggcagccttcctgaccgatacagtggttcctgcgagaacacctactccaaggcaaaccgcggcttcatcaggacaggaggggacgagcagcaggccttgtgtactgatgaattcagtgacatttctcccctcactgggggcaacgtggccttttctaccctggaaggaaggcccagcgcctataactttgacaatagccctgtgctgcaggaatgggtaactgccactgacatcagagtaactcttaatcgcctgaacacttttggagatgaagtgtttaacgatcccaaagttctcaagtcctattattatgccatctctgattttgctgtaggtggcagatgtaaatgtaatggacacgcaagcgagtgtatgaagaacgaatttgataagctggtgtgtaattgcaaacataacacatatggagtagactgtgaaaagtgtcttcctttcttcaatgaccggccgtggaggagggcaactgcggaaagtgccagtgaatgcctgccctgtgattgcaatggtcgatcccaggaatgctacttcgaccctgaactctatcgttccactggccatgggggccactgtaccaactgccaggataacacagatggcgcccactgtgagaggtgccgagagaacttcttccgccttggcaacaatgaagcctgctcttcatgccactgtagtcctgtgggctctctaagcacacagtgtgatagttacggcagatgcagctgtaagccaggagtgatgggggacaaatgtgaccgttgccagcctggattccattctctcactgaagcaggatgcaggccatgctcttgtgatccctctggcagcatagatgaatgtaatgttgaaacaggaagatgtgtttgcaaagacaatgtcgaaggcttcaattgtgaaagatgcaaacctggattttttaatctggaatcatctaatcctcggggttgcacaccctgcttctgctttgggcattcttctgtctgtacaaacgctgttggctacagtgtttattctatctcctctacctttcagattgatgaggatgggtggcgtgcggaacagagagatggctctgaagcatctctcgagtggtcctctgagaggcaagatatcgccgtgatctcagacagctactttcctcggtacttcattgctcctgcaaagttcttgggcaagcaggtgttgagttatggtcagaacctctccttctcctttcgagtggacaggcgagatactcgcctctctgccgaagaccttgtgcttgagggagctggcttaagagtatctgtacccttgatcgctcagggcaattcctatccaagtgagaccactgtgaagtatgtcttcaggctccatgaagcaacagattacccttggaggcctgctcttaccccttttgaatttcagaagctcctaaacaacttgacctctatcaagatacgtgggacatacagtgagagaagtgctggatatttggatgatgtcaccctggcaagtgctcgtcctgggcctggagtccctgcaacttgggtggagtcctgcacctgtcctgtgggatatggagggcagttttgtgagatgtgcctctcaggttacagaagagaaactcctaatcttggaccatacagtccatgtgtgctttgcgcctgcaatggacacagcgagacctgtgatcctgagacaggtgtttgtaactgcagagacaatacggctggcccgcactgtgagaagtgcagtgatgggtactatggagattcaactgcaggcacctcctccgattgccaaccctgtccgtgtcctggaggttcaagttgtgctgttgttcccaagacaaaggaggtggtgtgcaccaactgtcctactggcaccactggtaagagatgtgagctctgtgatgatggctactttggagaccccctgggtagaaacggccctgtgagactttgccgcctgtgccagtgcagtgacaacatcgatcccaacgcagttggaaattgcaatcgcttgacgggagaatgcctgaagtgcatctataacactgctggcttctattgtgaccggtgcaaagacggattttttggaaatcccctggctcccaatccagcagacaaatgcaaagcctgcaattgcaatccgtatgggaccatgaagcagcagagcagctgtaaccccgtgacggggcagtgtgaatgtttgcctcacgtgactggccaggactgtggtgcttgtgaccctggattctacaatctgcagagtgggcaaggctgtgagaggtgtgactgccatgccttgggctccaccaatgggcagtgtgacatccgcaccggccagtgtgagtgccagcccggcatcactggtcagcactgtgagcgctgtgaggtcaaccactttgggtttggacctgaaggctgcaaaccctgtgactgtcatcctgagggatctctttcacttcagtgcaaagatgatggtcgctgtgaatgcagagaaggctttgtgggaaatcgctgtgaccagtgtgaagaaaactatttctacaatcggtcttggcctggctgccaggaatgtccagcttgttaccggctggtaaaggataaggttgctgatcatagagtgaagctccaggaattagagagtctcatagcaaaccttggaactggggatgagatggtgacagatcaagccttcgaggatagactaaaggaagcagagagggaagttatggacctccttcgtgaggcccaggatgtcaaagatgttgaccagaatttgatggatcgcctacagagagtgaataacactctgtccagccaaattagccgtttacagaatatccggaataccattgaagagactggaaacttggctgaacaagcgcgtgcccatgtagagaacacagagcggttgattgaaatcgcatccagagaacttgagaaagcaaaagtcgctgctgccaatgtgtcagtcactcagccagaatctacaggggacccaaacaacatgactcttttggcagaagaggctcgaaagcttgctgaacgtcataaacaggaagctgatgacattgttcgagtggcaaagacagccaatgatacgtcaactgaggcatacaacctgcttctgaggacactggcaggagaaaatcaaacagcatttgagattgaagagcttaataggaagtatgaacaagcgaagaacatctcacaggatctggaaaaacaagctgcccgagtacatgaggaggccaaaagggccggtgacaaagctgtggagatctatgccagcgtggctcagctgagccctttggactctgagacactggagaatgaagcaaataacataaagatggaagctgagaatctggaacaactgattgaccagaaattaaaagattatgaggacctcagagaagatatgagagggaaggaacttgaagtcaagaaccttctggagaaaggcaagactgaacagcagaccgcagaccaactcctagcccgagctgatgctgccaaggccctcgctgaagaagctgcaaagaagggacgggataccttacaagaagctaatgacattctcaacaacctgaaagattttgataggcgcgtgaacgataacaagacggccgcagaggaggcactaaggaagattcctgccatcaaccagaccatcactgaagccaatgaaaagaccagagaagcccagcaggccctgggcagtgctgcggcggatgccacagaggccaagaacaaggcccatgaggcggagaggatcgcaagcgctgtccaaaagaatgccaccagcaccaaggcagaagctgaaagaacttttgcagaagttacagatctggataatgaggtgaacaatatgttgaagcaactgcaggaagcagaaaaagagctaaagagaaaacaagatgacgctgaccaggacatgatgatggcagggatggcttcacaggctgctcaagaagccgagatcaatgccagaaaagccaaaaactctgttactagcctcctcagcattattaatgacctcttggagcagctggggcagctggatacagtggacctgaataagctaaacgagattgaaggcaccctaaacaaagccaaagatgaaatgaaggtcagcgatcttgataggaaagtgtctgacctggagaatgaagccaagaagcaggaggctgccatcatggactataaccgagatatcgaggagatcatgaaggacattcgcaatctggaggacatcaggaagaccttaccatctggctgcttcaacaccccgtccattgaaaagccctagtgtctttagggctggaaggcagcatccctctgacaggggggcagttgtgaggccacagagtgccttgacacaaagattacatttttcagacccccactcctctgctgctgtccatcactgtccttttgaaccaggaaaagtcacagagtttaaagagaagcaaattaaacatcctgaatcgggaacaaagggttttatctaataaagtgtctcttccattcacgttgctaccttacccacactttcccttctgatttgcgtgaggacgtggcatcctacgttactgtacagtggcataagcacatcgtgtgagcccatgtatgctggggtagagcaagtagccctcccctgtctcatcgataccagcagaacctcctcagtctcagtactcttgtttctatgaaggaaaagtttggctactaacagtagcattgtgatggccagtatatccagtccatggataaagaaaatgcatctgcatctcctgcccctcttccttctaagcaaaaggaaataaacatcctgtgccaaaggtattggtcatttagaatgtcggtagccatccatcagtgcttttagttattatgagtgtaggacactgagccatccgtgggtcaggatgcaattatttataaaagtctccaggtgaacatggctgaagatttttctagtatattaataattgactaggaagatgaactttttttcagatctttgggcagctgataatttaaatctggatgggcagcttgcactcaccaatagaccaaaagacatcttttgatattcttataaatggaacttacacagaagaaatagggatatgataaccactaaagttttgttttcaaaatcaaactaattcttacagcttttttattagttagtcttggaactagtgttaagtatctggcagagaacagttaatccctaaggtcttgacaaaacagaagaaaaacaagcctcctcgtcctagtcttttctagcaaagggataaaacttagatggcagcttgtactgtcagaatcccgtgtatccatttgttcttctgttggagagatgagacatttgacccttagctccagttttcttctgatgtttccatcttccagaatccctcaaaaaacattgtttgccaaatcctggtggcaaatacttgcactcagtatttcacacagctgccaacgctatcgagttcctgcactttgtgatttaaatccactctaaaccttccctctaagtgtagagggaagacccttacgtggagtttcctagtgggcttctcaacttttgatcctcagctctgtggttttaagaccacagtgtgacagttccctgccacacacccccttcctcctaccaacccacctttgagattcatatatagcctttaacactatgcaactttgtactttgcgtagcaggggcggggtggggggaaagaaactattatctgacacactggtgctattaattatttcaaatttatatttttgtgtgaatgttttgtgttttgtttatcatgattatagaataaggaatttatgtaaatatacttagtcctatttctagaatgacactctgttcactttgctcaatttttcctcttcactggcacaatgtatctgaatacctccttccctcccttctagaattctttggattgtactccaaagaattgtgccttgtgtttgcagcatctccattctctaaaattaatataattgctttcctccacacccagccactgtaaagaggtaacttgggtcctcttccattgcagtcctgatgatcctaacctgcagcacggtggttttacaatgttccagagcaggaacgccaggttgacaagctatggtaggattaggaaagtttgctgaagaggatctttgacgccacagtgggactagccaggaatgagggagaaatgccctttttggcaattgttggagctggataggtaagttttataagggagtacattttgactgagcacttagggcatcaggaacagtgctacttactggtgggtagactgggagaggtggtgtaacttagttcttgatgatcccacttcctgtttccatctgcttgggatataccagagtttaccacaagtgttttgacgatatactcctgagctttcactctgctgcttctcccaggcctcttctactatggcaggagatgtggtgtgctgttgcaaagttttcacgtcatcgtttcctggctagttcatttcattaagtggctacatcctaacatatgcatttggtcaaggttgcagaagaggactgaagattgactgccaagctagtttgggtgaagttcactccagcaagtctcaggccacaatggggtggtttggtttggtttccttttaactttctttttgttatttgcttttctcctccacctgtgtggtatattttttaagcagaattttattttttaaaataaaaggttctttacaagatgataccttaattacactcccgcaacacagccattattttattgtctagctccagttatctgtattttatgtaatgtaattgacaggatggctgctgcagaatgctggttgacacagggattattatactgctatttttccctgaatttttttcctttgaattccaactgtggaccttttatatgtgccttcactttagctgtttgccttaatctctacagccttgctctccagggtggttaataaaatgcaacacttggcatttttatgttttaagaaaaacagtattttatttataataaaatctgaatatttgtaacccttta

SEQ ID NO: 350916 - DNA, 8279 bp, Homo sapiens
  misc_feature (86)..(86): n is a, c, g, or t
gcgcactcgggcacgcgctcggaagtcgggggtcggcgcggagtgcaggctgctcccggggtaggtgagggaagcgcggaggcggngcgcgggggcagtggtcggcgagcagcgcggtcctcgctaggggcgcccacccgtcagtctctccggcgcgagccgccgccaccgcccgcgccggagtcaggcccctgggcccccaggctcaagcagcgaagcggcctccgggggacgccgctaggcgagaggaacgcgccggtgcccttgccttcgccgtgacccagcgtgcgggcggcgggatgagagggagccatcgggccgcgccggccctgcggccccgggggcggctctggcccgtgctggccgtgctggcggcggccgccgcggcgggctgtgcccaggcagccatggacgagtgcacggacgagggcgggcggccgcagcgctgcatgcccgagttcgtcaacgccgctttcaacgtgactgtggtggccaccaacacgtgtgggactccgcccgaggaatactgtgtgcagaccggggtgaccggggtcaccaagtcctgtcacctgtgcgacgccgggcagccccacctgcagcacggggcagccttcctgaccgactacaacaaccaggccgacaccacctggtggcaaagccagaccatgctggccggggtgcagtaccccagctccatcaacctcacgctgcacctgggaaaagcttttgacatcacctatgtgcgtctcaagttccacaccagccgcccggagagctttgccatttacaagcgcacacgggaagacgggccctggattccttaccagtactacagtggttcctgcgagaacacctactccaaggcaaaccgcggcttcatcaggacaggaggggacgagcagcaggccttgtgtactgatgaattcagtgacatttctcccctcactgggggcaacgtggccttttctaccctggaaggaaggcccagcgcctataactttgacaatagccctgtgctgcaggaatgggtaactgccactgacatcagagtaactcttaatcgcctgaacacttttggagatgaagtgtttaacgatcccaaagttctcaagtcctattattatgccatctctgattttgctgtaggtggcagatgtaaatgtaatggacacgcaagcgagtgtatgaagaacgaatttgataagctggtgtgtaattgcaaacataacacatatggagtagactgtgaaaagtgtcttcctttcttcaatgaccggccgtggaggagggcaactgcggaaagtgccagtgaatgcctgccctgtgattgcaatggtcgatcccaggaatgctacttcgaccctgaactctatcgttccactggccatgggggccactgtaccaactgccaggataacacagatggcgcccactgtgagaggtgccgagagaacttcttccgccttggcaacaatgaagcctgctcttcatgccactgtagtcctgtgggctctctaagcacacagtgtgatagttacggcagatgcagctgtaagccaggagtgatgggggacaaatgtgaccgttgccagcctggattccattctctcactgaagcaggatgcaggccatgctcttgtgatccctctggcagcatagatgaatgtaatgttgaaacaggaagatgtgtttgcaaagacaatgtcgaaggcttcaattgtgaaagatgcaaacctggattttttaatctggaatcatctaatcctcggggttgcacaccctgcttctgctttgggcattcttctgtctgtacaaacgctgttggctacagtgtttattctatctcctctacctttcagattgatgaggatgggtggcgtgcggaacagagagatggctctgaagcatctctcgagtggtcctctgagaggcaagatatcgccgtgatctcagacagctactttcctcggtacttcattgctcctgcaaagttcttgggcaagcaggtgttgagttatggtcagaacctctccttctcctttcgagtggacaggcgagatactcgcctctctgccgaagaccttgtgcttgagggagctggcttaagagtatctgtacccttgatcgctcagggcaattcctatccaagtgagaccactgtgaagtatgtcttcaggctccatgaagcaacagattacccttggaggcctgctcttaccccttttgaatttcagaagctcctaaacaacttgacctctatcaagatacgtgggacatacagtgagagaagtgctggatatttggatgatgtcaccctggcaagtgctcgtcctgggcctggagtccctgcaacttgggtggagtcctgcacctgtcctgtgggatatggagggcagttttgtgagatgtgcctctcaggttacagaagagaaactcctaatcttggaccatacagtccatgtgtgctttgcgcctgcaatggacacagcgagacctgtgatcctgagacaggtgtttgtaactgcagagacaatacggctggcccgcactgtgagaagtgcagtgatgggtactatggagattcaactgcaggcacctcctccgattgccaaccctgtccgtgtcctggaggttcaagttgtgctgttgttcccaagacaaaggaggtggtgtgcaccaactgtcctactggcaccactggtaagagatgtgagctctgtgatgatggctactttggagaccccctgggtagaaacggccctgtgagactttgccgcctgtgccagtgcagtgacaacatcgatcccaacgcagttggaaattgcaatcgcttgacgggagaatgcctgaagtgcatctataacactgctggcttctattgtgaccggtgcaaagacggattttttggaaatcccctggctcccaatccagcagacaaatgcaaagcctgcaattgcaatccgtatgggaccatgaagcagcagagcagctgtaaccccgtgacggggcagtgtgaatgtttgcctcacgtgactggccaggactgtggtgcttgtgaccctggattctacaatctgcagagtgggcaaggctgtgagaggtgtgactgccatgccttgggctccaccaatgggcagtgtgacatccgcaccggccagtgtgagtgccagcccggcatcactggtcagcactgtgagcgctgtgaggtcaaccactttgggtttggacctgaaggctgcaaaccctgtgactgtcatcctgagggatctctttcacttcagtgcaaagatgatggtcgctgtgaatgcagagaaggctttgtgggaaatcgctgtgaccagtgtgaagaaaactatttctacaatcggtcttggcctggctgccaggaatgtccagcttgttaccggctggtaaaggataaggttgctgatcatagagtgaagctccaggaattagagagtctcatagcaaaccttggaactggggatgagatggtgacagatcaagccttcgaggatagactaaaggaagcagagagggaagttatggacctccttcgtgaggcccaggatgtcaaagatgttgaccagaatttgatggatcgcctacagagagtgaataacactctgtccagccaaattagccgtttacagaatatccggaataccattgaagagactggaaacttggctgaacaagcgcgtgcccatgtagagaacacagagcggttgattgaaatcgcatccagagaacttgagaaagcaaaagtcgctgctgccaatgtgtcagtcactcagccagaatctacaggggacccaaacaacatgactcttttggcagaagaggctcgaaagcttgctgaacgtcataaacaggaagctgatgacattgttcgagtggcaaagacagccaatgatacgtcaactgaggcatacaacctgcttctgaggacactggcaggagaaaatcaaacagcatttgagattgaagagcttaataggaagtatgaacaagcgaagaacatctcacaggatctggaaaaacaagctgcccgagtacatgaggaggccaaaagggccggtgacaaagctgtggagatctatgccagcgtggctcagctgagccctttggactctgagacactggagaatgaagcaaataacataaagatggaagctgagaatctggaacaactgattgaccagaaattaaaagattatgaggacctcagagaagatatgagagggaaggaacttgaagtcaagaaccttctggagaaaggcaagactgaacagcagaccgcagaccaactcctagcccgagctgatgctgccaaggccctcgctgaagaagctgcaaagaagggacgggataccttacaagaagctaatgacattctcaacaacctgaaagattttgataggcgcgtgaacgataacaagacggccgcagaggaggcactaaggaagattcctgccatcaaccagaccatcactgaagccaatgaaaagaccagagaagcccagcaggccctgggcagtgctgcggcggatgccacagaggccaagaacaaggcccatgaggcggagaggatcgcaagcgctgtccaaaagaatgccaccagcaccaaggcagaagctgaaagaacttttgcagaagttacagatctggataatgaggtgaacaatatgttgaagcaactgcaggaagcagaaaaagagctaaagagaaaacaagatgacgctgaccaggacatgatgatggcagggatggcttcacaggctgctcaagaagccgagatcaatgccagaaaagccaaaaactctgttactagcctcctcagcattattaatgacctcttggagcagctggggcagctggatacagtggacctgaataagctaaacgagattgaaggcaccctaaacaaagccaaagatgaaatgaaggtcagcgatcttgataggaaagtgtctgacctggagaatgaagccaagaagcaggaggctgccatcatggactataaccgagatatcgaggagatcatgaaggacattcgcaatctggaggacatcaggaagaccttaccatctggctgcttcaacaccccgtccattgaaaagccctagtgtctttagggctggaaggcagcatccctctgacaggggggcagttgtgaggccacagagtgccttgacacaaagattacatttttcagacccccactcctctgctgctgtccatcactgtccttttgaaccaggaaaagtcacagagtttaaagagaagcaaattaaacatcctgaatcgggaacaaagggttttatctaataaagtgtctcttccattcacgttgctaccttacccacactttcccttctgatttgcgtgaggacgtggcatcctacgttactgtacagtggcataagcacatcgtgtgagcccatgtatgctggggtagagcaagtagccctcccctgtctcatcgataccagcagaacctcctcagtctcagtactcttgtttctatgaaggaaaagtttggctactaacagtagcattgtgatggccagtatatccagtccatggataaagaaaatgcatctgcatctcctgcccctcttccttctaagcaaaaggaaataaacatcctgtgccaaaggtattggtcatttagaatgtcggtagccatccatcagtgcttttagttattatgagtgtaggacactgagccatccgtgggtcaggatgcaattatttataaaagtctccaggtgaacatggctgaagatttttctagtatattaataattgactaggaagatgaactttttttcagatctttgggcagctgataatttaaatctggatgggcagcttgcactcaccaatagaccaaaagacatcttttgatattcttataaatggaacttacacagaagaaatagggatatgataaccactaaagttttgttttcaaaatcaaactaattcttacagcttttttattagttagtcttggaactagtgttaagtatctggcagagaacagttaatccctaaggtcttgacaaaacagaagaaaaacaagcctcctcgtcctagtcttttctagcaaagggataaaacttagatggcagcttgtactgtcagaatcccgtgtatccatttgttcttctgttggagagatgagacatttgacccttagctccagttttcttctgatgtttccatcttccagaatccctcaaaaaacattgtttgccaaatcctggtggcaaatacttgcactcagtatttcacacagctgccaacgctatcgagttcctgcactttgtgatttaaatccactctaaaccttccctctaagtgtagagggaagacccttacgtggagtttcctagtgggcttctcaacttttgatcctcagctctgtggttttaagaccacagtgtgacagttccctgccacacacccccttcctcctaccaacccacctttgagattcatatatagcctttaacactatgcaactttgtactttgcgtagcaggggcggggtggggggaaagaaactattatctgacacactggtgctattaattatttcaaatttatatttttgtgtgaatgttttgtgttttgtttatcatgattatagaataaggaatttatgtaaatatacttagtcctatttctagaatgacactctgttcactttgctcaatttttcctcttcactggcacaatgtatctgaatacctccttccctcccttctagaattctttggattgtactccaaagaattgtgccttgtgtttgcagcatctccattctctaaaattaatataattgctttcctccacacccagccactgtaaagaggtaacttgggtcctcttccattgcagtcctgatgatcctaacctgcagcacggtggttttacaatgttccagagcaggaacgccaggttgacaagctatggtaggattaggaaagtttgctgaagaggatctttgacgccacagtgggactagccaggaatgagggagaaatgccctttttggcaattgttggagctggataggtaagttttataagggagtacattttgactgagcacttagggcatcaggaacagtgctacttactggtgggtagactgggagaggtggtgtaacttagttcttgatgatcccacttcctgtttccatctgcttgggatataccagagtttaccacaagtgttttgacgatatactcctgagctttcactctgctgcttctcccaggcctcttctactatggcaggagatgtggtgtgctgttgcaaagttttcacgtcatcgtttcctggctagttcatttcattaagtggctacatcctaacatatgcatttggtcaaggttgcagaagaggactgaagattgactgccaagctagtttgggtgaagttcactccagcaagtctcaggccacaatggggtggtttggtttggtttccttttaactttctttttgttatttgcttttctcctccacctgtgtggtatattttttaagcagaattttattttttaaaataaaaggttctttacaagatgataccttaattacactcccgcaacacagccattattttattgtctagctccagttatctgtattttatgtaatgtaattgacaggatggctgctgcagaatgctggttgacacagggattattatactgctatttttccctgaatttttttcctttgaattccaactgtggaccttttatatgtgccttcactttagctgtttgccttaatctctacagccttgctctccagggtggttaataaaatgcaacacttggcatttttatgttttaagaaaaacagtattttatttataataaaatctgaatatttgtaaccctttaaaaaaaaaaaaaaaaaaaaaaaaaaaaaaatttgtggggcgccggcatcggcacctcgaaaaaagttctccaagagaccccactccggtgtgggggcgccggcggcgcccaaggtaggtgtcctgccagacacagtggcgccaaaaggtaggtccccaaaaggaagacacccgggcgcccgcggaactagggtggcggggttttctcccaccaaataaaaaaacgcgccgcggggggacaccccgggtgtccggaaacaaatcccaaaatgtcgcgtccggaagcgccaaagcgcgctccaaccccagggaggccaagcggagcggaaaaaaatacacaggggaaggg

SEQ ID NO: 350917 - DNA, 5195 bp, Homo sapiens
cgctaagccttcaaaatccagtgtgtatctcacgtttatagcacatctcaattcagactcaccagccacatttaaagtgctcagtagccacatgtgacagcagctaccaacctggcaacacaggtctaaagaatctctttaggttgtttatattttagtatttctctcaggtgatttgtgtcttttgccatctctgtcttcctgccttagcctgcaattgcaatccgtatgggaccatgaagcagcagagcagctgtaaccccgtgacggggcagtgtgaatgtttgcctcacgtgactggccaggactgtggtgcttgtgaccctggattctacaatctgcagagtgggcaaggctgtgagaggtgtgactgccatgccttgggctccaccaatgggcagtgtgacatccgcaccggccagtgtgagtgccagcccggcatcactggtcagcactgtgagcgctgtgaggtcaaccactttgggtttggacctgaaggctgcaaaccctgtgactgtcatcctgagggatctctttcacttcagtgcaaagatgatggtcgctgtgaatgcagagaaggctttgtgggaaatcgctgtgaccagtgtgaagaaaactatttctacaatcggtcttggcctggctgccaggaatgtccagcttgttaccggctggtaaaggataaggttgctgatcatagagtgaagctccaggaattagagagtctcatagcaaaccttggaactggggatgagatggtgacagatcaagccttcgaggatagactaaaggaagcagagagggaagttatggacctccttcgtgaggcccaggatgtcaaagatgttgaccagaatttgatggatcgcctacagagagtgaataacactctgtccagccaaattagccgtttacagaatatccggaataccattgaagagactggaaacttggctgaacaagcgcgtgcccatgtagagaacacagagcggttgattgaaatcgcatccagagaacttgagaaagcaaaagtcgctgctgccaatgtgtcagtcactcagccagaatctacaggggacccaaacaacatgactcttttggcagaagaggctcgaaagcttgctgaacgtcataaacaggaagctgatgacattgttcgagtggcaaagacagccaatgatacgtcaactgaggcatacaacctgcttctgaggacactggcaggagaaaatcaaacagcatttgagattgaagagcttaataggaagtatgaacaagcgaagaacatctcacaggatctggaaaaacaagctgcccgagtacatgaggaggccaaaagggccggtgacaaagctgtggagatctatgccagcgtggctcagctgagccctttggactctgagacactggagaatgaagcaaataacataaagatggaagctgagaatctggaacaactgattgaccagaaattaaaagattatgaggacctcagagaagatatgagagggaaggaacttgaagtcaagaaccttctggagaaaggcaagactgaacagcagaccgcagaccaactcctagcccgagctgatgctgccaaggccctcgctgaagaagctgcaaagaagggacgggataccttacaagaagctaatgacattctcaacaacctgaaagattttgataggcgcgtgaacgataacaagacggccgcagaggaggcactaaggaagattcctgccatcaaccagaccatcactgaagccaatgaaaagaccagagaagcccagcaggccctgggcagtgctgcggcggatgccacagaggccaagaacaaggcccatgaggcggagaggatcgcaagcgctgtccaaaagaatgccaccagcaccaaggcagaagctgaaagaacttttgcagaagttacagatctggataatgaggtgaacaatatgttgaagcaactgcaggaagcagaaaaagagctaaagagaaaacaagatgacgctgaccaggacatgatgatggcagggatggcttcacaggctgctcaagaagccgagatcaatgccagaaaagccaaaaactctgttactagcctcctcagcattattaatgacctcttggagcagctggggcagctggatacagtggacctgaataagctaaacgagattgaaggcaccctaaacaaagccaaagatgaaatgaaggtcagcgatcttgataggaaagtgtctgacctggagaatgaagccaagaagcaggaggctgccatcatggactataaccgagatatcgaggagatcatgaaggacattcgcaatctggaggacatcaggaagaccttaccatctggctgcttcaacaccccgtccattgaaaagccctagtgtctttagggctggaaggcagcatccctctgacaggggggcagttgtgaggccacagagtgccttgacacaaagattacatttttcagacccccactcctctgctgctgtccatcactgtccttttgaaccaggaaaagtcacagagtttaaagagaagcaaattaaacatcctgaatcgggaacaaagggttttatctaataaagtgtctcttccattcacgttgctaccttacccacactttcccttctgatttgcgtgaggacgtggcatcctacgttactgtacagtggcataagcacatcgtgtgagcccatgtatgctggggtagagcaagtagccctcccctgtctcatcgataccagcagaacctcctcagtctcagtactcttgtttctatgaaggaaaagtttggctactaacagtagcattgtgatggccagtatatccagtccatggataaagaaaatgcatctgcatctcctgcccctcttccttctaagcaaaaggaaataaacatcctgtgccaaaggtattggtcatttagaatgtcggtagccatccatcagtgcttttagttattatgagtgtaggacactgagccatccgtgggtcaggatgcaattatttataaaagtctccaggtgaacatggctgaagatttttctagtatattaataattgactaggaagatgaactttttttcagatctttgggcagctgataatttaaatctggatgggcagcttgcactcaccaatagaccaaaagacatcttttgatattcttataaatggaacttacacagaagaaatagggatatgataaccactaaagttttgttttcaaaatcaaactaattcttacagcttttttattagttagtcttggaactagtgttaagtatctggcagagaacagttaatccctaaggtcttgacaaaacagaagaaaaacaagcctcctcgtcctagtcttttctagcaaagggataaaacttagatggcagcttgtactgtcagaatcccgtgtatccatttgttcttctgttggagagatgagacatttgacccttagctccagttttcttctgatgtttccatcttccagaatccctcaaaaaacattgtttgccaaatcctggtggcaaatacttgcactcagtatttcacacagctgccaacgctatcgagttcctgcactttgtgatttaaatccactctaaaccttccctctaagtgtagagggaagacccttacgtggagtttcctagtgggcttctcaacttttgatcctcagctctgtggttttaagaccacagtgtgacagttccctgccacacacccccttcctcctaccaacccacctttgagattcatatatagcctttaacactatgcaactttgtactttgcgtagcaggggcggggtggggggaaagaaactattatctgacacactggtgctattaattatttcaaatttatatttttgtgtgaatgttttgtgttttgtttatcatgattatagaataaggaatttatgtaaatatacttagtcctatttctagaatgacactctgttcactttgctcaatttttcctcttcactggcacaatgtatctgaatacctccttccctcccttctagaattctttggattgtactccaaagaattgtgccttgtgtttgcagcatctccattctctaaaattaatataattgctttcctccacacccagccactgtaaagaggtaacttgggtcctcttccattgcagtcctgatgatcctaacctgcagcacggtggttttacaatgttccagagcaggaacgccaggttgacaagctatggtaggattaggaaagtttgctgaagaggatctttgacgccacagtgggactagccaggaatgagggagaaatgccctttttggcaattgttggagctggataggtaagttttataagggagtacattttgactgagcacttagggcatcaggaacagtgctacttactggtgggtagactgggagaggtggtgtaacttagttcttgatgatcccacttcctgtttccatctgcttgggatataccagagtttaccacaagtgttttgacgatatactcctgagctttcactctgctgcttctcccaggcctcttctactatggcaggagatgtggtgtgctgttgcaaagttttcacgtcatcgtttcctggctagttcatttcattaagtggctacatcctaacatatgcatttggtcaaggttgcagaagaggactgaagattgactgccaagctagtttgggtgaagttcactccagcaagtctcaggccacaatggggtggtttggtttggtttccttttaactttctttttgttatttgcttttctcctccacctgtgtggtatattttttaagcagaattttattttttaaaataaaaggttctttacaagatgataccttaattacactcccgcaacacagccattattttattgtctagctccagttatctgtattttatgtaatgtaattgacaggatggctgctgcagaatgctggttgacacagggattattatactgctatttttccctgaatttttttcctttgaattccaactgtggaccttttatatgtgccttcactttagctgtttgccttaatctctacagccttgctctccagggtggttaataaaatgcaacacttggcatttttatgttttaagaaaaacagtattttatttataataaaatctgaatatttgtaacccttta

SEQ ID NO: 350918 - DNA, 4566 bp, Homo sapiens
gagtcttggccctgtgttaaattggtttccgcaagttaccggcgggtaaaggataaggttgctgatcatagagtgaagctccaggaattagagagtctcatagcaaaccttggaactggggatgagatggtgacagatcaagccttcgaggatagactaaaggaagcagagagggaagttatggacctccttcgtgaggcccaggatgtcaaagatgttgaccagaatttgatggatcgcctacagagagtgaataacactctgtccagccaaattagccgtttacagaatatccggaataccattgaagagactggaaacttggctgaacaagcgcgtgcccatgtagagaacacagagcggttgattgaaatcgcatccagagaacttgagaaagcaaaagtcgctgctgccaatgtgtcagtcactcagccagaatctacaggggacccaaacaacatgactcttttggcagaagaggctcgaaagcttgctgaacgtcataaacaggaagctgatgacattgttcgagtggcaaagacagccaatgatacgtcaactgaggcatacaacctgcttctgaggacactggcaggagaaaatcaaacagcatttgagattgaagagcttaataggaagtatgaacaagcgaagaacatctcacaggatctggaaaaacaagctgcccgagtacatgaggaggccaaaagggccggtgacaaagctgtggagatctatgccagcgtggctcagctgagccctttggactctgagacactggagaatgaagcaaataacataaagatggaagctgagaatctggaacaactgattgaccagaaattaaaagattatgaggacctcagagaagatatgagagggaaggaacttgaagtcaagaaccttctggagaaaggcaagactgaacagcagaccgcagaccaactcctagcccgagctgatgctgccaaggccctcgctgaagaagctgcaaagaagggacgggataccttacaagaagctaatgacattctcaacaacctgaaagattttgataggcgcgtgaacgataacaagacggccgcagaggaggcactaaggaagattcctgccatcaaccagaccatcactgaagccaatgaaaagaccagagaagcccagcaggccctgggcagtgctgcggcggatgccacagaggccaagaacaaggcccatgaggcggagaggatcgcaagcgctgtccaaaagaatgccaccagcaccaaggcagaagctgaaagaacttttgcagaagttacagatctggataatgaggtgaacaatatgttgaagcaactgcaggaagcagaaaaagagctaaagagaaaacaagatgacgctgaccaggacatgatgatggcagggatggcttcacaggctgctcaagaagccgagatcaatgccagaaaagccaaaaactctgttactagcctcctcagcattattaatgacctcttggagcagctggggcagctggatacagtggacctgaataagctaaacgagattgaaggcaccctaaacaaagccaaagatgaaatgaaggtcagcgatcttgataggaaagtgtctgacctggagaatgaagccaagaagcaggaggctgccatcatggactataaccgagatatcgaggagatcatgaaggacattcgcaatctggaggacatcaggaagaccttaccatctggctgcttcaacaccccgtccattgaaaagccctagtgtctttagggctggaaggcagcatccctctgacaggggggcagttgtgaggccacagagtgccttgacacaaagattacatttttcagacccccactcctctgctgctgtccatcactgtccttttgaaccaggaaaagtcacagagtttaaagagaagcaaattaaacatcctgaatcgggaacaaagggttttatctaataaagtgtctcttccattcacgttgctaccttacccacactttcccttctgatttgcgtgaggacgtggcatcctacgttactgtacagtggcataagcacatcgtgtgagcccatgtatgctggggtagagcaagtagccctcccctgtctcatcgataccagcagaacctcctcagtctcagtactcttgtttctatgaaggaaaagtttggctactaacagtagcattgtgatggccagtatatccagtccatggataaagaaaatgcatctgcatctcctgcccctcttccttctaagcaaaaggaaataaacatcctgtgccaaaggtattggtcatttagaatgtcggtagccatccatcagtgcttttagttattatgagtgtaggacactgagccatccgtgggtcaggatgcaattatttataaaagtctccaggtgaacatggctgaagatttttctagtatattaataattgactaggaagatgaactttttttcagatctttgggcagctgataatttaaatctggatgggcagcttgcactcaccaatagaccaaaagacatcttttgatattcttataaatggaacttacacagaagaaatagggatatgataaccactaaagttttgttttcaaaatcaaactaattcttacagcttttttattagttagtcttggaactagtgttaagtatctggcagagaacagttaatccctaaggtcttgacaaaacagaagaaaaacaagcctcctcgtcctagtcttttctagcaaagggataaaacttagatggcagcttgtactgtcagaatcccgtgtatccatttgttcttctgttggagagatgagacatttgacccttagctccagttttcttctgatgtttccatcttccagaatccctcaaaaaacattgtttgccaaatcctggtggcaaatacttgcactcagtatttcacacagctgccaacgctatcgagttcctgcactttgtgatttaaatccactctaaaccttccctctaagtgtagagggaagacccttacgtggagtttcctagtgggcttctcaacttttgatcctcagctctgtggttttaagaccacagtgtgacagttccctgccacacacccccttcctcctaccaacccacctttgagattcatatatagcctttaacactatgcaactttgtactttgcgtagcaggggcggggtggggggaaagaaactattatctgacacactggtgctattaattatttcaaatttatatttttgtgtgaatgttttgtgttttgtttatcatgattatagaataaggaatttatgtaaatatacttagtcctatttctagaatgacactctgttcactttgctcaatttttcctcttcactggcacaatgtatctgaatacctccttccctcccttctagaattctttggattgtactccaaagaattgtgccttgtgtttgcagcatctccattctctaaaattaatataattgctttcctccacacccagccactgtaaagaggtaacttgggtcctcttccattgcagtcctgatgatcctaacctgcagcacggtggttttacaatgttccagagcaggaacgccaggttgacaagctatggtaggattaggaaagtttgctgaagaggatctttgacgccacagtgggactagccaggaatgagggagaaatgccctttttggcaattgttggagctggataggtaagttttataagggagtacattttgactgagcacttagggcatcaggaacagtgctacttactggtgggtagactgggagaggtggtgtaacttagttcttgatgatcccacttcctgtttccatctgcttgggatataccagagtttaccacaagtgttttgacgatatactcctgagctttcactctgctgcttctcccaggcctcttctactatggcaggagatgtggtgtgctgttgcaaagttttcacgtcatcgtttcctggctagttcatttcattaagtggctacatcctaacatatgcatttggtcaaggttgcagaagaggactgaagattgactgccaagctagtttgggtgaagttcactccagcaagtctcaggccacaatggggtggtttggtttggtttccttttaactttctttttgttatttgcttttctcctccacctgtgtggtatattttttaagcagaattttattttttaaaataaaaggttctttacaagatgataccttaattacactcccgcaacacagccattattttattgtctagctccagttatctgtattttatgtaatgtaattgacaggatggctgctgcagaatgctggttgacacagggattattatactgctatttttccctgaatttttttcctttgaattccaactgtggaccttttatatgtgccttcactttagctgtttgccttaatctctacagccttgctctccagggtggttaataaaatgcaacacttggcatttttatgttttaagaaaaacagtattttatttataataaaatctgaatatttgtaacccttta

SEQ ID NO: 350919 - DNA, 2275 bp, Homo sapiens
  misc_feature (17)..(17): n is a, c, g, or t
gaacaaaaaaaaaaaanaaaaaaaaaaaaaaaaagaaaaaaaaaaaaaagaaaaaaaaaaaaaaaaaaaaaaaaaaccatccgtgggtcaggatgcaattatttataaaagtctccaggtgaacatggctgaagatttttctagtatattaataattgactaggaagatgaactttttttcagatctttgggcagctgataatttaaatctggatgggcagcttgcactcaccaatagaccaaaagacatcttttgatattcttataaatggaacttacacagaagaaatagggatatgataaccactaaagttttgttttcaaaatcaaactaattcttacagcttttttattagttagtcttggaactagtgttaagtatctggcagagaacagttaatccctaaggtcttgacaaaacagaagaaaaacaagcctcctcgtcctagtcttttctagcaaagggataaaacttagatggcagcttgtactgtcagaatcccgtgtatccatttgttcttctgttggagagatgagacatttgacccttagctccagttttcttctgatgtttccatcttccagaatccctcaaaaaacattgtttgccaaatcctggtggcaaatacttgcactcagtatttcacacagctgccaacgctatcgagttcctgcactttgtgatttaaatccactctaaaccttccctctaagtgtagagggaagacccttacgtggagtttcctagtgggcttctcaacttttgatcctcagctctgtggttttaagaccacagtgtgacagttccctgccacacacccccttcctcctaccaacccacctttgagattcatatatagcctttaacactatgcaactttgtactttgcgtagcaggggcggggtggggggaaagaaactattatctgacacactggtgctattaattatttcaaatttatatttttgtgtgaatgttttgtgttttgtttatcatgattatagaataaggaatttatgtaaatatacttagtcctatttctagaatgacactctgttcactttgctcaatttttcctcttcactggcacaatgtatctgaatacctccttccctcccttctagaattctttggattgtactccaaagaattgtgccttgtgtttgcagcatctccattctctaaaattaatataattgctttcctccacacccagccactgtaaagaggtaacttgggtcctcttccattgcagtcctgatgatcctaacctgcagcacggtggttttacaatgttccagagcaggaacgccaggttgacaagctatggtaggattaggaaagtttgctgaagaggatctttgacgccacagtgggactagccaggaatgagggagaaatgccctttttggcaattgttggagctggataggtaagttttataagggagtacattttgactgagcacttagggcatcaggaacagtgctacttactggtgggtagactgggagaggtggtgtaacttagttcttgatgatcccacttcctgtttccatctgcttgggatataccagagtttaccacaagtgttttgacgatatactcctgagctttcactctgctgcttctcccaggcctcttctactatggcaggagatgtggtgtgctgttgcaaagttttcacgtcatcgtttcctggctagttcatttcattaagtggctacatcctaacatatgcatttggtcaaggttgcagaagaggactgaagattgactgccaagctagtttgggtgaagttcactccagcaagtctcaggccacaatggggtggtttggtttggtttccttttaactttctttttgttatttgcttttctcctccacctgtgtggtatattttttaagcagaattttattttttaaaataaaaggttctttacaagatgataccttaattacactcccgcaacacagccattattttattgtctagctccagttatctgtattttatgtaatgtaattgacaggatggctgctgcagaatgctggttgacacagggattattatactgctatttttccctgaatttttttcctttgaattccaactgtggaccttttatatgtgccttcactttagctgtttgccttaatctctacagccttgctctccagggtggttaataaaatgcaacacttggcatttttatgttttaagaaaaacagtattttatttataataaaatctgaatatttgtaacccttta

SEQ ID NO: 350920 - DNA, 1989 bp, Homo sapiens
  misc_feature (18)..(18): n is a, c, g, or t
tagggggggagggtgtanaaaagggggggcgggggaccgggtccggaattcccgggatcttttttattagttagtcttggaactagtgttaagtatctggcagagaacagttaatccctaaggtcttgacaaaacagaagaaaaacaagcctcctcgtcctagtcttttctagcaaagggataaaacttagatggcagcttgtactgtcagaatcccgtgtatccatttgttcttctgttggagagatgagacatttgacccttagctccagttttcttctgatgtttccatcttccagaatccctcaaaaaacattgtttgccaaatcctggtggcaaatacttgcactcagtatttcacacagctgccaacgctatcgagttcctgcactttgtgatttaaatccactctaaaccttccctctaagtgtagagggaagacccttacgtggagtttcctagtgggcttctcaacttttgatcctcagctctgtggttttaagaccacagtgtgacagttccctgccacacacccccttcctcctaccaacccacctttgagattcatatatagcctttaacactatgcaactttgtactttgcgtagcaggggcggggtggggggaaagaaactattatctgacacactggtgctattaattatttcaaatttatatttttgtgtgaatgttttgtgttttgtttatcatgattatagaataaggaatttatgtaaatatacttagtcctatttctagaatgacactctgttcactttgctcaatttttcctcttcactggcacaatgtatctgaatacctccttccctcccttctagaattctttggattgtactccaaagaattgtgccttgtgtttgcagcatctccattctctaaaattaatataattgctttcctccacacccagccactgtaaagaggtaacttgggtcctcttccattgcagtcctgatgatcctaacctgcagcacggtggttttacaatgttccagagcaggaacgccaggttgacaagctatggtaggattaggaaagtttgctgaagaggatctttgacgccacagtgggactagccaggaatgagggagaaatgccctttttggcaattgttggagctggataggtaagttttataagggagtacattttgactgagcacttagggcatcaggaacagtgctacttactggtgggtagactgggagaggtggtgtaacttagttcttgatgatcccacttcctgtttccatctgcttgggatataccagagtttaccacaagtgttttgacgatatactcctgagctttcactctgctgcttctcccaggcctcttctactatggcaggagatgtggtgtgctgttgcaaagttttcacgtcatcgtttcctggctagttcatttcattaagtggctacatcctaacatatgcatttggtcaaggttgcagaagaggactgaagattgactgccaagctagtttgggtgaagttcactccagcaagtctcaggccacaatggggtggtttggtttggtttccttttaactttctttttgttatttgcttttctcctccacctgtgtggtatattttttaagcagaattttattttttaaaataaaaggttctttacaagatgataccttaattacactcccgcaacacagccattattttattgtctagctccagttatctgtattttatgtaatgtaattgacaggatggctgctgcagaatgctggttgacacagggattattatactgctatttttccctgaatttttttcctttgaattccaactgtggaccttttatatgtgccttcactttagctgtttgccttaatctctacagccttgctctccagggtggttaataaaatgcaacacttggcatttttatgttttaagaaaaacagtattttatttataataaaatctgaatatttgtaacccttta

SEQ ID NO: 350921 - DNA, 5309 bp, Homo sapiens
  misc_feature (86)..(86): n is a, c, g, or t
gcgcactcgggcacgcgctcggaagtcgggggtcggcgcggagtgcaggctgctcccggggtaggtgagggaagcgcggaggcggngcgcgggggcagtggtcggcgagcagcgcggtcctcgctaggggcgcccacccgtcagtctctccggcgcgagccgccgccaccgcccgcgccggagtcaggcccctgggcccccaggctcaagcagcgaagcggcctccgggggacgccgctaggcgagaggaacgcgccggtgcccttgccttcgccgtgacccagcgtgcgggcggcgggatgagagggagccatcgggccgcgccggccctgcggccccgggggcggctctggcccgtgctggccgtgctggcggcggccgccgcggcgggctgtgcccaggcagccatggacgagtgcacggacgagggcgggcggccgcagcgctgcatgcccgagttcgtcaacgccgctttcaacgtgactgtggtggccaccaacacgtgtgggactccgcccgaggaatactgtgtgcagaccggggtgaccggggtcaccaagtcctgtcacctgtgcgacgccgggcagccccacctgcagcacggggcagccttcctgaccgactacaacaaccaggccgacaccacctggtggcaaagccagaccatgctggccggggtgcagtaccccagctccatcaacctcacgctgcacctgggaaaagcttttgacatcacctatgtgcgtctcaagttccacaccagccgcccggagagctttgccatttacaagcgcacacgggaagacgggccctggattccttaccagtactacagtggttcctgcgagaacacctactccaaggcaaaccgcggcttcatcaggacaggaggggacgagcagcaggccttgtgtactgatgaattcagtgacatttctcccctcactgggggcaacgtggccttttctaccctggaaggaaggcccagcgcctataactttgacaatagccctgtgctgcaggaatgggtaactgccactgacatcagagtaactcttaatcgcctgaacacttttggagatgaagtgtttaacgatcccaaagttctcaagtcctattattatgccatctctgattttgctgtaggtggcagatgtaaatgtaatggacacgcaagcgagtgtatgaagaacgaatttgataagctggtgtgtaattgcaaacataacacatatggagtagactgtgaaaagtgtcttcctttcttcaatgaccggccgtggaggagggcaactgcggaaagtgccagtgaatgcctgccctgtgattgcaatggtcgatcccaggaatgctacttcgaccctgaactctatcgttccactggccatgggggccactgtaccaactgccaggataacacagatggcgcccactgtgagaggtgccgagagaacttcttccgccttggcaacaatgaagcctgctcttcatgccactgtagtcctgtgggctctctaagcacacagtgtgatagttacggcagatgcagctgtaagccaggagtgatgggggacaaatgtgaccgttgccagcctggattccattctctcactgaagcaggatgcaggccatgctcttgtgatccctctggcagcatagatgaatgtaatgttgaaacaggaagatgtgtttgcaaagacaatgtcgaaggcttcaattgtgaaagatgcaaacctggattttttaatctggaatcatctaatcctcggggttgcacaccctgcttctgctttgggcattcttctgtctgtacaaacgctgttggctacagtgtttattctatctcctctacctttcagattgatgaggatgggtggcgtgcggaacagagagatggctctgaagcatctctcgagtggtcctctgagaggcaagatatcgccgtgatctcagacagctactttcctcggtacttcattgctcctgcaaagttcttgggcaagcaggtgttgagttatggtcagaacctctccttctcctttcgagtggacaggcgagatactcgcctctctgccgaagaccttgtgcttgagggagctggcttaagagtatctgtacccttgatcgctcagggcaattcctatccaagtgagaccactgtgaagtatgtcttcaggctccatgaagcaacagattacccttggaggcctgctcttaccccttttgaatttcagaagctcctaaacaacttgacctctatcaagatacgtgggacatacagtgagagaagtgctggatatttggatgatgtcaccctggcaagtgctcgtcctgggcctggagtccctgcaacttgggtggagtcctgcacctgtcctgtgggatatggagggcagttttgtgagatgtgcctctcaggttacagaagagaaactcctaatcttggaccatacagtccatgtgtgctttgcgcctgcaatggacacagcgagacctgtgatcctgagacaggtgtttgtaactgcagagacaatacggctggcccgcactgtgagaagtgcagtgatgggtactatggagattcaactgcaggcacctcctccgattgccaaccctgtccgtgtcctggaggttcaagttgtgctgttgttcccaagacaaaggaggtggtgtgcaccaactgtcctactggcaccactggtaagagatgtgagctctgtgatgatggctactttggagaccccctgggtagaaacggccctgtgagactttgccgcctgtgccagtgcagtgacaacatcgatcccaacgcagttggaaattgcaatcgcttgacgggagaatgcctgaagtgcatctataacactgctggcttctattgtgaccggtgcaaagacggattttttggaaatcccctggctcccaatccagcagacaaatgcaaagcctgcaattgcaatccgtatgggaccatgaagcagcagagcagctgtaaccccgtgacggggcagtgtgaatgtttgcctcacgtgactggccaggactgtggtgcttgtgaccctggattctacaatctgcagagtgggcaaggctgtgagaggtgtgactgccatgccttgggctccaccaatgggcagtgtgacatccgcaccggccagtgtgagtgccagcccggcatcactggtcagcactgtgagcgctgtgaggtcaaccactttgggtttggacctgaaggctgcaaaccctgtgactgtcatcctgagggatctctttcacttcagtgcaaagatgatggtcgctgtgaatgcagagaaggctttgtgggaaatcgctgtgaccagtgtgaagaaaactatttctacaatcggtcttggcctggctgccaggaatgtccagcttgttaccggctggtaaaggataaggttgctgatcatagagtgaagctccaggaattagagagtctcatagcaaaccttggaactggggatgagatggtgacagatcaagccttcgaggatagactaaaggaagcagagagggaagttatggacctccttcgtgaggcccaggatgtcaaagatgttgaccagaatttgatggatcgcctacagagagtgaataacactctgtccagccaaattagccgtttacagaatatccggaataccattgaagagactggaaacttggctgaacaagcgcgtgcccatgtagagaacacagagcggttgattgaaatcgcatccagagaacttgagaaagcaaaagtcgctgctgccaatgtgtcagtcactcagccagaatctacaggggacccaaacaacatgactcttttggcagaagaggctcgaaagcttgctgaacgtcataaacaggaagctgatgacattgttcgagtggcaaagacagccaatgatacgtcaactgaggcatacaacctgcttctgaggacactggcaggagaaaatcaaacagcatttgagattgaagagcttaataggaagtatgaacaagcgaagaacatctcacaggatctggaaaaacaagctgcccgagtacatgaggaggccaaaagggccggtgacaaagctgtggagatctatgccagcgtggctcagctgagccctttggactctgagacactggagaatgaagcaaataacataaagatggaagctgagaatctggaacaactgattgaccagaaattaaaagattatgaggacctcagagaagatatgagagggaaggaacttgaagtcaagaaccttctggagaaaggcaagactgaacagcagaccgcagaccaactcctagcccgagctgatgctgccaaggccctcgctgaagaagctgcaaagaagggacgggataccttacaagaagctaatgacattctcaacaacctgaaagattttgataggcgcgtgaacgataacaagacggccgcagaggaggcactaaggaagattcctgccatcaaccagaccatcactgaagccaatgaaaagaccagagaagcccagcaggccctgggcagtgctgcggcggatgccacagaggccaagaacaaggcccatgaggcggagaggatcgcaagcgctgtccaaaagaatgccaccagcaccaaggcagaagctgaaagaacttttgcagaagttacagatctggataatgaggtgaacaatatgttgaagcaactgcaggaagcagaaaaagagctaaagagaaaacaagatgacgctgaccaggacatgatgatggcagggatggcttcacaggctgctcaagaagccgagatcaatgccagaaaagccaaaaactctgttactagcctcctcagcattattaatgacctcttggagcagctggggcagctggatacagtggacctgaataagctaaacgagattgaaggcaccctaaacaaagccaaagatgaaatgaaggtcagcgatcttgataggaaagtgtctgacctggagaatgaagccaagaagcaggaggctgccatcatggactataaccgagatatcgaggagatcatgaaggacattcgcaatctggaggacatcaggaagaccttaccatctggctgcttcaacaccccgtccattgaaaagccctagtgtctttagggctggaaggcagcatccctctgacaggggggcagttgtgaggccacagagtgccttgacacaaagattacatttttcagacccccactcctctgctgctgtccatcactgtccttttgaaccaggaggttttatctaataaagtgtctcttccattcacgttgctacctt

SEQ ID NO: 350922 - DNA, 3596 bp, Homo sapiens
  misc_feature (86)..(86): n is a, c, g, or t
gcgcactcgggcacgcgctcggaagtcgggggtcggcgcggagtgcaggctgctcccggggtaggtgagggaagcgcggaggcggngcgcgggggcagtggtcggcgagcagcgcggtcctcgctaggggcgcccacccgtcagtctctccggcgcgagccgccgccaccgcccgcgccggagtcaggcccctgggcccccaggctcaagcagcgaagcggcctccgggggacgccgctaggcgagaggaacgcgccggtgcccttgccttcgccgtgacccagcgtgcgggcggcgggatgagagggagccatcgggccgcgccggccctgcggccccgggggcggctctggcccgtgctggccgtgctggcggcggccgccgcggcgggctgtgcccaggcagccatggacgagtgcacggacgagggcgggcggccgcagcgctgcatgcccgagttcgtcaacgccgctttcaacgtgactgtggtggccaccaacacgtgtgggactccgcccgaggaatactgtgtgcagaccggggtgaccggggtcaccaagtcctgtcacctgtgcgacgccgggcagccccacctgcagcacggggcagccttcctgaccgactacaacaaccaggccgacaccacctggtggcaaagccagaccatgctggccggggtgcagtaccccagctccatcaacctcacgctgcacctgggaaaagcttttgacatcacctatgtgcgtctcaagttccacaccagccgcccggagagctttgccatttacaagcgcacacgggaagacgggccctggattccttaccagtactacagtggttcctgcgagaacacctactccaaggcaaaccgcggcttcatcaggacaggaggggacgagcagcaggccttgtgtactgatgaattcagtgacatttctcccctcactgggggcaacgtggccttttctaccctggaaggaaggcccagcgcctataactttgacaatagccctgtgctgcaggaatgggtaactgccactgacatcagagtaactcttaatcgcctgaacacttttggagatgaagtgtttaacgatcccaaagttctcaagtcctattattatgccatctctgattttgctgtaggtggcagatgtaaatgtaatggacacgcaagcgagtgtatgaagaacgaatttgataagctggtgtgtaattgcaaacataacacatatggagtagactgtgaaaagtgtcttcctttcttcaatgaccggccgtggaggagggcaactgcggaaagtgccagtgaatgcctgccctgtgattgcaatggtcgatcccaggaatgctacttcgaccctgaactctatcgttccactggccatgggggccactgtaccaactgccaggataacacagatggcgcccactgtgagaggtgccgagagaacttcttccgccttggcaacaatgaagcctgctcttcatgccactgtagtcctgtgggctctctaagcacacagtgtgatagttacggcagatgcagctgtaagccaggagtgatgggggacaaatgtgaccgttgccagcctggattccattctctcactgaagcaggatgcaggccatgctcttgtgatccctctggcagcatagatgaatgtaatgttgaaacaggaagatgtgtttgcaaagacaatgtcgaaggcttcaattgtgaaagatgcaaacctggattttttaatctggaatcatctaatcctcggggttgcacaccctgcttctgctttgggcattcttctgtctgtacaaacgctgttggctacagtgtttattctatctcctctacctttcagattgatgaggatgggtggcgtgcggaacagagagatggctctgaagcatctctcgagtggtcctctgagaggcaagatatcgccgtgatctcagacagctactttcctcggtacttcattgctcctgcaaagttcttgggcaagcaggtgttgagttatggtcagaacctctccttctcctttcgagtggacaggcgagatactcgcctctctgccgaagaccttgtgcttgagggagctggcttaagagtatctgtacccttgatcgctcagggcaattcctatccaagtgagaccactgtgaagtatgtcttcaggctccatgaagcaacagattacccttggaggcctgctcttaccccttttgaatttcagaagctcctaaacaacttgacctctatcaagatacgtgggacatacagtgagagaagtgctggatatttggatgatgtcaccctggcaagtgctcgtcctgggcctggagtccctgcaacttgggtggagtcctgcacctgtcctgtgggatatggagggcagttttgtgagatgtgcctctcaggttacagaagagaaactcctaatcttggaccatacagtccatgtgtgctttgcgcctgcaatggacacagcgagacctgtgatcctgagacaggtgtttgtaactgcagagacaatacggctggcccgcactgtgagaagtgcagtgatgggtactatggagattcaactgcaggcacctcctccgattgccaaccctgtccgtgtcctggaggttcaagttgtgctgttgttcccaagacaaaggaggtggtgtgcaccaactgtcctactggcaccactggtaagagatgtgagctctgtgatgatggctactttggagaccccctgggtagaaacggccctgtgagactttgccgcctgtgccagtgcagtgacaacatcgatcccaacgcagttggaaattgcaatcgcttgacgggagaatgcctgaagtgcatctataacactgctggcttctattgtgaccggtgcaaagacggattttttggaaatcccctggctcccaatccagcagacaaatgcaaagcctgcaattgcaatccgtatgggaccatgaagcagcagagcagctgtaaccccgtgacggggcagtgtgaatgtttgcctcacgtgactggccaggactgtggtgcttgtgaccctggattctacaatctgcagagtgggcaaggctgtgagagtgccaagctagtttgggtgaagttcactccagcaagtctcaggccacaatggggtggtttggtttggtttccttttaactttctttttgttatttgcttttctcctccacctgtgtggtatattttttaagcagaattttattttttaaaataaaaggttctttacaagatgataccttaattacactcccgcaacacagccattattttattgtctagctccagttatctgtattttatgtaatgtaattgacaggatggctgctgcagaatgctggttgacacagggattattatactgctatttttccctgaatttttttcctttgaattccaactgtggaccttttatatgtgccttcactttagctgtttgccttaatctctacagccttgctctccagggtggttaataaaatgcaacacttggcatttttatgttttaagaaaaacagtattttatttataataaaatctgaatatttgtaacccttta

SEQ ID NO: 350923 - DNA, 3646 bp, Homo sapiens
  misc_feature (86)..(86): n is a, c, g, or t
gcgcactcgggcacgcgctcggaagtcgggggtcggcgcggagtgcaggctgctcccggggtaggtgagggaagcgcggaggcggngcgcgggggcagtggtcggcgagcagcgcggtcctcgctaggggcgcccacccgtcagtctctccggcgcgagccgccgccaccgcccgcgccggagtcaggcccctgggcccccaggctcaagcagcgaagcggcctccgggggacgccgctaggcgagaggaacgcgccggtgcccttgccttcgccgtgacccagcgtgcgggcggcgggatgagagggagccatcgggccgcgccggccctgcggccccgggggcggctctggcccgtgctggccgtgctggcggcggccgccgcggcgggctgtgcccaggcagccatggacgagtgcacggacgagggcgggcggccgcagcgctgcatgcccgagttcgtcaacgccgctttcaacgtgactgtggtggccaccaacacgtgtgggactccgcccgaggaatactgtgtgcagaccggggtgaccggggtcaccaagtcctgtcacctgtgcgacgccgggcagccccacctgcagcacggggcagccttcctgaccgactacaacaaccaggccgacaccacctggtggcaaagccagaccatgctggccggggtgcagtaccccagctccatcaacctcacgctgcacctgggaaaagcttttgacatcacctatgtgcgtctcaagttccacaccagccgcccggagagctttgccatttacaagcgcacacgggaagacgggccctggattccttaccagtactacagtggttcctgcgagaacacctactccaaggcaaaccgcggcttcatcaggacaggaggggacgagcagcaggccttgtgtactgatgaattcagtgacatttctcccctcactgggggcaacgtggccttttctaccctggaaggaaggcccagcgcctataactttgacaatagccctgtgctgcaggaatgggtaactgccactgacatcagagtaactcttaatcgcctgaacacttttggagatgaagtgtttaacgatcccaaagttctcaagtcctattattatgccatctctgattttgctgtaggtggcagatgtaaatgtaatggacacgcaagcgagtgtatgaagaacgaatttgataagctggtgtgtaattgcaaacataacacatatggagtagactgtgaaaagtgtcttcctttcttcaatgaccggccgtggaggagggcaactgcggaaagtgccagtgaatgcctgccctgtgattgcaatggtcgatcccaggaatgctacttcgaccctgaactctatcgttccactggccatgggggccactgtaccaactgccaggataacacagatggcgcccactgtgagaggtgccgagagaacttcttccgccttggcaacaatgaagcctgctcttcatgccactgtagtcctgtgggctctctaagcacacagtgtgatagttacggcagatgcagctgtaagccaggagtgatgggggacaaatgtgaccgttgccagcctggattccattctctcactgaagcaggatgcaggccatgctcttgtgatccctctggcagcatagatgaatgtaatgttgaaacaggaagatgtgtttgcaaagacaatgtcgaaggcttcaattgtgaaagatgcaaacctggattttttaatctggaatcatctaatcctcggggttgcacaccctgcttctgctttgggcattcttctgtctgtacaaacgctgttggctacagtgtttattctatctcctctacctttcagattgatgaggatgggtggcgtgcggaacagagagatggctctgaagcatctctcgagtggtcctctgagaggcaagatatcgccgtgatctcagacagctactttcctcggtacttcattgctcctgcaaagttcttgggcaagcaggtgttgagttatggtcagaacctctccttctcctttcgagtggacaggcgagatactcgcctctctgccgaagaccttgtgcttgagggagctggcttaagagtatctgtacccttgatcgctcagggcaattcctatccaagtgagaccactgtgaagtatgtcttcaggctccatgaagcaacagattacccttggaggcctgctcttaccccttttgaatttcagaagctcctaaacaacttgacctctatcaagatacgtgggacatacagtgagagaagtgctggatatttggatgatgtcaccctggcaagtgctcgtcctgggcctggagtccctgcaacttgggtggagtcctgcacctgtcctgtgggatatggagggcagttttgtgagatgtgcctctcaggttacagaagagaaactcctaatcttggaccatacagtccatgtgtgctttgcgcctgcaatggacacagcgagacctgtgatcctgagacaggtgtttgtaactgcagagacaatacggctggcccgcactgtgagaagtgcagtgatgggtactatggagattcaactgcaggcacctcctccgattgccaaccctgtccgtgtcctggaggttcaagttgtgctgttgttcccaagacaaaggaggtggtgtgcaccaactgtcctactggcaccactggtaagagatgtgagctctgtgatgatggctactttggagaccccctgggtagaaacggccctgtgagactttgccgcctgtgccagtgcagtgacaacatcgatcccaacgcagttggaaattgcaatcgcttgacgggagaatgcctgaagtgcatctataacactgctggcttctattgtgaccggtgcaaagacggattttttggaaatcccctggctcccaatccagcagacaaatgcaaagcctgcaattgcaatccgtatgggaccatgaagcagcagagcagctgtaaccccgtgacggggcagtgtgaatgtttgcctcacgtgactggccaggactgtggtgcttgtgaccctggattctacaatctgcagagtgggcaaggctgtgagagtgccaagctagtttgggtgaagttcactccagcaagtctcaggccacaatggggtggtttggtttggtttccttttaactttctttttgttatttgcttttctcctccacctgtgtggtatattttttaagcagaattttattttttaaaataaaaggttctttacaagatgataccttaattacactcccgcaacacagccattattttattgtctagctccagttatctgtattttatgtaatgtaattgacaggatggctgctgcagaatgctggttgacacagggattattatactgctatttttccctgaatttttttcctttgaattccaactgtggaccttttatatgtgccttcactttagctgtttgccttaatctctacagccttgctctccagggtggtttcgccctgtggtacatgtgtacgcaaaccgctttcttatcaaacggcattagcccctcacaaagaaacgacacatctcttcgtgggggtccgccccctcgctcacgcatgcatcgagcatctccacccctgaccc

SEQ ID NO: 350924 - DNA, 2231 bp, Homo sapiens
  misc_feature (86)..(86): n is a, c, g, or t
gcgcactcgggcacgcgctcggaagtcgggggtcggcgcggagtgcaggctgctcccggggtaggtgagggaagcgcggaggcggngcgcgggggcagtggtcggcgagcagcgcggtcctcgctaggggcgcccacccgtcagtctctccggcgcgagccgccgccaccgcccgcgccggagtcaggcccctgggcccccaggctcaagcagcgaagcggcctccgggggacgccgctaggcgagaggaacgcgccggtgcccttgccttcgccgtgacccagcgtgcgggcggcgggatgagagggagccatcgggccgcgccggccctgcggccccgggggcggctctggcccgtgctggccgtgctggcggcggccgccgcggcgggctgtgcccaggcagccatggacgagtgcacggacgagggcgggcggccgcagcgctgcatgcccgagttcgtcaacgccgctttcaacgtgactgtggtggccaccaacacgtgtgggactccgcccgaggaatactgtgtgcagaccggggtgaccggggtcaccaagtcctgtcacctgtgcgacgccgggcagccccacctgcagcacggggcagccttcctgaccgactacaacaaccaggccgacaccacctggtggcaaagccagaccatgctggccggggtgcagtaccccagctccatcaacctcacgctgcacctgggaaaagcttttgacatcacctatgtgcgtctcaagttccacaccagccgcccggagagctttgccatttacaagcgcacacgggaagacgggccctggattccttaccagtactacagtggttcctgcgagaacacctactccaaggcaaaccgcggcttcatcaggacaggaggggacgagcagcaggccttgtgtactgatgaattcagtgacatttctcccctcactgggggcaacgtggccttttctaccctggaaggaaggcccagcgcctataactttgacaatagccctgtgctgcaggaatgggtaactgccactgacatcagagtaactcttaatcgcctgaacacttttggagatgaagtgtttaacgatcccaaagttctcaagtcctattattatgccatctctgattttgctgtaggtggcagatgtaaatgtaatggacacgcaagcgagtgtatgaagaacgaatttgataagctggtgtgtaattgcaaacataacacatatggagtagactgtgaaaagtgtcttcctttcttcaatgaccggccgtggaggagggcaactgcggaaagtgccagtgaatgcctgccctgtgattgcaatggtcgatcccaggaatgctacttcgaccctgaactctatcgttccactggccatgggggccactgtaccaactgccaggataacacagatggcgcccactgtgagaggtgccgagagaacttcttccgccttggcaacaatgaagcctgctcttcatgccactgtagtcctgtgggctctctaagcacacagtgtgatagttacggcagatgcagctgtaagccaggagtgatgggggacaaatgtgaccgttgccagcctggattccattctctcactgaagcaggatgcaggccatgctcttgtgatccctctggcagcatagatgaatgtaatgttgaaacaggaagatgtgtttgcaaagacaatgtcgaaggcttcaattgtgaaagatgcaaacctggattttttaatctggaatcatctaatcctcggggttgcacaccctgcttctgctttgggcattcttctgtctgtacaaacgctgttggctacagtgtttattctatctcctctacctttcagattgatgaggatgggtggcgtgcggaacagagagatggctctgaagcatctctcgagtggtcctctgagaggcaagatatcgccgtgatctcagacagctactttcctcggtacttcattgctcctgcaaagttcttgggcaagcaggtgttgagttatggtcagaacctctccttctcctttcgagtggacaggcgagatactcgcctctctgccgaagaccttgtgcttgagggagctggcttaagagtatctgtacccttgatcgctcagggcaattcctatccaagtgagaccactgtgaagtatgtcttcaggctccatgaagcaacagattacccttggagcacagatgcatcaggatcctctaga

SEQ ID NO: 350925 - DNA, 496 bp, Homo sapiens
gttctgatttaaaatttggtttttattacctttgtgaccatcaggagattgcatactggttctcaggcattgcttttaattaccagttatctttctttaacacattgattttacttacgtatctggccgaatttttgtttgacaataggcattttacattttaggctctctaagcacacagtgtgatagttacggcagatgcagctgtaagccaggagtgatgggggacaaatgtgaccgttgccagcctggattccattctctcactgaagcaggatgcaggtaaaatattttcaaagccagaagaagggggcagaatctatatatagtcaacacatattaatagatcttatggcttattggcagcagggtaaacatttttcctgtaataattgtcaacaagactgaggactagctgtaatggtgagccacaaggggtttggcttgtacagagagtaagcagagttttaatgggatgactatcttaaactgaaac

SEQ ID NO: 350926 - DNA, 546 bp, Homo sapiens
cgaaagcatctaatcaatatgatgtcgtagaaagtgtatgccattaaatgtttatcatttgctgtctgtatgaccccaactaaaaatagcaataatagaacagaagtttccaggattaaagaagaggatacaaatgaaagtgctagataaaatacaaaatgttattatgtgggtagtaattttttttatgattatttataacccaaattgataatgtaagtcatgagatagtataaatcaatatattattatttctggattatatttttaagacattttataaattataaaaggagcgggagcatacttgagaaaaaggaaagcttttttaaaaaaagtacaattttcttttgtgcctagaatgccaccagcaccaaggcagaagctgaaagaacttttgcagaagttacagatctggataatgaggtgaacaatatgttgaagcaactgcaggaagcagaaaaagagctaaagagaaaacaagatgacgctgaccaggacatgatgatggcagggatggtaagaggttttggtatatttgctcat

SEQ ID NO: 350927 - DNA, 454 bp, Homo sapiens
tcaaatgtgtccttgaacttgtttcagattttgataggcgcgtgaacgataacaagacggccgcagaggaggcactaaggaagattcctgccatcaaccagaccatcactgaagccaatgaaaagaccagagaagcccagcaggccctgggcagtgctgcggcggatgccacagaggccaagaacaaggcccatgaggcggagaggatcgcaagcgctgtccaaaagaatgccaccagcaccaaggcagaagctgaaagaacttttgcagaagttacagatctggataatgaggtgaacaatatgttgaagcaactgcaggaagcagaaaaagagctaaagagaaaacaagatgacgctgaccaggacatgatgatggcagggatggtaagaggttttggtatatttgctcattggcagaaagtgaacagtgtttaataataaagatcccccac

SEQ ID NO: 350928 - DNA, 8001 bp, Homo sapiens
  misc_feature (86)..(86): n is a, c, g, or t
gcgcactcgggcacgcgctcggaagtcgggggtcggcgcggagtgcaggctgctcccggggtaggtgagggaagcgcggaggcggngcgcgggggcagtggtcggcgagcagcgcggtcctcgctaggggcgcccacccgtcagtctctccggcgcgagccgccgccaccgcccgcgccggagtcaggcccctgggcccccaggctcaagcagcgaagcggcctccgggggacgccgctaggcgagaggaacgcgccggtgcccttgccttcgccgtgacccagcgtgcgggcggcgggatgagagggagccatcgggccgcgccggccctgcggccccgggggcggctctggcccgtgctggccgtgctggcggcggccgccgcggcgggctgtgcccaggcagccatggacgagtgcacggacgagggcgggcggccgcagcgctgcatgcccgagttcgtcaacgccgctttcaacgtgactgtggtggccaccaacacgtgtgggactccgcccgaggaatactgtgtgcagaccggggtgaccggggtcaccaagtcctgtcacctgtgcgacgccgggcagccccacctgcagcacggggcagccttcctgaccgactacaacaaccaggccgacaccacctggtggcaaagccagaccatgctggccggggtgcagtaccccagctccatcaacctcacgctgcacctgggaaaagcttttgacatcacctatgtgcgtctcaagttccacaccagccgcccggagagctttgccatttacaagcgcacacgggaagacgggccctggattccttaccagtactacagtggttcctgcgagaacacctactccaaggcaaaccgcggcttcatcaggacaggaggggacgagcagcaggccttgtgtactgatgaattcagtgacatttctcccctcactgggggcaacgtggccttttctaccctggaaggaaggcccagcgcctataactttgacaatagccctgtgctgcaggaatgggtaactgccactgacatcagagtaactcttaatcgcctgaacacttttggagatgaagtgtttaacgatcccaaagttctcaagtcctattattatgccatctctgattttgctgtaggtggcagatgtaaatgtaatggacacgcaagcgagtgtatgaagaacgaatttgataagctggtgtgtaattgcaaacataacacatatggagtagactgtgaaaagtgtcttcctttcttcaatgaccggccgtggaggagggcaactgcggaaagtgccagtgaatgcctgccctgtgattgcaatggtcgatcccaggaatgctacttcgaccctgaactctatcgttccactggccatgggggccactgtaccaactgccaggataacacagatggcgcccactgtgagaggtgccgagagaacttcttccgccttggcaacaatgaagcctgctcttcatgccactgtagtcctgtgggctctctaagcacacagtgtgatagttacggcagatgcagctgtaagccaggagtgatgggggacaaatgtgaccgttgccagcctggattccattctctcactgaagcaggatgcaggccatgctcttgtgatccctctggcagcatagatgaatgtaatgttgaaacaggaagatgtgtttgcaaagacaatgtcgaaggcttcaattgtgaaagatgcaaacctggattttttaatctggaatcatctaatcctcggggttgcacaccctgcttctgctttgggcattcttctgtctgtacaaacgctgttggctacagtgtttattctatctcctctacctttcagattgatgaggatgggtggcgtgcggaacagagagatggctctgaagcatctctcgagtggtcctctgagaggcaagatatcgccgtgatctcagacagctactttcctcggtacttcattgctcctgcaaagttcttgggcaagcaggtgttgagttatggtcagaacctctccttctcctttcgagtggacaggcgagatactcgcctctctgccgaagaccttgtgcttgagggagctggcttaagagtatctgtacccttgatcgctcagggcaattcctatccaagtgagaccactgtgaagtatgtcttcaggctccatgaagcaacagattacccttggaggcctgctcttaccccttttgaatttcagaagctcctaaacaacttgacctctatcaagatacgtgggacatacagtgagagaagtgctggatatttggatgatgtcaccctggcaagtgctcgtcctgggcctggagtccctgcaacttgggtggagtcctgcacctgtcctgtgggatatggagggcagttttgtgagatgtgcctctcaggttacagaagagaaactcctaatcttggaccatacagtccatgtgtgctttgcgcctgcaatggacacagcgagacctgtgatcctgagacaggtgtttgtaactgcagagacaatacggctggcccgcactgtgagaagtgcagtgatgggtactatggagattcaactgcaggcacctcctccgattgccaaccctgtccgtgtcctggaggttcaagttgtgctgttgttcccaagacaaaggaggtggtgtgcaccaactgtcctactggcaccactggtaagagatgtgagctctgtgatgatggctactttggagaccccctgggtagaaacggccctgtgagactttgccgcctgtgccagtgcagtgacaacatcgatcccaacgcagttggaaattgcaatcgcttgacgggagaatgcctgaagtgcatctataacactgctggcttctattgtgaccggtgcaaagacggattttttggaaatcccctggctcccaatccagcagacaaatgcaaagcctgcaattgcaatccgtatgggaccatgaagcagcagagcagctgtaaccccgtgacggggcagtgtgaatgtttgcctcacgtgactggccaggactgtggtgcttgtgaccctggattctacaatctgcagagtgggcaaggctgtgagaggtgtgactgccatgccttgggctccaccaatgggcagtgtgacatccgcaccggccagtgtgagtgccagcccggcatcactggtcagcactgtgagcgctgtgaggtcaaccactttgggtttggacctgaaggctgcaaaccctgtgactgtcatcctgagggatctctttcacttcagtgcaaagatgatggtcgctgtgaatgcagagaaggctttgtgggaaatcgctgtgaccagtgtgaagaaaactatttctacaatcggtcttggcctggctgccaggaatgtccagcttgttaccggctggtaaaggataaggttgctgatcatagagtgaagctccaggaattagagagtctcatagcaaaccttggaactggggatgagatggtgacagatcaagccttcgaggatagactaaaggaagcagagagggaagttatggacctccttcgtgaggcccaggatgtcaaaggtacgcatgattgaacagtgcatgacttctgtgagatggaccaatctttagatgtggctcctaaagcaagatgttgaccagaatttgatggatcgcctacagagagtgaataacactctgtccagccaaattagccgtttacagaatatccggaataccattgaagagactggaaacttggctgaacaagcgcgtgcccatgtagagaacacagagcggttgattgaaatcgcatccagagaacttgagaaagcaaaagtcgctgctgccaatgtgtcagtcactcagccagaatctacaggggacccaaacaacatgactcttttggcagaagaggctcgaaagcttgctgaacgtcataaacaggaagctgatgacattgttcgagtggcaaagacagccaatgatacgtcaactgaggcatacaacctgcttctgaggacactggcaggagaaaatcaaacagcatttgagattgaagagcttaataggaagtatgaacaagcgaagaacatctcacaggatctggaaaaacaagctgcccgagtacatgaggaggccaaaagggccggtgacaaagctgtggagatctatgccagcgtggctcagctgagccctttggactctgagacactggagaatgaagcaaataacataaagatggaagctgagaatctggaacaactgattgaccagaaattaaaagattatgaggacctcagagaagatatgagagggaaggaacttgaagtcaagaaccttctggagaaaggcaagactgaacagcagaccgcagaccaactcctagcccgagctgatgctgccaaggccctcgctgaagaagctgcaaagaagggacgggataccttacaagaagctaatgacattctcaacaacctgaaagattttgataggcgcgtgaacgataacaagacggccgcagaggaggcactaaggaagattcctgccatcaaccagaccatcactgaagccaatgaaaagaccagagaagcccagcaggccctgggcagtgctgcggcggatgccacagaggccaagaacaaggcccatgaggcggagaggatcgcaagcgctgtccaaaagaatgccaccagcaccaaggcagaagctgaaagaacttttgcagaagttacagatctggataatgaggtgaacaatatgttgaagcaactgcaggaagcagaaaaagagctaaagagaaaacaagatgacgctgaccaggacatgatgatggcagggatggcttcacaggctgctcaagaagccgagatcaatgccagaaaagccaaaaactctgttactagcctcctcagcattattaatgacctcttggagcagctggggcagctggatacagtggacctgaataagctaaacgagattgaaggcaccctaaacaaagccaaagatgaaatgaaggtcagcgatcttgataggaaagtgtctgacctggagaatgaagccaagaagcaggaggctgccatcatggactataaccgagatatcgaggagatcatgaaggacattcgcaatctggaggacatcaggaagaccttaccatctggctgcttcaacaccccgtccattgaaaagccctagtgtctttagggctggaaggcagcatccctctgacaggggggcagttgtgaggccacagagtgccttgacacaaagattacatttttcagacccccactcctctgctgctgtccatcactgtccttttgaaccaggaaaagtcacagagtttaaagagaagcaaattaaacatcctgaatcgggaacaaagggttttatctaataaagtgtctcttccattcacgttgctaccttacccacactttcccttctgatttgcgtgaggacgtggcatcctacgttactgtacagtggcataagcacatcgtgtgagcccatgtatgctggggtagagcaagtagccctcccctgtctcatcgataccagcagaacctcctcagtctcagtactcttgtttctatgaaggaaaagtttggctactaacagtagcattgtgatggccagtatatccagtccatggataaagaaaatgcatctgcatctcctgcccctcttccttctaagcaaaaggaaataaacatcctgtgccaaaggtattggtcatttagaatgtcggtagccatccatcagtgcttttagttattatgagtgtaggacactgagccatccgtgggtcaggatgcaattatttataaaagtctccaggtgaacatggctgaagatttttctagtatattaataattgactaggaagatgaactttttttcagatctttgggcagctgataatttaaatctggatgggcagcttgcactcaccaatagaccaaaagacatcttttgatattcttataaatggaacttacacagaagaaatagggatatgataaccactaaagttttgttttcaaaatcaaactaattcttacagcttttttattagttagtcttggaactagtgttaagtatctggcagagaacagttaatccctaaggtcttgacaaaacagaagaaaaacaagcctcctcgtcctagtcttttctagcaaagggataaaacttagatggcagcttgtactgtcagaatcccgtgtatccatttgttcttctgttggagagatgagacatttgacccttagctccagttttcttctgatgtttccatcttccagaatccctcaaaaaacattgtttgccaaatcctggtggcaaatacttgcactcagtatttcacacagctgccaacgctatcgagttcctgcactttgtgatttaaatccactctaaaccttccctctaagtgtagagggaagacccttacgtggagtttcctagtgggcttctcaacttttgatcctcagctctgtggttttaagaccacagtgtgacagttccctgccacacacccccttcctcctaccaacccacctttgagattcatatatagcctttaacactatgcaactttgtactttgcgtagcaggggcggggtggggggaaagaaactattatctgacacactggtgctattaattatttcaaatttatatttttgtgtgaatgttttgtgttttgtttatcatgattatagaataaggaatttatgtaaatatacttagtcctatttctagaatgacactctgttcactttgctcaatttttcctcttcactggcacaatgtatctgaatacctccttccctcccttctagaattctttggattgtactccaaagaattgtgccttgtgtttgcagcatctccattctctaaaattaatataattgctttcctccacacccagccactgtaaagaggtaacttgggtcctcttccattgcagtcctgatgatcctaacctgcagcacggtggttttacaatgttccagagcaggaacgccaggttgacaagctatggtaggattaggaaagtttgctgaagaggatctttgacgccacagtgggactagccaggaatgagggagaaatgccctttttggcaattgttggagctggataggtaagttttataagggagtacattttgactgagcacttagggcatcaggaacagtgctacttactggtgggtagactgggagaggtggtgtaacttagttcttgatgatcccacttcctgtttccatctgcttgggatataccagagtttaccacaagtgttttgacgatatactcctgagctttcactctgctgcttctcccaggcctcttctactatggcaggagatgtggtgtgctgttgcaaagttttcacgtcatcgtttcctggctagttcatttcattaagtggctacatcctaacatatgcatttggtcaaggttgcagaagaggactgaagattgactgccaagctagtttgggtgaagttcactccagcaagtctcaggccacaatggggtggtttggtttggtttccttttaactttctttttgttatttgcttttctcctccacctgtgtggtatattttttaagcagaattttattttttaaaataaaaggttctttacaagatgataccttaattacactcccgcaacacagccattattttattgtctagctccagttatctgtattttatgtaatgtaattgacaggatggctgctgcagaatgctggttgacacagggattattatactgctatttttccctgaatttttttcctttgaattccaactgtggaccttttatatgtgccttcactttagctgtttgccttaatctctacagccttgctctccagggtggttaataaaatgcaacacttggcatttttatgttttaagaaaaacagtattttatttataataaaatctgaatatttgtaacccttta

SEQ ID NO: 350929 - DNA, 8262 bp, Homo sapiens
  misc_feature (86)..(86): n is a, c, g, or t
  misc_feature (7966)..(7966): n is a, c, g, or t
  misc_feature (7984)..(7984): n is a, c, g, or t
  misc_feature (8043)..(8044): n is a, c, g, or t
  misc_feature (8048)..(8048): n is a, c, g, or t
  misc_feature (8060)..(8060): n is a, c, g, or t
  misc_feature (8068)..(8068): n is a, c, g, or t
  misc_feature (8072)..(8072): n is a, c, g, or t
  misc_feature (8095)..(8095): n is a, c, g, or t
  misc_feature (8098)..(8098): n is a, c, g, or t
  misc_feature (8109)..(8109): n is a, c, g, or t
  misc_feature (8116)..(8116): n is a, c, g, or t
  misc_feature (8120)..(8120): n is a, c, g, or t
  misc_feature (8124)..(8124): n is a, c, g, or t
  misc_feature (8126)..(8126): n is a, c, g, or t
  misc_feature (8134)..(8134): n is a, c, g, or t
gcgcactcgggcacgcgctcggaagtcgggggtcggcgcggagtgcaggctgctcccggggtaggtgagggaagcgcggaggcggngcgcgggggcagtggtcggcgagcagcgcggtcctcgctaggggcgcccacccgtcagtctctccggcgcgagccgccgccaccgcccgcgccggagtcaggcccctgggcccccaggctcaagcagcgaagcggcctccgggggacgccgctaggcgagaggaacgcgccggtgcccttgccttcgccgtgacccagcgtgcgggcggcgggatgagagggagccatcgggccgcgccggccctgcggccccgggggcggctctggcccgtgctggccgtgctggcggcggccgccgcggcgggctgtgcccaggcagccatggacgagtgcacggacgagggcgggcggccgcagcgctgcatgcccgagttcgtcaacgccgctttcaacgtgactgtggtggccaccaacacgtgtgggactccgcccgaggaatactgtgtgcagaccggggtgaccggggtcaccaagtcctgtcacctgtgcgacgccgggcagccccacctgcagcacggggcagccttcctgaccgactacaacaaccaggccgacaccacctggtggcaaagccagaccatgctggccggggtgcagtaccccagctccatcaacctcacgctgcacctgggaaaagcttttgacatcacctatgtgcgtctcaagttccacaccagccgcccggagagctttgccatttacaagcgcacacgggaagacgggccctggattccttaccagtactacagtggttcctgcgagaacacctactccaaggcaaaccgcggcttcatcaggacaggaggggacgagcagcaggccttgtgtactgatgaattcagtgacatttctcccctcactgggggcaacgtggccttttctaccctggaaggaaggcccagcgcctataactttgacaatagccctgtgctgcaggaatgggtaactgccactgacatcagagtaactcttaatcgcctgaacacttttggagatgaagtgtttaacgatcccaaagttctcaagtcctattattatgccatctctgattttgctgtaggtggcagatgtaaatgtaatggacacgcaagcgagtgtatgaagaacgaatttgataagctggtgtgtaattgcaaacataacacatatggagtagactgtgaaaagtgtcttcctttcttcaatgaccggccgtggaggagggcaactgcggaaagtgccagtgaatgcctgccctgtgattgcaatggtcgatcccaggaatgctacttcgaccctgaactctatcgttccactggccatgggggccactgtaccaactgccaggataacacagatggcgcccactgtgagaggtgccgagagaacttcttccgccttggcaacaatgaagcctgctcttcatgccactgtagtcctgtgggctctctaagcacacagtgtgatagttacggcagatgcagctgtaagccaggagtgatgggggacaaatgtgaccgttgccagcctggattccattctctcactgaagcaggatgcaggccatgctcttgtgatccctctggcagcatagatgaatgtaatgttgaaacaggaagatgtgtttgcaaagacaatgtcgaaggcttcaattgtgaaagatgcaaacctggattttttaatctggaatcatctaatcctcggggttgcacaccctgcttctgctttgggcattcttctgtctgtacaaacgctgttggctacagtgtttattctatctcctctacctttcagattgatgaggatgggtggcgtgcggaacagagagatggctctgaagcatctctcgagtggtcctctgagaggcaagatatcgccgtgatctcagacagctactttcctcggtacttcattgctcctgcaaagttcttgggcaagcaggtgttgagttatggtcagaacctctccttctcctttcgagtggacaggcgagatactcgcctctctgccgaagaccttgtgcttgagggagctggcttaagagtatctgtacccttgatcgctcagggcaattcctatccaagtgagaccactgtgaagtatgtcttcaggctccatgaagcaacagattacccttggaggcctgctcttaccccttttgaatttcagaagctcctaaacaacttgacctctatcaagatacgtgggacatacagtgagagaagtgctggatatttggatgatgtcaccctggcaagtgctcgtcctgggcctggagtccctgcaacttgggtggagtcctgcacctgtcctgtgggatatggagggcagttttgtgagatgtgcctctcaggttacagaagagaaactcctaatcttggaccatacagtccatgtgtgctttgcgcctgcaatggacacagcgagacctgtgatcctgagacaggtgtttgtaactgcagagacaatacggctggcccgcactgtgagaagtgcagtgatgggtactatggagattcaactgcaggcacctcctccgattgccaaccctgtccgtgtcctggaggttcaagttgtgctgttgttcccaagacaaaggaggtggtgtgcaccaactgtcctactggcaccactggtaagagatgtgagctctgtgatgatggctactttggagaccccctgggtagaaacggccctgtgagactttgccgcctgtgccagtgcagtgacaacatcgatcccaacgcagttggaaattgcaatcgcttgacgggagaatgcctgaagtgcatctataacactgctggcttctattgtgaccggtgcaaagacggattttttggaaatcccctggctcccaatccagcagacaaatgcaaagcctgcaattgcaatccgtatgggaccatgaagcagcagagcagctgtaaccccgtgacggggcagtgtgaatgtttgcctcacgtgactggccaggactgtggtgcttgtgaccctggattctacaatctgcagagtgggcaaggctgtgagaggtgtgactgccatgccttgggctccaccaatgggcagtgtgacatccgcaccggccagtgtgagtgccagcccggcatcactggtcagcactgtgagcgctgtgaggtcaaccactttgggtttggacctgaaggctgcaaaccctgtgactgtcatcctgagggatctctttcacttcagtgcaaagatgatggtcgctgtgaatgcagagaaggctttgtgggaaatcgctgtgaccagtgtgaagaaaactatttctacaatcggtcttggcctggctgccaggaatgtccagcttgttaccggctggtaaaggataaggttgctgatcatagagtgaagctccaggaattagagagtctcatagcaaaccttggaactggggatgagatggtgacagatcaagccttcgaggatagactaaaggaagcagagagggaagttatggacctccttcgtgaggcccaggatgtcaaagatgttgaccagaatttgatggatcgcctacagagagtgaataacactctgtccagccaaattagccgtttacagaatatccggaataccattgaagagactggaaacttggctgaacaagcgcgtgcccatgtagagaacacagagcggttgattgaaatcgcatccagagaacttgagaaagcaaaagtcgctgctgccaatgtgtcagtcactcagccagaatctacaggggacccaaacaacatgactcttttggcagaagaggctcgaaagcttgctgaacgtcataaacaggaagctgatgacattgttcgagtggcaaagacagccaatgatacgtcaactgaggcatacaacctgcttctgaggacactggcaggagaaaatcaaacagcatttgagattgaagagcttaataggaagtatgaacaagcgaagaacatctcacaggatctggaaaaacaagctgcccgagtacatgaggaggccaaaagggccggtgacaaagctgtggagatctatgccagcgtggctcagctgagccctttggactctgagacactggagaatgaagcaaataacataaagatggaagctgagaatctggaacaactgattgaccagaaattaaaagattatgaggacctcagagaagatatgagagggaaggaacttgaagtcaagaaccttctggagaaaggcaagactgaacagcagaccgcagaccaactcctagcccgagctgatgctgccaaggccctcgctgaagaagctgcaaagaagggacgggataccttacaagaagctaatgacattctcaacaacctgaaagattttgataggcgcgtgaacgataacaagacggccgcagaggaggcactaaggaagattcctgccatcaaccagaccatcactgaagccaatgaaaagaccagagaagcccagcaggccctgggcagtgctgcggcggatgccacagaggccaagaacaaggcccatgaggcggagaggatcgcaagcgctgtccaaaagaatgccaccagcaccaaggcagaagctgaaagaacttttgcagaagttacagatctggataatgaggtgaacaatatgttgaagcaactgcaggaagcagaaaaagagctaaagagaaaacaagatgacgctgaccaggacatgatgatggcagggatggcttcacaggctgctcaagaagccgagatcaatgccagaaaagccaaaaactctgttactagcctcctcagcattattaatgacctcttggagcagctggggcagctggatacagtggacctgaataagctaaacgagattgaaggcaccctaaacaaagccaaagatgaaatgaaggtcagcgatcttgataggaaagtgtctgacctggagaatgaagccaagaagcaggaggctgccatcatggactataaccgagatatcgaggagatcatgaaggacattcgcaatctggaggacatcaggaagaccttaccatctggctgcttcaacaccccgtccattgaaaagccctagtgtctttagggctggaaggcagcatccctctgacaggggggcagttgtgaggccacagagtgccttgacacaaagattacatttttcagacccccactcctctgctgctgtccatcactgtccttttgaaccaggaaaagtcacagagtttaaagagaagcaaattaaacatcctgaatcgggaacaaagggttttatctaataaagtgtctcttccattcacgttgctaccttacccacactttcccttctgatttgcgtgaggacgtggcatcctacgttactgtacagtggcataagcacatcgtgtgagcccatgtatgctggggtagagcaagtagccctcccctgtctcatcgataccagcagaacctcctcagtctcagtactcttgtttctatgaaggaaaagtttggctactaacagtagcattgtgatggccagtatatccagtccatggataaagaaaatgcatctgcatctcctgcccctcttccttctaagcaaaaggaaataaacatcctgtgccaaaggtattggtcatttagaatgtcggtagccatccatcagtgcttttagttattatgagtgtaggacactgagccatccgtgggtcaggatgcaattatttataaaagtctccaggtgaacatggctgaagatttttctagtatattaataattgactaggaagatgaactttttttcagatctttgggcagctgataatttaaatctggatgggcagcttgcactcaccaatagaccaaaagacatcttttgatattcttataaatggaacttacacagaagaaatagggatatgataaccactaaagttttgttttcaaaatcaaactaattcttacagcttttttattagttagtcttggaactagtgttaagtatctggcagagaacagttaatccctaaggtcttgacaaaacagaagaaaaacaagcctcctcgtcctagtcttttctagcaaagggataaaacttagatggcagcttgtactgtcagaatcccgtgtatccatttgttcttctgttggagagatgagacatttgacccttagctccagttttcttctgatgtttccatcttccagaatccctcaaaaaacattgtttgccaaatcctggtggcaaatacttgcactcagtatttcacacagctgccaacgctatcgagttcctgcactttgtgatttaaatccactctaaaccttccctctaagtgtagagggaagacccttacgtggagtttcctagtgggcttctcaacttttgatcctcagctctgtggttttaagaccacagtgtgacagttccctgccacacacccccttcctcctaccaacccacctttgagattcatatatagcctttaacactatgcaactttgtactttgcgtagcaggggcggggtggggggaaagaaactattatctgacacactggtgctattaattatttcaaatttatatttttgtgtgaatgttttgtgttttgtttatcatgattatagaataaggaatttatgtaaatatacttagtcctatttctagaatgacactctgttcactttgctcaatttttcctcttcactggcacaatgtatctgaatacctccttccctcccttctagaattctttggattgtactccaaagaattgtgccttgtgtttgcagcatctccattctctaaaattaatataattgctttcctccacacccagccactgtaaagaggtaacttgggtcctcttccattgcagtcctgatgatcctaacctgcagcacggtggttttacaatgttccagagcaggaacgccaggttgacaagctatggtaggattaggaaagtttgctgaagaggatctttgacgccacagtgggactagccaggaatgagggagaaatgccctttttggcaattgttggagctggataggtaagttttataagggagtacattttgactgagcacttagggcatcaggaacagtgctacttactggtgggtagactgggagaggtggtgtaacttagttcttgatgatcccacttcctgtttccatctgcttgggatataccagagtttaccacaagtgttttgacgatatactcctgagctttcactctgctgcttctcccaggcctcttctactatggcaggagatgtggtgtgctgttgcaaagttttcacgtcatcgtttcctggctagttcatttcattaagtggctacatcctaacatatgcatttggtcaaggttgcagaagaggactgaagattgactgccaagctagtttgggtgaagttcactccagcaagtctcaggccacaatggggtggtttggtttggtttccttttaactttctttttgttatttgcttttctcctccacctgtgtggtatattttttaagcagaattttattttttaaaataaaaggttctttacaagatgataccttaattacactcccgcaacacagccattattttattgtctagctccagttatctgtattttatgtaatgtaattgacaggatggctgctgcagaatgctggttgacacagggattattatactgctatttttccctgaatttttttcctttgaattccaactgtggaccttttatatgtgccttcactttagctgtttgccttaatctctacagccttgctctccagggtggttaataaaatgcaacacttggcatttttatgttttaagaaaaacagtattttatttataataaaatctgaatatttgtaaccctttaaaaaaaaaaaaaaaaaaaaaaaaaaaaaaaaaccntgtgtgcggggcgcgccncgggcccccggagaaaaccttttcaaaacaccattccggggggggccgggggccccagnngggnaaggggaaacgnggccaaangggnttcccaagggaaaaccggggcanagnaaaaggggcgngggattntccnccanantaaaaaanccgccggggggaacacgaactgttttttgaaaaattccccaaatgggcgttccgaggggcaattacgggggactttactaaagaggggtcccaaaggagctcagtttaaaaataccccctcctggtta

SEQ ID NO: 350930 - DNA, 5573 bp, Homo sapiens
gtagtttatagtttaaacaaaagcgattagattgcctttgtaggactaacattagccacaagattaggggttacggttttaggagcatgcagctggaggctacaagattctgaccctccctaaactgctcctaagaccagtgcttgagatattttacagaccctgcatttgatagagcggctggcccgcactgtgagaagtgcagtgatgggtactatggagattcaactgcaggcacctcctccgattgccaaccctgtccgtgtcctggaggttcaagttgtgctgttgttcccaagacaaaggaggtggtgtgcaccaactgtcctactggcaccactggtaagagatgtgagctctgtgatgatggctactttggagaccccctgggtagaaacggccctgtgagactttgccgcctgtgccagtgcagtgacaacatcgatcccaacgcagttggaaattgcaatcgcttgacgggagaatgcctgaagtgcatctataacactgctggcttctattgtgaccggtgcaaagacggattttttggaaatcccctggctcccaatccagcagacaaatgcaaagcctgcaattgcaatccgtatgggaccatgaagcagcagagcagctgtaaccccgtgacggggcagtgtgaatgtttgcctcacgtgactggccaggactgtggtgcttgtgaccctggattctacaatctgcagagtgggcaaggctgtgagaggtgtgactgccatgccttgggctccaccaatgggcagtgtgacatccgcaccggccagtgtgagtgccagcccggcatcactggtcagcactgtgagcgctgtgaggtcaaccactttgggtttggacctgaaggctgcaaaccctgtgactgtcatcctgagggatctctttcacttcagtgcaaagatgatggtcgctgtgaatgcagagaaggctttgtgggaaatcgctgtgaccagtgtgaagaaaactatttctacaatcggtcttggcctggctgccaggaatgtccagcttgttaccggctggtaaaggataaggttgctgatcatagagtgaagctccaggaattagagagtctcatagcaaaccttggaactggggatgagatggtgacagatcaagccttcgaggatagactaaaggaagcagagagggaagttatggacctccttcgtgaggcccaggatgtcaaagatgttgaccagaatttgatggatcgcctacagagagtgaataacactctgtccagccaaattagccgtttacagaatatccggaataccattgaagagactggaaacttggctgaacaagcgcgtgcccatgtagagaacacagagcggttgattgaaatcgcatccagagaacttgagaaagcaaaagtcgctgctgccaatgtgtcagtcactcagccagaatctacaggggacccaaacaacatgactcttttggcagaagaggctcgaaagcttgctgaacgtcataaacaggaagctgatgacattgttcgagtggcaaagacagccaatgatacgtcaactgaggcatacaacctgcttctgaggacactggcaggagaaaatcaaacagcatttgagattgaagagcttaataggaagtatgaacaagcgaagaacatctcacaggatctggaaaaacaagctgcccgagtacatgaggaggccaaaagggccggtgacaaagctgtggagatctatgccagcgtggctcagctgagccctttggactctgagacactggagaatgaagcaaataacataaagatggaagctgagaatctggaacaactgattgaccagaaattaaaagattatgaggacctcagagaagatatgagagggaaggaacttgaagtcaagaaccttctggagaaaggcaagactgaacagcagaccgcagaccaactcctagcccgagctgatgctgccaaggccctcgctgaagaagctgcaaagaagggacgggataccttacaagaagctaatgacattctcaacaacctgaaagattttgataggcgcgtgaacgataacaagacggccgcagaggaggcactaaggaagattcctgccatcaaccagaccatcactgaagccaatgaaaagaccagagaagcccagcaggccctgggcagtgctgcggcggatgccacagaggccaagaacaaggcccatgaggcggagaggatcgcaagcgctgtccaaaagaatgccaccagcaccaaggcagaagctgaaagaacttttgcagaagttacagatctggataatgaggtgaacaatatgttgaagcaactgcaggaagcagaaaaagagctaaagagaaaacaagatgacgctgaccaggacatgatgatggcagggatggcttcacaggctgctcaagaagccgagatcaatgccagaaaagccaaaaactctgttactagcctcctcagcattattaatgacctcttggagcagctggggcagctggatacagtggacctgaataagctaaacgagattgaaggcaccctaaacaaagccaaagatgaaatgaaggtcagcgatcttgataggaaagtgtctgacctggagaatgaagccaagaagcaggaggctgccatcatggactataaccgagatatcgaggagatcatgaaggacattcgcaatctggaggacatcaggaagaccttaccatctggctgcttcaacaccccgtccattgaaaagccctagtgtctttagggctggaaggcagcatccctctgacaggggggcagttgtgaggccacagagtgccttgacacaaagattacatttttcagacccccactcctctgctgctgtccatcactgtccttttgaaccaggaaaagtcacagagtttaaagagaagcaaattaaacatcctgaatcgggaacaaagggttttatctaataaagtgtctcttccattcacgttgctaccttacccacactttcccttctgatttgcgtgaggacgtggcatcctacgttactgtacagtggcataagcacatcgtgtgagcccatgtatgctggggtagagcaagtagccctcccctgtctcatcgataccagcagaacctcctcagtctcagtactcttgtttctatgaaggaaaagtttggctactaacagtagcattgtgatggccagtatatccagtccatggataaagaaaatgcatctgcatctcctgcccctcttccttctaagcaaaaggaaataaacatcctgtgccaaaggtattggtcatttagaatgtcggtagccatccatcagtgcttttagttattatgagtgtaggacactgagccatccgtgggtcaggatgcaattatttataaaagtctccaggtgaacatggctgaagatttttctagtatattaataattgactaggaagatgaactttttttcagatctttgggcagctgataatttaaatctggatgggcagcttgcactcaccaatagaccaaaagacatcttttgatattcttataaatggaacttacacagaagaaatagggatatgataaccactaaagttttgttttcaaaatcaaactaattcttacagcttttttattagttagtcttggaactagtgttaagtatctggcagagaacagttaatccctaaggtcttgacaaaacagaagaaaaacaagcctcctcgtcctagtcttttctagcaaagggataaaacttagatggcagcttgtactgtcagaatcccgtgtatccatttgttcttctgttggagagatgagacatttgacccttagctccagttttcttctgatgtttccatcttccagaatccctcaaaaaacattgtttgccaaatcctggtggcaaatacttgcactcagtatttcacacagctgccaacgctatcgagttcctgcactttgtgatttaaatccactctaaaccttccctctaagtgtagagggaagacccttacgtggagtttcctagtgggcttctcaacttttgatcctcagctctgtggttttaagaccacagtgtgacagttccctgccacacacccccttcctcctaccaacccacctttgagattcatatatagcctttaacactatgcaactttgtactttgcgtagcaggggcggggtggggggaaagaaactattatctgacacactggtgctattaattatttcaaatttatatttttgtgtgaatgttttgtgttttgtttatcatgattatagaataaggaatttatgtaaatatacttagtcctatttctagaatgacactctgttcactttgctcaatttttcctcttcactggcacaatgtatctgaatacctccttccctcccttctagaattctttggattgtactccaaagaattgtgccttgtgtttgcagcatctccattctctaaaattaatataattgctttcctccacacccagccactgtaaagaggtaacttgggtcctcttccattgcagtcctgatgatcctaacctgcagcacggtggttttacaatgttccagagcaggaacgccaggttgacaagctatggtaggattaggaaagtttgctgaagaggatctttgacgccacagtgggactagccaggaatgagggagaaatgccctttttggcaattgttggagctggataggtaagttttataagggagtacattttgactgagcacttagggcatcaggaacagtgctacttactggtgggtagactgggagaggtggtgtaacttagttcttgatgatcccacttcctgtttccatctgcttgggatataccagagtttaccacaagtgttttgacgatatactcctgagctttcactctgctgcttctcccaggcctcttctactatggcaggagatgtggtgtgctgttgcaaagttttcacgtcatcgtttcctggctagttcatttcattaagtggctacatcctaacatatgcatttggtcaaggttgcagaagaggactgaagattgactgccaagctagtttgggtgaagttcactccagcaagtctcaggccacaatggggtggtttggtttggtttccttttaactttctttttgttatttgcttttctcctccacctgtgtggtatattttttaagcagaattttattttttaaaataaaaggttctttacaagatgataccttaattacactcccgcaacacagccattattttattgtctagctccagttatctgtattttatgtaatgtaattgacaggatggctgctgcagaatgctggttgacacagggattattatactgctatttttccctgaatttttttcctttgaattccaactgtggaccttttatatgtgccttcactttagctgtttgccttaatctctacagccttgctctccagggtggttaataaaatgcaacacttggcatttttatgttttaagaaaaacagtattttatttataataaaatctgaatatttgtaacccttta

SEQ ID NO: 350931 - DNA, 4503 bp, Homo sapiens
  misc_feature (86)..(86): n is a, c, g, or t
gcgcactcgggcacgcgctcggaagtcgggggtcggcgcggagtgcaggctgctcccggggtaggtgagggaagcgcggaggcggngcgcgggggcagtggtcggcgagcagcgcggtcctcgctaggggcgcccacccgtcagtctctccggcgcgagccgccgccaccgcccgcgccggagtcaggcccctgggcccccaggctcaagcagcgaagcggcctccgggggacgccgctaggcgagaggaacgcgccggtgcccttgccttcgccgtgacccagcgtgcgggcggcgggatgagagggagccatcgggccgcgccggccctgcggccccgggggcggctctggcccgtgctggccgtgctggcggcggccgccgcggcgggctgtgcccaggcagccatggacgagtgcacggacgagggcgggcggccgcagcgctgcatgcccgagttcgtcaacgccgctttcaacgtgactgtggtggccaccaacacgtgtgggactccgcccgaggaatactgtgtgcagaccggggtgaccggggtcaccaagtcctgtcacctgtgcgacgccgggcagccccacctgcagcacggggcagccttcctgaccgactacaacaaccaggccgacaccacctggtggcaaagccagaccatgctggccggggtgcagtaccccagctccatcaacctcacgctgcacctgggaaaagcttttgacatcacctatgtgcgtctcaagttccacaccagccgcccggagagctttgccatttacaagcgcacacgggaagacgggccctggattccttaccagtactacagtggttcctgcgagaacacctactccaaggcaaaccgcggcttcatcaggacaggaggggacgagcagcaggccttgtgtactgatgaattcagtgacatttctcccctcactgggggcaacgtggccttttctaccctggaaggaaggcccagcgcctataactttgacaatagccctgtgctgcaggaatgggtaactgccactgacatcagagtaactcttaatcgcctgaacacttttggagatgaagtgtttaacgatcccaaagttctcaagtcctattattatgccatctctgattttgctgtaggtggcagatgtaaatgtaatggacacgcaagcgagtgtatgaagaacgaatttgataagctggtgtgtaattgcaaacataacacatatggagtagactgtgaaaagtgtcttcctttcttcaatgaccggccgtggaggagggcaactgcggaaagtgccagtgaatgcctgccctgtgattgcaatggtcgatcccaggaatgctacttcgaccctgaactctatcgttccactggccatgggggccactgtaccaactgccaggataacacagatggcgcccactgtgagaggtgccgagagaacttcttccgccttggcaacaatgaagcctgctcttcatgccactgtagtcctgtgggctctctaagcacacagtgtgatagttacggcagatgcagctgtaagccaggagtgatgggggacaaatgtgaccgttgccagcctggattccattctctcactgaagcaggatgcaggccatgctcttgtgatccctctggcagcatagatgaatgtaatgttgaaacaggaagatgtgtttgcaaagacaatgtcgaaggcttcaattgtgaaagatgcaaacctggattttttaatctggaatcatctaatcctcggggttgcacaccctgcttctgctttgggcattcttctgtctgtacaaacgctgttggctacagtgtttattctatctcctctacctttcagattgatgaggatgggtggcgtgcggaacagagagatggctctgaagcatctctcgagtggtcctctgagaggcaagatatcgccgtgatctcagacagctactttcctcggtacttcattgctcctgcaaagttcttgggcaagcaggtgttgagttatggtcagaacctctccttctcctttcgagtggacaggcgagatactcgcctctctgccgaagaccttgtgcttgagggagctggcttaagagtatctgtacccttgatcgctcagggcaattcctatccaagtgagaccactgtgaagtatgtcttcaggctccatgaagcaacagattacccttggaggcctgctcttaccccttttgaatttcagaagctcctaaacaacttgacctctatcaagatacgtgggacatacagtgagagaagtgctggatatttggatgatgtcaccctggcaagtgctcgtcctgggcctggagtccctgcaacttgggtggagtcctgcacctgtcctgtgggatatggagggcagttttgtgagatgtgcctctcaggttacagaagagaaactcctaatcttggaccatacagtccatgtgtgctttgcgcctgcaatggacacagcgagacctgtgatcctgagacaggtgtttgtaactgcagagacaatacggctggcccgcactgtgagaagtgcagtgatgggtactatggagattcaactgcaggcacctcctccgattgccaaccctgtccgtgtcctggaggttcaagttgtgctgttgttcccaagacaaaggaggtggtgtgcaccaactgtcctactggcaccactggtaagagatgtgagctctgtgatgatggctactttggagaccccctgggtagaaacggccctgtgagactttgccgcctgtgccagtgcagtgacaacatcgatcccaacgcagttggaaattgcaatcgcttgacgggagaatgcctgaagtgcatctataacactgctggcttctattgtgaccggtgcaaagacggattttttggaaatcccctggctcccaatccagcagacaaatgcaaagcctgcaattgcaatccgtatgggaccatgaagcagcagagcagctgtaaccccgtgacggggcagtgtgaatgtttgcctcacgtgactggccaggactgtggtgcttgtgaccctggattctacaatctgcagagtgggcaaggctgtgagaggtgtgactgccatgccttgggctccaccaatgggcagtgtgacatccgcaccggccagtgtgagtgccagcccggcatcactggtcagcactgtgagcgctgtgaggtcaaccactttgggtttggacctgaaggctgcaaaccctgtgactgtcatcctgagggatctctttcacttcagtgcaaagatgatggtcgctgtgaatgcagagaaggctttgtgggaaatcgctgtgaccagtgtgaagaaaactatttctacaatcggtcttggcctggctgccaggaatgtccagcttgttaccggctggtaaaggataaggttgctgatcatagagtgaagctccaggaattagagagtctcatagcaaaccttggaactggggatgagatggtgacagatcaagccttcgaggatagactaaaggaagcagagagggaagttatggacctccttcgtgaggcccaggatgtcaaagatgttgaccagaatttgatggatcgcctacagagagtgaataacactctgtccagccaaattagccgtttacagaatatccggaataccattgaagagactggaaacttggctgaacaagcgcgtgcccatgtagagaacacagagcggttgattgaaatcgcatccagagaacttgagaaagcaaaagtcgctgctgccaatgtgtcagtcactcagccagaatctacaggggacccaaacaacatgactcttttggcagaagaggctcgaaagcttgctgaacgtcataaacaggaagctgatgacattgttcgagtggcaaagacagccaatgatacgtcaactgaggcatacaacctgcttctgaggacactggcaggagaaaatcaaacagcatttgagattgaagagcttaataggaagtatgaacaagcgaagaacatctcacaggatctggaaaaacaagctgcccgagtacatgaggaggccaaaagggccggtgacaaagctgtggagatctatgccagcgtggctcagctgagccctttggactctgagacactggagaatgaagcaaataacataaagatggaagctgagaatctggaacaactgattgaccagaaattaaaagattatgaggacctcagagaagatatgagagggaaggaacttgaagtcaagaaccttctggagaaaggcaagactgaacagcagaccgcagaccaactcctagcccgagctgatgctgccaaggccctcgctgaagaagctgcaaagaagggacgggataccttacaagaagctaatgacattctcaacaacctgaaagattgtgataggcgcctgctcggatgaacaagatcgtccgcacgaggacgccactaaggaagattaataccactccatcagagaattctac

SEQ ID NO: 350932 - DNA, 3155 bp, Homo sapiens
  misc_feature (86)..(86): n is a, c, g, or t
gcgcactcgggcacgcgctcggaagtcgggggtcggcgcggagtgcaggctgctcccggggtaggtgagggaagcgcggaggcggngcgcgggggcagtggtcggcgagcagcgcggtcctcgctaggggcgcccacccgtcagtctctccggcgcgagccgccgccaccgcccgcgccggagtcaggcccctgggcccccaggctcaagcagcgaagcggcctccgggggacgccgctaggcgagaggaacgcgccggtgcccttgccttcgccgtgacccagcgtgcgggcggcgggatgagagggagccatcgggccgcgccggccctgcggccccgggggcggctctggcccgtgctggccgtgctggcggcggccgccgcggcgggctgtgcccaggcagccatggacgagtgcacggacgagggcgggcggccgcagcgctgcatgcccgagttcgtcaacgccgctttcaacgtgactgtggtggccaccaacacgtgtgggactccgcccgaggaatactgtgtgcagaccggggtgaccggggtcaccaagtcctgtcacctgtgcgacgccgggcagccccacctgcagcacggggcagccttcctgaccgactacaacaaccaggccgacaccacctggtggcaaagccagaccatgctggccggggtgcagtaccccagctccatcaacctcacgctgcacctgggaaaagcttttgacatcacctatgtgcgtctcaagttccacaccagccgcccggagagctttgccatttacaagcgcacacgggaagacgggccctggattccttaccagtactacagtggttcctgcgagaacacctactccaaggcaaaccgcggcttcatcaggacaggaggggacgagcagcaggccttgtgtactgatgaattcagtgacatttctcccctcactgggggcaacgtggccttttctaccctggaaggaaggcccagcgcctataactttgacaatagccctgtgctgcaggaatgggtaactgccactgacatcagagtaactcttaatcgcctgaacacttttggagatgaagtgtttaacgatcccaaagttctcaagtcctattattatgccatctctgattttgctgtaggtggcagatgtaaatgtaatggacacgcaagcgagtgtatgaagaacgaatttgataagctggtgtgtaattgcaaacataacacatatggagtagactgtgaaaagtgtcttcctttcttcaatgaccggccgtggaggagggcaactgcggaaagtgccagtgaatgcctgccctgtgattgcaatggtcgatcccaggaatgctacttcgaccctgaactctatcgttccactggccatgggggccactgtaccaactgccaggataacacagatggcgcccactgtgagaggtgccgagagaacttcttccgccttggcaacaatgaagcctgctcttcatgccactgtagtcctgtgggctctctaagcacacagtgtgatagttacggcagatgcagctgtaagccaggagtgatgggggacaaatgtgaccgttgccagcctggattccattctctcactgaagcaggatgcaggccatgctcttgtgatccctctggcagcatagatgaatgtaatgttgaaacaggaagatgtgtttgcaaagacaatgtcgaaggcttcaattgtgaaagatgcaaacctggattttttaatctggaatcatctaatcctcggggttgcacaccctgcttctgctttgggcattcttctgtctgtacaaacgctgttggctacagtgtttattctatctcctctacctttcagattgatgaggatgggtggcgtgcggaacagagagatggctctgaagcatctctcgagtggtcctctgagaggcaagatatcgccgtgatctcagacagctactttcctcggtacttcattgctcctgcaaagttcttgggcaagcaggtgttgagttatggtcagaacctctccttctcctttcgagtggacaggcgagatactcgcctctctgccgaagaccttgtgcttgagggagctggcttaagagtatctgtacccttgatcgctcagggcaattcctatccaagtgagaccactgtgaagtatgtcttcaggctccatgaagcaacagattacccttggaggcctgctcttaccccttttgaatttcagaagctcctaaacaacttgacctctatcaagatacgtgggacatacagtgagagaagtgctggatatttggatgatgtcaccctggcaagtgctcgtcctgggcctggagtccctgcaacttgggtggagtcctgcacctgtcctgtgggatatggagggcagttttgtgagatgtgcctctcaggttacagaagagaaactcctaatcttggaccatacagtccatgtgtgctttgcgcctgcaatggacacagcgagacctgtgatcctgagacaggtgtttgtaactgcagagacaatacggctggcccgcactgtgagaagtgcagtgatgggtactatggagattcaactgcaggcacctcctccgattgccaaccctgtccgtgtcctggaggttcaagttgtgctgttgttcccaagacaaaggaggtggtgtgcaccaactgtcctactggcaccactggtaagagatgtgagctctgtgatgatggctactttggagaccccctgggtagaaacggccctgtgagactttgccgcctgtgccagtgcagtgacaacatcgatcccaacgcagttggaaattgcaatcgcttgacgggagaatgcctgaagtgcatctataacactgctggcttctattgtgaccggtgcaaagacggattttttggaaatcccctggctcccaatccagcagacaaatgcaaagcctgcaattgcaatccgtatgggaccatgaagcagcagagcagctgtaaccccgtgacggggcagtgtgaatgtttgcctcacgtgactggccaggactgtggtgcttgctctccagggtggttaataaaatgcaacacttggcatttttatgttttaagaaaaacagtattttatttataataaaatctgaatatttgtaacccttta

SEQ ID NO: 350933 - DNA, 1947 bp, Homo sapiens
  misc_feature (86)..(86): n is a, c, g, or t
gcgcactcgggcacgcgctcggaagtcgggggtcggcgcggagtgcaggctgctcccggggtaggtgagggaagcgcggaggcggngcgcgggggcagtggtcggcgagcagcgcggtcctcgctaggggcgcccacccgtcagtctctccggcgcgagccgccgccaccgcccgcgccggagtcaggcccctgggcccccaggctcaagcagcgaagcggcctccgggggacgccgctaggcgagaggaacgcgccggtgcccttgccttcgccgtgacccagcgtgcgggcggcgggatgagagggagccatcgggccgcgccggccctgcggccccgggggcggctctggcccgtgctggccgtgctggcggcggccgccgcggcgggctgtgcccaggcagccatggacgagtgcacggacgagggcgggcggccgcagcgctgcatgcccgagttcgtcaacgccgctttcaacgtgactgtggtggccaccaacacgtgtgggactccgcccgaggaatactgtgtgcagaccggggtgaccggggtcaccaagtcctgtcacctgtgcgacgccgggcagccccacctgcagcacggggcagccttcctgaccgactacaacaaccaggccgacaccacctggtggcaaagccagaccatgctggccggggtgcagtaccccagctccatcaacctcacgctgcacctgggaaaagcttttgacatcacctatgtgcgtctcaagttccacaccagccgcccggagagctttgccatttacaagcgcacacgggaagacgggccctggattccttaccagtactacagtggttcctgcgagaacacctactccaaggcaaaccgcggcttcatcaggacaggaggggacgagcagcaggccttgtgtactgatgaattcagtgacatttctcccctcactgggggcaacgtggccttttctaccctggaaggaaggcccagcgcctataactttgacaatagccctgtgctgcaggaatgggtaactgccactgacatcagagtaactcttaatcgcctgaacacttttggagatgaagtgtttaacgatcccaaagttctcaagtcctattattatgccatctctgattttgctgtaggtggcagatgtaaatgtaatggacacgcaagcgagtgtatgaagaacgaatttgataagctggtgtgtaattgcaaacataacacatatggagtagactgtgaaaagtgtcttcctttcttcaatgaccggccgtggaggagggcaactgcggaaagtgccagtgaatgcctgccctgtgattgcaatggtcgatcccaggaatgctacttcgaccctgaactctatcgttccactggccatgggggccactgtaccaactgccaggataacacagatggcgcccactgtgagaggtgccgagagaacttcttccgccttggcaacaatgaagcctgctcttcatgccactgtagtcctgtgggctctctaagcacacagtgtgatagttacggcagatgcagctgtaagccaggagtgatgggggacaaatgtgaccgttgccagcctggattccattctctcactgaagcaggatgcaggccatgctcttgtgatccctctggcagcatagatgaatgtaatgttgaaacaggaagatgtgtttgcaaagacaatgtcgaaggcttcaattgtgaaagatgcaaacctggattttttaatctggaatcatctaatcctcggggttgcacaccctgcttctgctttgggcattcttctgtctgtacaaacgctgttggctacagtgtttattctatctcctctacctttcagattggtaatttagacctcatcccccaacctgttagaactgtgagattacacttaaaatatttttaaaaataaaatcagtgactcttta

SEQ ID NO: 350934 - DNA, 454 bp, Homo sapiens
gatcctccttaaggcagaaaagtggatattatctctgttaaaagggaaggaaatggaaggctcggctaattaaggtgcctaccgtctctacaccagtatgcagaggaggacacaactcaggtcgtctgttccagggcctggactctttagcacagagccctcctatggctctttgtggtgaggttagattgcagagagccctgaaagccaggcagacaaatttataaataaacagagttgataaacaatgggagctctttgcacatttctttattgatttttgatttaagaaataatacatgttcaatgttaattttctgaattcaataactgtattgtagttacgatgttaacatctggggaagctacatgaagggtatatagaaatttttgtattagttttataactttttataagtctgaaattattacaaaacaaactttaaaaaataaa

SEQ ID NO: 350935 - DNA, 1963 bp, Homo sapiens
ctggccttggctgtgtctgtggcttcctttccagacttgggggaggcctcttcccttcccagggccttgggtgggagggaaggagggaggaggcaggagcagggagggggcctggctaggggcggcagagctccagggcttagagggggcggggcagggaaggggaaggaggggatggctctggggtcccagaactgagtggagtaggagacgggggctgtagctggtgagaggaagtcctagaggctatggacactctgctgctgggatcaccgagatgagcagcagctgctcagggctgagcagggtcctggtggccgtggctacagccctggtgtctgcctcctccccctgcccccaggcctggggccccccaggggtccagtatgggcagccaggcaggtccgtgaagctgtgttgtcctggagtgactgccggggacccagtgtcctggtttcgggatggggagccaaagctgctccagggacctgactctgggctagggcatgaactggtcctggcccaggcagacagcactgatgagggcacctacatctgccagaccctggatggtgcacttgggggcacagtgaccctgcagctgggctaccctccagcccgccctgttgtctcctgccaagcagccgactatgagaacttctcttgcacttggagtcccagccagatcagcggtttacccacccgctacctcacctcctacaggaagaagacagtcctaggagctgatagccagaggaggagtccatccacagggccctggccatgcccacaggatcccctaggggctgcccgctgtgttgtccacggggctgagttctggagccagtaccggattaatgtgactgaggtgaacccactgggtgccagcacacgcctgctggatgtgagcttgcagagcatcttgcgccctgacccaccccagggcctgcgggtagagtcagtaccaggttacccccgacgcctgcgagccagctggacataccctgcctcctggccgtgccagccccacttcctgctcaagttccgtttgcagtaccgtccggcgcagcatccagcctggtccacggtggagccagctggactggaggaggtgatcacagatgctgtggctgggctgccccatgctgtacgagtcagtgcccgggactttctagatgctggcacctggagcacctggagcccggaggcctggggaactccgagcactgggaccataccaaaggagataccagcatggggccagctacacacgcagccagaggtggagcctcaggtggacagccctgctcctccaaggccctccctccaaccacaccctcggctacttgatcacagggactctgtggagcaggtagctgtgctggcgtctttgggaatcctttctttcctgggactggtggctggggccctggcactggggctctggctgaggctgagacggggtgggaaggatggatccccaaagcctgggttcttggcctcagtgattccagtggacaggcgtccaggagctccaaacctgtagaggacccaggagggcttcggcagattccacctataattctgtcttgctggtgtggatagaaaccaggcaggacagtagatccctatggttggatctcagctggaagttctgtttggagcccatttctgtgagaccctgtatttcaaatttgcagctgaaaggtgcttgtacctctgatttcaccccagagttggagttctgctcaaggaacgtgtgtaatgtgtacatctgtgtccatgtgtgaccatgtgtctgtgaggcagggaacatgtattctctgcatgcatgtatgtaggtgcctggggagtgtgtgtgggtccttggctcttggcctttccccttgcaggggttgtgcaggtgtgaataaagagaataaggaagttcttggagattatactcagaaaaaaatatccaatg

SEQ ID NO: 350936 - DNA, 579 bp, Homo sapiens
gttgaagaggctccctcagagctgggctcctctactcatcttcagagtgttaagcttagaactgagtcacctccctcattctcagggtgtctgggccaagatccggtcttactgtctctcctgatttgcctcctgcttcttctaggagctccaaacctgtagaggacccaggagggcttcggcagattccacctataattctgtcttgctggtgtggatagaaaccaggcaggacagtagatccctatggttggatctcagctggaagttctgtttggagcccatttctgtgagaccctgtatttcaaatttgcagctgaaaggtgcttgtacctctgatttcaccccagagttggagttctgctcaaggaacgtgtgtaatgtgtacatctgtgtccatgtgtgaccatgtgtctgtgaggcagggaacatgtattctctgcatgcatgtatgtaggtgcctggggagtgtgtgtgggtccttggctcttggcctttccccttgcaggggttgtgcaggtgtgaataaagagaataaggaagttcttggagattatactcagaaaaaaatatccaatg

SEQ ID NO: 350937 - DNA, 618 bp, Homo sapiens
ctggccttggctgtgtctgtggcttcctttccagacttgggggaggcctcttcccttcccagggccttgggtgggagggaaggagggaggaggcaggagcagggagggggcctggctaggggcggcagagctccagggcttagagggggcggggcagggaaggggaaggaggggatggctctggggtcccagaactgagtggagtaggagacgggggctgtagctggtgagaggaagtcctagaggctatggacactctgctgctgggatcaccgaggtagggtggggctaagcagggtaagtgtggctgggtggccaggggtgagccaactggacacactcagacagacacacagacaggtggaggccctgctctgctctactcctactcctgaagggtccgtgctcttcctcttctggtcttgttcccagagccctttccccgcctgccccttcgttctccatccacttcaccactgccttcctccttctgctcccccttgtccagaatctctctctcctagcatcccccacctgccatatagacacactgttagctttttgagtttccgctgaccccaatccagtctttccaacacttcccacactgccccatca

SEQ ID NO: 350938 - DNA, 2316 bp, Homo sapiens
ctcgagcttcccatgactggggagtagatgagaaccctgagtgggtggctggtttcttgaggcatacatatacccgacacaccttacacctctgatttggctgcattttggaatcatctgggaagttttaaacaatactggtgcctaggtccaacctccagagactctgatttaattggtatggggtggggttttgcagttttcaaaccacaatatccagcaaagtttgagaaccactgccctacacagccctccttcttctttatcttatctggagtcaggggcaccttcagcttctccaatcacctggccagtggctcttgtttccagtcctgctgttccagggtggataggccttcaggcggagacccaggaatccagctccagactctgtcccaagcagcctcttcagtccgggacgggacaggaagtgtccggcggaggtgggggtggaggtgattggcagttggagtctccaatgggccaggagcccccctatttcactcctctccttccattggcgcctggcggagccacccccgctgcgggggcccagggcgggagggagtagaggccggggcagagggcgagggcgagggcagagggcgctggcggcagcggccgcggaagatgagcagcagctgctcagggctgagcagggtcctggtggccgtggctacagccctggtgtctgcctcctccccctgcccccaggcctggggccccccaggggtccagtatgggcagccaggcaggtccgtgaagctgtgttgtcctggagtgactgccggggacccagtgtcctggtttcgggatggggagccaaagctgctccagggacctgactctgggctagggcatgaactggtcctggcccaggcagacagcactgatgagggcacctacatctgccagaccctggatggtgcacttgggggcacagtgaccctgcagctgggctaccctccagcccgccctgttgtctcctgccaagcagccgactatgagaacttctcttgcacttggagtcccagccagatcagcggtttacccacccgctacctcacctcctacaggaagaagacagtcctaggagctgatagccagaggaggagtccatccacagggccctggccatgcccacaggatcccctaggggctgcccgctgtgttgtccacggggctgagttctggagccagtaccggattaatgtgactgaggtgaacccactgggtgccagcacacgcctgctggatgtgagcttgcagagcatcttgcgccctgacccaccccagggcctgcgggtagagtcagtaccaggttacccccgacgcctgcgagccagctggacataccctgcctcctggccgtgccagccccacttcctgctcaagttccgtttgcagtaccgtccggcgcagcatccagcctggtccacggtggagccagctggactggaggaggtgatcacagatgctgtggctgggctgccccatgctgtacgagtcagtgcccgggactttctagatgctggcacctggagcacctggagcccggaggcctggggaactccgagcactgggaccataccaaaggagataccagcatggggccagctacacacgcagccagaggtggagcctcaggtggacagccctgctcctccaaggccctccctccaaccacaccctcggctacttgatcacagggactctgtggagcaggtagctgtgctggcgtctttgggaatcctttctttcctgggactggtggctggggccctggcactggggctctggctgaggctgagacggggtgggaaggatggatccccaaagcctgggttcttggcctcagtgattccagtggacaggcgtccaggagctccaaacctgtagaggacccaggagggcttcggcagattccacctataattctgtcttgctggtgtggatagaaaccaggcaggacagtagatccctatggttggatctcagctggaagttctgtttggagcccatttctgtgagaccctgtatttcaaatttgcagctgaaaggtgcttgtacctctgatttcaccccagagttggagttctgctcaaggaacgtgtgtaatgtgtacatctgtgtccatgtgtgaccatgtgtctgtgaggcagggaacatgtattctctgcatgcatgtatgtaggtgcctggggagtgtgtgtgggtccttggctcttggcctttccccttgcaggggttgtgcaggtgtgaataaagagaataaggaagttcttggagattatactcagaaaaaaatatccaatg

SEQ ID NO: 350939 - DNA, 1745 bp, Homo sapiens
ccaggctttagcctcccatctcaggggtcggggatttttgactctacctctccccacagatgagcagcagctgctcagggctgagcagggtcctggtggccgtggctacagccctggtgtctgcctcctccccctgcccccaggcctggggccccccaggggtccagtatgggcagccaggcaggtccgtgaagctgtgttgtcctggagtgactgccggggacccagtgtcctggtttcgggatggggagccaaagctgctccagggacctgactctgggctagggcatgaactggtcctggcccaggcagacagcactgatgagggcacctacatctgccagaccctggatggtgcacttgggggcacagtgaccctgcagctgggctaccctccagcccgccctgttgtctcctgccaagcagccgactatgagaacttctcttgcacttggagtcccagccagatcagcggtttacccacccgctacctcacctcctacaggaagaagacagtcctaggagctgatagccagaggaggagtccatccacagggccctggccatgcccacaggatcccctaggggctgcccgctgtgttgtccacggggctgagttctggagccagtaccggattaatgtgactgaggtgaacccactgggtgccagcacacgcctgctggatgtgagcttgcagagcatcttgcgccctgacccaccccagggcctgcgggtagagtcagtaccaggttacccccgacgcctgcgagccagctggacataccctgcctcctggccgtgccagccccacttcctgctcaagttccgtttgcagtaccgtccggcgcagcatccagcctggtccacggtggagccagctggactggaggaggtgatcacagatgctgtggctgggctgccccatgctgtacgagtcagtgcccgggactttctagatgctggcacctggagcacctggagcccggaggcctggggaactccgagcactgggaccataccaaaggagataccagcatggggccagctacacacgcagccagaggtggagcctcaggtggacagccctgctcctccaaggccctccctccaaccacaccctcggctacttgatcacagggactctgtggagcaggtagctgtgctggcgtctttgggaatcctttctttcctgggactggtggctggggccctggcactggggctctggctgaggctgagacggggtgggaaggatggatccccaaagcctgggttcttggcctcagtgattccagtggacaggcgtccaggagctccaaacctgtagaggacccaggagggcttcggcagattccacctataattctgtcttgctggtgtggatagaaaccaggcaggacagtagatccctatggttggatctcagctggaagttctgtttggagcccatttctgtgagaccctgtatttcaaatttgcagctgaaaggtgcttgtacctctgatttcaccccagagttggagttctgctcaaggaacgtgtgtaatgtgtacatctgtgtccatgtgtgaccatgtgtctgtgaggcagggaacatgtattctctgcatgcatgtatgtaggtgcctggggagtgtgtgtgggtccttggctcttggcctttccccttgcaggggttgtgcaggtgtgaataaagagaataaggaagttcttggagattatactcagaaaaaaatatccaatg

SEQ ID NO: 350940 - DNA, 2032 bp, Homo sapiens
ccaggctttagcctcccatctcaggggtcggggatttttgactctacctctccccacagatgagcagcagctgctcagggctgagcagggtcctggtggccgtggctacagccctggtgtctgcctcctccccctgcccccaggcctggggccccccaggtgagaagaaccctgctctacaacctcccaactctgacttgtgacttgccaccctcactgtggccccttcccatgcctaacttgtgacaccacccctgctcctgtcatccaacctgggtcctctctctaccctgttctctgacctctgtctccagattataacatgatgctttgatccagtgagccccccaccacccaggttttaacagtctgcttcttatctgtcattctcacaaagtggggaggggggtaaaggaagagccttacctcagaagtgccctccacaggggtccagtatgggcagccaggcaggtccgtgaagctgtgttgtcctggagtgactgccggggacccagtgtcctggtttcgggatggggagccaaagctgctccagggacctgactctgggctagggcatgaactggtcctggcccaggcagacagcactgatgagggcacctacatctgccagaccctggatggtgcacttgggggcacagtgaccctgcagctgggctaccctccagcccgccctgttgtctcctgccaagcagccgactatgagaacttctcttgcacttggagtcccagccagatcagcggtttacccacccgctacctcacctcctacaggaagaagacagtcctaggagctgatagccagaggaggagtccatccacagggccctggccatgcccacaggatcccctaggggctgcccgctgtgttgtccacggggctgagttctggagccagtaccggattaatgtgactgaggtgaacccactgggtgccagcacacgcctgctggatgtgagcttgcagagcatcttgcgccctgacccaccccagggcctgcgggtagagtcagtaccaggttacccccgacgcctgcgagccagctggacataccctgcctcctggccgtgccagccccacttcctgctcaagttccgtttgcagtaccgtccggcgcagcatccagcctggtccacggtggagccagctggactggaggaggtgatcacagatgctgtggctgggctgccccatgctgtacgagtcagtgcccgggactttctagatgctggcacctggagcacctggagcccggaggcctggggaactccgagcactgggaccataccaaaggagataccagcatggggccagctacacacgcagccagaggtggagcctcaggtggacagccctgctcctccaaggccctccctccaaccacaccctcggctacttgatcacagggactctgtggagcaggtagctgtgctggcgtctttgggaatcctttctttcctgggactggtggctggggccctggcactggggctctggctgaggctgagacggggtgggaaggatggatccccaaagcctgggttcttggcctcagtgattccagtggacaggcgtccaggagctccaaacctgtagaggacccaggagggcttcggcagattccacctataattctgtcttgctggtgtggatagaaaccaggcaggacagtagatccctatggttggatctcagctggaagttctgtttggagcccatttctgtgagaccctgtatttcaaatttgcagctgaaaggtgcttgtacctctgatttcaccccagagttggagttctgctcaaggaacgtgtgtaatgtgtacatctgtgtccatgtgtgaccatgtgtctgtgaggcagggaacatgtattctctgcatgcatgtatgtaggtgcctggggagtgtgtgtgggtccttggctcttggcctttccccttgcaggggttgtgcaggtgtgaataaagagaataaggaagttcttggagattatactcagaaaaaaatatccaatg

SEQ ID NO: 350941 - DNA, 1902 bp, Homo sapiens
ctggccttggctgtgtctgtggcttcctttccagacttgggggaggcctcttcccttcccagggccttgggtgggagggaaggagggaggaggcaggagcagggagggggcctggctaggggcggcagagctccagggcttagagggggcggggcagggaaggggaaggaggggatggctctggggtcccagaactgagtggagtaggagacgggggctgtagctggtgagaggaagtcctagaggctatggacactctgctgctgggatcaccgagatgagcagcagctgctcagggctgagcagggtcctggtggccgtggctacagccctggtgtctgcctcctccccctgcccccaggcctggggccccccagggacccagtgtcctggtttcgggatggggagccaaagctgctccagggacctgactctgggctagggcatgaactggtcctggcccaggcagacagcactgatgagggcacctacatctgccagaccctggatggtgcacttgggggcacagtgaccctgcagctgggctaccctccagcccgccctgttgtctcctgccaagcagccgactatgagaacttctcttgcacttggagtcccagccagatcagcggtttacccacccgctacctcacctcctacaggaagaagacagtcctaggagctgatagccagaggaggagtccatccacagggccctggccatgcccacaggatcccctaggggctgcccgctgtgttgtccacggggctgagttctggagccagtaccggattaatgtgactgaggtgaacccactgggtgccagcacacgcctgctggatgtgagcttgcagagcatcttgcgccctgacccaccccagggcctgcgggtagagtcagtaccaggttacccccgacgcctgcgagccagctggacataccctgcctcctggccgtgccagccccacttcctgctcaagttccgtttgcagtaccgtccggcgcagcatccagcctggtccacggtggagccagctggactggaggaggtgatcacagatgctgtggctgggctgccccatgctgtacgagtcagtgcccgggactttctagatgctggcacctggagcacctggagcccggaggcctggggaactccgagcactgggaccataccaaaggagataccagcatggggccagctacacacgcagccagaggtggagcctcaggtggacagccctgctcctccaaggccctccctccaaccacaccctcggctacttgatcacagggactctgtggagcaggtagctgtgctggcgtctttgggaatcctttctttcctgggactggtggctggggccctggcactggggctctggctgaggctgagacggggtgggaaggatggatccccaaagcctgggttcttggcctcagtgattccagtggacaggcgtccaggagctccaaacctgtagaggacccaggagggcttcggcagattccacctataattctgtcttgctggtgtggatagaaaccaggcaggacagtagatccctatggttggatctcagctggaagttctgtttggagcccatttctgtgagaccctgtatttcaaatttgcagctgaaaggtgcttgtacctctgatttcaccccagagttggagttctgctcaaggaacgtgtgtaatgtgtacatctgtgtccatgtgtgaccatgtgtctgtgaggcagggaacatgtattctctgcatgcatgtatgtaggtgcctggggagtgtgtgtgggtccttggctcttggcctttccccttgcaggggttgtgcaggtgtgaataaagagaataaggaagttcttggagattatactcagaaaaaaatatccaatg

SEQ ID NO: 350942 - DNA, 2146 bp, Homo sapiens
ctcgagcttcccatgactggggagtagatgagaaccctgagtgggtggctggtttcttgaggcatacatatacccgacacaccttacacctctgatttggctgcattttggaatcatctgggaagttttaaacaatactggtgcctaggtccaacctccagagactctgatttaattggtatggggtggggttttgcagttttcaaaccacaatatccagcaaagtttgagaaccactgccctacacagccctccttcttctttatcttatctggagtcaggggcaccttcagcttctccaatcacctggccagtggctcttgtttccagtcctgctgttccagggtggataggccttcaggcggagacccaggaatccagctccagactctgtcccaagcagcctcttcagtccgggacgggacaggaagtgtccggcggaggtgggggtggaggtgattggcagttggagtctccaatgggccaggagcccccctatttcactcctctccttccattggcgcctggcggagccacccccgctgcgggggcccagggcgggagggagtagaggccggggcagagggcgagggcgagggcagagggcgctggcggcagcggccgcggaagatgagcagcagctgctcagggctgagcagggtcctggtggccgtggctacagccctggtgtctgcctcctccccctgcccccaggcctggggccccccaggggtccagtatgggcagccaggcaggtccgtgaagctgtgttgtcctggagtgactgccggaccctccagcccgccctgttgtctcctgccaagcagccgactatgagaacttctcttgcacttggagtcccagccagatcagcggtttacccacccgctacctcacctcctacaggaagaagacagtcctaggagctgatagccagaggaggagtccatccacagggccctggccatgcccacaggatcccctaggggctgcccgctgtgttgtccacggggctgagttctggagccagtaccggattaatgtgactgaggtgaacccactgggtgccagcacacgcctgctggatgtgagcttgcagagcatcttgcgccctgacccaccccagggcctgcgggtagagtcagtaccaggttacccccgacgcctgcgagccagctggacataccctgcctcctggccgtgccagccccacttcctgctcaagttccgtttgcagtaccgtccggcgcagcatccagcctggtccacggtggagccagctggactggaggaggtgatcacagatgctgtggctgggctgccccatgctgtacgagtcagtgcccgggactttctagatgctggcacctggagcacctggagcccggaggcctggggaactccgagcactgggaccataccaaaggagataccagcatggggccagctacacacgcagccagaggtggagcctcaggtggacagccctgctcctccaaggccctccctccaaccacaccctcggctacttgatcacagggactctgtggagcaggtagctgtgctggcgtctttgggaatcctttctttcctgggactggtggctggggccctggcactggggctctggctgaggctgagacggggtgggaaggatggatccccaaagcctgggttcttggcctcagtgattccagtggacaggcgtccaggagctccaaacctgtagaggacccaggagggcttcggcagattccacctataattctgtcttgctggtgtggatagaaaccaggcaggacagtagatccctatggttggatctcagctggaagttctgtttggagcccatttctgtgagaccctgtatttcaaatttgcagctgaaaggtgcttgtacctctgatttcaccccagagttggagttctgctcaaggaacgtgtgtaatgtgtacatctgtgtccatgtgtgaccatgtgtctgtgaggcagggaacatgtattctctgcatgcatgtatgtaggtgcctggggagtgtgtgtgggtccttggctcttggcctttccccttgcaggggttgtgcaggtgtgaataaagagaataaggaagttcttggagattatactcagaaaaaaatatccaatg

SEQ ID NO: 350943 - DNA, 2013 bp, Homo sapiens
ctggccttggctgtgtctgtggcttcctttccagacttgggggaggcctcttcccttcccagggccttgggtgggagggaaggagggaggaggcaggagcagggagggggcctggctaggggcggcagagctccagggcttagagggggcggggcagggaaggggaaggaggggatggctctggggtcccagaactgagtggagtaggagacgggggctgtagctggtgagaggaagtcctagaggctatggacactctgctgctgggatcaccgagatgagcagcagctgctcagggctgagcagggtcctggtggccgtggctacagccctggtgtctgcctcctccccctgcccccaggcctggggccccccaggggtccagtatgggcagccaggcaggtccgtgaagctgtgttgtcctggagtgactgccggggacccagtgtcctggtttcgggatggggagccaaagctgctccagggacctgactctgggctagggcatgaactggtcctggcccaggcagacagcactgatgagggcacctacatctgccagaccctggatggtgcacttgggggcacagtgaccctgcagctgggctaccctccagcccgccctgttgtctcctgccaagcagccgactatgagaacttctcttgcacttggagtcccagccagatcagcggtttacccacccgctacctcacctcctacaggaagaagacagtcctaggagctgatagccagaggaggagtccatccacagggccctggccatgcccacaggatcccctaggggctgcccgctgtgttgtccacggggctgagttctggagccagtaccggattaatgtgactgaggtgaacccactgggtgccagcacacgcctgctggatgtgagcttgcagagcatcttgcgccctgacccaccccagggcctgcgggtagagtcagtaccaggttacccccgacgcctgcgagccagctggacataccctgcctcctggccgtgccagccccacttcctgctcaagttccgtttgcagtaccgtccggcgcagcatccagcctggtccacggtggagccagctggactggaggaggtgatcacagatgctgtggctgggctgccccatgctgtacgagtcagtgcccgggactttctagatgctggcacctggagcacctggagcccggaggcctggggaactccgagcactgggaccataccaaaggagataccagcatggggccagctacacacgcagccagaggtggagcctcaggtggacagccctgctcctccaaggccctccctccaaccacaccctcggctacttgatcacagggactctgtggagcaggtagctgtgctggcgtctttgggaatcctttctttcctgggactggtggctggggccctggcactggggctctgactgagataacccacattgttggagagacagctgcctttctatgccccaggctgaggctgagacggggtgggaaggatggatccccaaagcctgggttcttggcctcagtgattccagtggacaggcgtccaggagctccaaacctgtagaggacccaggagggcttcggcagattccacctataattctgtcttgctggtgtggatagaaaccaggcaggacagtagatccctatggttggatctcagctggaagttctgtttggagcccatttctgtgagaccctgtatttcaaatttgcagctgaaaggtgcttgtacctctgatttcaccccagagttggagttctgctcaaggaacgtgtgtaatgtgtacatctgtgtccatgtgtgaccatgtgtctgtgaggcagggaacatgtattctctgcatgcatgtatgtaggtgcctggggagtgtgtgtgggtccttggctcttggcctttccccttgcaggggttgtgcaggtgtgaataaagagaataaggaagttcttggagattatactcagaaaaaaatatccaatg

SEQ ID NO: 350944 - DNA, 2035 bp, Homo sapiens
ctggccttggctgtgtctgtggcttcctttccagacttgggggaggcctcttcccttcccagggccttgggtgggagggaaggagggaggaggcaggagcagggagggggcctggctaggggcggcagagctccagggcttagagggggcggggcagggaaggggaaggaggggatggctctggggtcccagaactgagtggagtaggagacgggggctgtagctggtgagaggaagtcctagaggctatggacactctgctgctgggatcaccgagatgagcagcagctgctcagggctgagcagggtcctggtggccgtggctacagccctggtgtctgcctcctccccctgcccccaggcctggggccccccaggggtccagtatgggcagccaggcaggtccgtgaagctgtgttgtcctggagtgactgccggggacccagtgtcctggtttcgggatggggagccaaagctgctccagggacctgactctgggctagggcatgaactggtcctggcccaggcagacagcactgatgagggcacctacatctgccagaccctggatggtgcacttgggggcacagtgaccctgcagctgggctaccctccagcccgccctgttgtctcctgccaagcagccgactatgagaacttctcttgcacttggagtcccagccagatcagcggtttacccacccgctacctcacctcctacaggaagaagacagtcctaggagctgatagccagaggaggagtccatccacagggccctggccatgcccacaggatcccctaggggctgcccgctgtgttgtccacggggctgagttctggagccagtaccggattaatgtgactgaggtgaacccactgggtgccagcacacgcctgctggatgtgagcttgcagagcatcttgcgccctgacccaccccagggcctgcgggtagagtcagtaccaggttacccccgacgcctgcgagccagctggacataccctgcctcctggccgtgccagccccacttcctgctcaagttccgtttgcagtaccgtccggcgcagcatccagcctggtccacggtggagccagctggactggaggaggtgatcacagatgctgtggctgggctgccccatgctgtacgagtcagtgcccgggactttctagatgctggcacctggagcacctggagcccggaggcctggggaactccgagcactgggaccataccaaaggagataccagcatggggccagctacacacgcagccagaggtggagcctcaggtggacagccctgctcctccaaggccctccctccaaccacaccctcggctacttgatcacagggactctgtggagcaggtagctgtgctggcgtctttgggaatcctttctttcctgggactggtggctggggccctggcactggggctctgtggtaagtgactgccattggtccctcagcctctgatcctcacacatgctctgatgcccatagaccacattcatctccacccttcatgactgcccgctgaacctgtctgattctggaactacctccccatacctccatcccccatgccccacttgattttaactgattcctctcctgaccctttactaataaaccctttggcggagactgagataacccacattgttggagagacagctgcctttctatgccccaggctgaggctgagacggggtgggaaggatggatccccaaagcctgggttcttggcctcagtgattccagtggacaggcgtccaggtgagtaggacatccagaagatttggacttggagatgtttccccctattttgagtgtccagattaagagctggctgccctagtcattttaaaacatgctgggaatccaagttgggtctcctcattttaatgatgtctaggctgagggctgggcctttcattcttgagtccctgggctcagaagtgggtctctttccctcctctcagggtactgagggaaggaccccaggtggacttcccttcagggtatta

SEQ ID NO: 350945 - DNA, 1486 bp, Homo sapiens
ctcgagcttcccatgactggggagtagatgagaaccctgagtgggtggctggtttcttgaggcatacatatacccgacacaccttacacctctgatttggctgcattttggaatcatctgggaagttttaaacaatactggtgcctaggtccaacctccagagactctgatttaattggtatggggtggggttttgcagttttcaaaccacaatatccagcaaagtttgagaaccactgccctacacagccctccttcttctttatcttatctggagtcaggggcaccttcagcttctccaatcacctggccagtggctcttgtttccagtcctgctgttccagggtggataggccttcaggcggagacccaggaatccagctccagactctgtcccaagcagcctcttcagtccgggacgggacaggaagtgtccggcggaggtgggggtggaggtgattggcagttggagtctccaatgggccaggagcccccctatttcactcctctccttccattggcgcctggcggagccacccccgctgcgggggcccagggcgggagggagtagaggccggggcagagggcgagggcgagggcagagggcgctggcggcagcggccgcggaagatgagcagcagctgctcagggctgagcagggtcctggtggccgtggctacagccctggtgtctgcctcctccccctgcccccaggcctggggccccccaggtgagaagaaccctgctctacaacctcccaactctgacttgtgacttgccaccctcactgtggccccttcccatgcctaacttgtgacaccacccctgctcctgtcatccaacctgggtcctctctctaccctgttctctgacctctgtctccagattataacatgatgctttgatccagtgagccccccaccacccaggttttaacagtctgcttcttatctgtcattctcacaaagtggggaggggggtaaaggaagagccttacctcagaagtgccctccacaggggtccagtatgggcagccaggcaggtccgtgaagctgtgttgtcctggagtgactgccggggacccagtgtcctggtttcgggatggggagccaaagctgctccagggacctgactctgggctagggcatgaactggtcctggcccaggcagacagcactgatgagggcacctacatctgccagacctgtatttcaaatttgcagctgaaaggtgcttgtacctctgatttcaccccagagttggagttctgctcaaggaacgtgtgtaatgtgtacatctgtgtccatgtgtgaccatgtgtctgtgaggcagggaacatgtattctctgcatgcatgtatgtaggtgcctggggagtgtgtgtgggtccttggctcttggcctttccccttgcaggggttgtgcaggtgtgaataaagagaataaggaagttcttggagattatactcagaaaaaaatatccaatg

SEQ ID NO: 350946 - DNA, 1024 bp, Homo sapiens
ctcgagcttcccatgactggggagtagatgagaaccctgagtgggtggctggtttcttgaggcatacatatacccgacacaccttacacctctgatttggctgcattttggaatcatctgggaagttttaaacaatactggtgcctaggtccaacctccagagactctgatttaattggtatggggtggggttttgcagttttcaaaccacaatatccagcaaagtttgagaaccactgccctacacagccctccttcttctttatcttatctggagtcaggggcaccttcagcttctccaatcacctggccagtggctcttgtttccagtcctgctgttccagggtggataggccttcaggcggagacccaggaatccagctccagactctgtcccaagcagcctcttcagtccgggacgggacaggaagtgtccggcggaggtgggggtggagatgagcagcagctgctcagggctgagcagggtcctggtggccgtggctacagccctggtgtctgcctcctccccctgcccccaggcctggggccccccaggggtccagtatgggcagccaggcaggtccgtgaagctgtgttgtcctggagtgactgccggggacccagtgtcctggtttcgggatggggagccaaagctgctccagggacctgactctgggctagggcatgaactggtcctggcccaggcagacagcactgatgagggcacctacatctgccagacctgtatttcaaatttgcagctgaaaggtgcttgtacctctgatttcaccccagagttggagttctgctcaaggaacgtgtgtaatgtgtacatctgtgtccatgtgtgaccatgtgtctgtgaggcagggaacatgtattctctgcatgcatgtatgtaggtgcctggggagtgtgtgtgggtccttggctcttggcctttccccttgcaggggttgtgcaggtgtgaataaagagaataaggaagttcttggagattatactcagaaaaaaatatccaatg

SEQ ID NO: 350947 - DNA, 1290 bp, Homo sapiens
ctcgagcttcccatgactggggagtagatgagaaccctgagtgggtggctggtttcttgaggcatacatatacccgacacaccttacacctctgatttggctgcattttggaatcatctgggaagttttaaacaatactggtgcctaggtccaacctccagagactctgatttaattggtatggggtggggttttgcagttttcaaaccacaatatccagcaaagtttgagaaccactgccctacacagccctccttcttctttatcttatctggagtcaggggcaccttcagcttctccaatcacctggccagtggctcttgtttccagtcctgctgttccagggtggataggccttcaggcggagacccaggaatccagctccagactctgtcccaagcagcctcttcagtccgggacgggacaggaagtgtccggcggaggtgggggtggaggtgattggcagttggagtctccaatgggccaggagcccccctatttcactcctctccttccattggcgcctggcggagccacccccgctgcgggggcccagggcgggagggagtagaggccggggcagagggcgagggcgagggcagagggcgctggcggcagcggccgcggaagatgagcagcagctgctcagggctgagcagggtcctggtggccgtggctacagccctggtgtctgcctcctccccctgcccccaggcctggggccccccaggtgagaagaaccctgctctacaacctcccaactctgacttgtgacttgccaccctcactgtggccccttcccatgcctaacttgtgacaccacccctgctcctgtcatccaacctgggtcctctctctaccctgttctctgacctctgtctccagattataacatgatgctttgatccagtgagccccccaccacccaggttttaacagtctgcttcttatctgtcattctcacaaagtggggaggggggtaaaggaagagccttacctcagaagtgccctccacaggggtccagtatgggcagccaggcaggtccgtgaagctgtgttgtcctggagtgactgccggggacccagtgtcctggtttcgggatggggagccaaagctgctccagggacctgactctgggctagggcatgaactggtcctggcccaggcagacagcactgatgagggcacctacatctgccagaccctggatggtgcacttgggggcacagtgaccctgcagctgggctgtgagttggggagggtggcactgatgacacatagggatcctg

SEQ ID NO: 350948 - DNA, 2218 bp, Homo sapiens
ctggccttggctgtgtctgtggcttcctttccagacttgggggaggcctcttcccttcccagggccttgggtgggagggaaggagggaggaggcaggagcagggagggggcctggctaggggcggcagagctccagggcttagagggggcggggcagggaaggggaaggaggggatggctctggggtcccagaactgagtggagtaggagacgggggctgtagctggtgagaggaagtcctagaggctatggacactctgctgctgggatcaccgagatgagcagcagctgctcagggctgagcagggtcctggtggccgtggctacagccctggtgtctgcctcctccccctgcccccaggcctggggccccccaggggtccagtatgggcagccaggcaggtccgtgaagctgtgttgtcctggagtgactgccggggacccagtgtcctggtttcgggatggggagccaaagctgctccagggacctgactctgggctagggcatgaactggtcctggcccaggcagacagcactgatgagggcacctacatctgccagaccctggatggtgcacttgggggcacagtgaccctgcagctgggctaccctccagcccgccctgttgtctcctgccaagcagccgactatgagaacttctcttgcacttggagtcccagccagatcagcggtttacccacccgctacctcacctcctacaggaagaagacagtcctaggagctgatagccagaggaggagtccatccacagggccctggccatgcccacaggatcccctaggggctgcccgctgtgttgtccacggggctgagttctggagccagtaccggattaatgtgactgaggtgaacccactgggtgccagcacacgcctgctggatgtgagcttgcagagcatcttgcgccctgacccaccccagggcctgcgggtagagtcagtaccaggttacccccgacgcctgcgagccagctggacataccctgcctcctggccgtgccagccccacttcctgctcaagttccgtttgcagtaccgtccggcgcagcatccagcctggtccacggtggagccagctggactggaggaggtgatcacagatgctgtggctgggctgccccatgctgtacgagtcagtgcccgggactttctagatgctggcacctggagcacctggagcccggaggcctggggaactccgagcactgggaccataccaaaggagataccagcatggggccagctacacacgcagccagaggtggagcctcaggtggacagccctgctcctccaaggccctccctccaaccacaccctcggctacttgatcacagggactctgtggagcaggtagctgtgctggcgtctttgggaatcctttctttcctgggactggtggctggggccctggcactggggctctgtggtaagtgactgccattggtccctcagcctctgatcctcacacatgctctgatgcccatagaccacattcatctccacccttcatgactgcccgctgaacctgtctgattctggaactacctccccatacctccatcccccatgccccacttgattttaactgattcctctcctgaccctttactaataaaccctttggcggagactgagataacccacattgttggagagacagctgcctttctatgccccaggctgaggctgagacggggtgggaaggatggatccccaaagcctgggttcttggcctcagtgattccagtggacaggcgtccaggagctccaaacctgtagaggacccaggagggcttcggcagattccacctataattctgtcttgctggtgtggatagaaaccaggcaggacagtagatccctatggttggatctcagctggaagttctgtttggagcccatttctgtgagaccctgtatttcaaatttgcagctgaaaggtgcttgtacctctgatttcaccccagagttggagttctgctcaaggaacgtgtgtaatgtgtacatctgtgtccatgtgtgaccatgtgtctgtgaggcagggaacatgtattctctgcatgcatgtatgtaggtgcctggggagtgtgtgtgggtccttggctcttggcctttccccttgcaggggttgtgcaggtgtgaataaagagaataaggaagttcttggagattatactcagaaaaaaatatccaatg

SEQ ID NO: 350949 - DNA, 2603 bp, Homo sapiens
ctcgagcttcccatgactggggagtagatgagaaccctgagtgggtggctggtttcttgaggcatacatatacccgacacaccttacacctctgatttggctgcattttggaatcatctgggaagttttaaacaatactggtgcctaggtccaacctccagagactctgatttaattggtatggggtggggttttgcagttttcaaaccacaatatccagcaaagtttgagaaccactgccctacacagccctccttcttctttatcttatctggagtcaggggcaccttcagcttctccaatcacctggccagtggctcttgtttccagtcctgctgttccagggtggataggccttcaggcggagacccaggaatccagctccagactctgtcccaagcagcctcttcagtccgggacgggacaggaagtgtccggcggaggtgggggtggaggtgattggcagttggagtctccaatgggccaggagcccccctatttcactcctctccttccattggcgcctggcggagccacccccgctgcgggggcccagggcgggagggagtagaggccggggcagagggcgagggcgagggcagagggcgctggcggcagcggccgcggaagatgagcagcagctgctcagggctgagcagggtcctggtggccgtggctacagccctggtgtctgcctcctccccctgcccccaggcctggggccccccaggtgagaagaaccctgctctacaacctcccaactctgacttgtgacttgccaccctcactgtggccccttcccatgcctaacttgtgacaccacccctgctcctgtcatccaacctgggtcctctctctaccctgttctctgacctctgtctccagattataacatgatgctttgatccagtgagccccccaccacccaggttttaacagtctgcttcttatctgtcattctcacaaagtggggaggggggtaaaggaagagccttacctcagaagtgccctccacaggggtccagtatgggcagccaggcaggtccgtgaagctgtgttgtcctggagtgactgccggggacccagtgtcctggtttcgggatggggagccaaagctgctccagggacctgactctgggctagggcatgaactggtcctggcccaggcagacagcactgatgagggcacctacatctgccagaccctggatggtgcacttgggggcacagtgaccctgcagctgggctaccctccagcccgccctgttgtctcctgccaagcagccgactatgagaacttctcttgcacttggagtcccagccagatcagcggtttacccacccgctacctcacctcctacaggaagaagacagtcctaggagctgatagccagaggaggagtccatccacagggccctggccatgcccacaggatcccctaggggctgcccgctgtgttgtccacggggctgagttctggagccagtaccggattaatgtgactgaggtgaacccactgggtgccagcacacgcctgctggatgtgagcttgcagagcatcttgcgccctgacccaccccagggcctgcgggtagagtcagtaccaggttacccccgacgcctgcgagccagctggacataccctgcctcctggccgtgccagccccacttcctgctcaagttccgtttgcagtaccgtccggcgcagcatccagcctggtccacggtggagccagctggactggaggaggtgatcacagatgctgtggctgggctgccccatgctgtacgagtcagtgcccgggactttctagatgctggcacctggagcacctggagcccggaggcctggggaactccgagcactgggaccataccaaaggagataccagcatggggccagctacacacgcagccagaggtggagcctcaggtggacagccctgctcctccaaggccctccctccaaccacaccctcggctacttgatcacagggactctgtggagcaggtagctgtgctggcgtctttgggaatcctttctttcctgggactggtggctggggccctggcactggggctctggctgaggctgagacggggtgggaaggatggatccccaaagcctgggttcttggcctcagtgattccagtggacaggcgtccaggagctccaaacctgtagaggacccaggagggcttcggcagattccacctataattctgtcttgctggtgtggatagaaaccaggcaggacagtagatccctatggttggatctcagctggaagttctgtttggagcccatttctgtgagaccctgtatttcaaatttgcagctgaaaggtgcttgtacctctgatttcaccccagagttggagttctgctcaaggaacgtgtgtaatgtgtacatctgtgtccatgtgtgaccatgtgtctgtgaggcagggaacatgtattctctgcatgcatgtatgtaggtgcctggggagtgtgtgtgggtccttggctcttggcctttccccttgcaggggttgtgcaggtgtgaataaagagaataaggaagttcttggagattatactcagaaaaaaatatccaatg

SEQ ID NO: 350950 - DNA, 2250 bp, Homo sapiens
ctggccttggctgtgtctgtggcttcctttccagacttgggggaggcctcttcccttcccagggccttgggtgggagggaaggagggaggaggcaggagcagggagggggcctggctaggggcggcagagctccagggcttagagggggcggggcagggaaggggaaggaggggatggctctggggtcccagaactgagtggagtaggagacgggggctgtagctggtgagaggaagtcctagaggctatggacactctgctgctgggatcaccgagatgagcagcagctgctcagggctgagcagggtcctggtggccgtggctacagccctggtgtctgcctcctccccctgcccccaggcctggggccccccaggtgagaagaaccctgctctacaacctcccaactctgacttgtgacttgccaccctcactgtggccccttcccatgcctaacttgtgacaccacccctgctcctgtcatccaacctgggtcctctctctaccctgttctctgacctctgtctccagattataacatgatgctttgatccagtgagccccccaccacccaggttttaacagtctgcttcttatctgtcattctcacaaagtggggaggggggtaaaggaagagccttacctcagaagtgccctccacaggggtccagtatgggcagccaggcaggtccgtgaagctgtgttgtcctggagtgactgccggggacccagtgtcctggtttcgggatggggagccaaagctgctccagggacctgactctgggctagggcatgaactggtcctggcccaggcagacagcactgatgagggcacctacatctgccagaccctggatggtgcacttgggggcacagtgaccctgcagctgggctaccctccagcccgccctgttgtctcctgccaagcagccgactatgagaacttctcttgcacttggagtcccagccagatcagcggtttacccacccgctacctcacctcctacaggaagaagacagtcctaggagctgatagccagaggaggagtccatccacagggccctggccatgcccacaggatcccctaggggctgcccgctgtgttgtccacggggctgagttctggagccagtaccggattaatgtgactgaggtgaacccactgggtgccagcacacgcctgctggatgtgagcttgcagagcatcttgcgccctgacccaccccagggcctgcgggtagagtcagtaccaggttacccccgacgcctgcgagccagctggacataccctgcctcctggccgtgccagccccacttcctgctcaagttccgtttgcagtaccgtccggcgcagcatccagcctggtccacggtggagccagctggactggaggaggtgatcacagatgctgtggctgggctgccccatgctgtacgagtcagtgcccgggactttctagatgctggcacctggagcacctggagcccggaggcctggggaactccgagcactgggaccataccaaaggagataccagcatggggccagctacacacgcagccagaggtggagcctcaggtggacagccctgctcctccaaggccctccctccaaccacaccctcggctacttgatcacagggactctgtggagcaggtagctgtgctggcgtctttgggaatcctttctttcctgggactggtggctggggccctggcactggggctctggctgaggctgagacggggtgggaaggatggatccccaaagcctgggttcttggcctcagtgattccagtggacaggcgtccaggagctccaaacctgtagaggacccaggagggcttcggcagattccacctataattctgtcttgctggtgtggatagaaaccaggcaggacagtagatccctatggttggatctcagctggaagttctgtttggagcccatttctgtgagaccctgtatttcaaatttgcagctgaaaggtgcttgtacctctgatttcaccccagagttggagttctgctcaaggaacgtgtgtaatgtgtacatctgtgtccatgtgtgaccatgtgtctgtgaggcagggaacatgtattctctgcatgcatgtatgtaggtgcctggggagtgtgtgtgggtccttggctcttggcctttccccttgcaggggttgtgcaggtgtgaataaagagaataaggaagttcttggagattatactcagaaaaaaatatccaatg

SEQ ID NO: 350951 - DNA, 1292 bp, Homo sapiens
gcctactactactaaattaaaagccggtcgaccgctacctcacctcctacaggaagaagacagtcctaggagctgatagccagaggaggagtccatccacagggccctggccatgcccacaggatcccctaggggctgcccgctgtgttgtccacggggctgagttctggagccagtaccggattaatgtgactgaggtgaacccactgggtgccagcacacgcctgctggatgtgagcttgcagagcatcttgcgccctgacccaccccagggcctgcgggtagagtcagtaccaggttacccccgacgcctgcgagccagctggacataccctgcctcctggccgtgccagccccacttcctgctcaagttccgtttgcagtaccgtccggcgcagcatccagcctggtccacggtggagccagctggactggaggaggtgatcacagatgctgtggctgggctgccccatgctgtacgagtcagtgcccgggactttctagatgctggcacctggagcacctggagcccggaggcctggggaactccgagcactgggaccataccaaaggagataccagcatggggccagctacacacgcagccagaggtggagcctcaggtggacagccctgctcctccaaggccctccctccaaccacaccctcggctacttgatcacagggactctgtggagcaggtagctgtgctggcgtctttgggaatcctttctttcctgggactggtggctggggccctggcactggggctctggctgaggctgagacggggtgggaaggatggatccccaaagcctgggttcttggcctcagtgattccagtggacaggcgtccaggagctccaaacctgtagaggacccaggagggcttcggcagattccacctataattctgtcttgctggtgtggatagaaaccaggcaggacagtagatccctatggttggatctcagctggaagttctgtttggagcccatttctgtgagaccctgtatttcaaatttgcagctgaaaggtgcttgtacctctgatttcaccccagagttggagttctgctcaaggaacgtgtgtaatgtgtacatctgtgtccatgtgtgaccatgtgtctgtgaggcagggaacatgtattctctgcatgcatgtatgtaggtgcctggggagtgtgtgtgggtccttggctcttggcctttccccttgcaggggttgtgcaggtgtgaataaagagaataaggaagttcttggagattatactcagaaaaaaatatccaatg

SEQ ID NO: 350952 - DNA, 1638 bp, Homo sapiens
ctcgagcttcccatgactggggagtagatgagaaccctgagtgggtggctggtttcttgaggcatacatatacccgacacaccttacacctctgatttggctgcattttggaatcatctgggaagttttaaacaatactggtgcctaggtccaacctccagagactctgatttaattggtatggggtggggttttgcagttttcaaaccacaatatccagcaaagtttgagaaccactgccctacacagccctccttcttctttatcttatctggagtcaggggcaccttcagcttctccaatcacctggccagtggctcttgtttccagtcctgctgttccagggtggataggccttcaggcggagacccaggaatccagctccagactctgtcccaagcagcctcttcagtccgggacgggacaggaagtgtccggcggaggtgggggtggaggtgattggcagttggagtctccaatgggccaggagcccccctatttcactcctctccttccattggcgcctggcggagccacccccgctgcgggggcccagggcgggagggagtagaggccggggcagagggcgagggcgagggcagagggcgctggcggcagcggccgcggaagatgagcagcagctgctcagggctgagcagggtcctggtggccgtggctacagccctggtgtctgcctcctccccctgcccccaggcctggggccccccaggtgagaagaaccctgctctacaacctcccaactctgacttgtgacttgccaccctcactgtggccccttcccatgcctaacttgtgacaccacccctgctcctgtcatccaacctgggtcctctctctaccctgttctctgacctctgtctccagattataacatgatgctttgatccagtgagccccccaccacccaggttttaacagtctgcttcttatctgtcattctcacaaagtggggaggggggtaaaggaagagccttacctcagaagtgccctccacaggggtccagtatgggcagccaggcaggtccgtgaagctgtgttgtcctggagtgactgccggggacccagtgtcctggtttcgggatggggagccaaagctgctccagggacctgactctgggctagggcatgaactggtcctggcccaggcagacagcactgatgagggcacctacatctgccagaccctggatggtgcacttgggggcacagtgaccctgcagctgggctaccctccagcccgccctgttgtctcctgccaagcagccgactatgagaacttctcttgcacttggatctcagctggaagttctgtttggagcccatttctgtgagaccctgtatttcaaatttgcagctgaaaggtgcttgtacctctgatttcaccccagagttggagttctgctcaaggaacgtgtgtaatgtgtacatctgtgtccatgtgtgaccatgtgtctgtgaggcagggaacatgtattctctgcatgcatgtatgtaggtgcctggggagtgtgtgtgggtccttggctcttggcctttccccttgcaggggttgtgcaggtgtgaataaagagaataaggaagttcttggagattatactcagaaaaaaatatccaatg

SEQ ID NO: 350953 - DNA, 1594 bp, Homo sapiens
ctcgagcttcccatgactggggagtagatgagaaccctgagtgggtggctggtttcttgaggcatacatatacccgacacaccttacacctctgatttggctgcattttggaatcatctgggaagttttaaacaatactggtgcctaggtccaacctccagagactctgatttaattggtatggggtggggttttgcagttttcaaaccacaatatccagcaaagtttgagaaccactgccctacacagccctccttcttctttatcttatctggagtcaggggcaccttcagcttctccaatcacctggccagtggctcttgtttccagtcctgctgttccagggtggataggccttcaggcggagacccaggaatccagctccagactctgtcccaagcagcctcttcagtccgggacgggacaggaagtgtccggcggaggtgggggtggaggtgattggcagttggagtctccaatgggccaggagcccccctatttcactcctctccttccattggcgcctggcggagccacccccgctgcgggggcccagggcgggagggagtagaggccggggcagagggcgagggcgagggcagagggcgctggcggcagcggccgcggaagatgagcagcagctgctcagggctgagcagggtcctggtggccgtggctacagccctggtgtctgcctcctccccctgcccccaggcctggggccccccaggtgagaagaaccctgctctacaacctcccaactctgacttgtgacttgccaccctcactgtggccccttcccatgcctaacttgtgacaccacccctgctcctgtcatccaacctgggtcctctctctaccctgttctctgacctctgtctccagattataacatgatgctttgatccagtgagccccccaccacccaggttttaacagtctgcttcttatctgtcattctcacaaagtggggaggggggtaaaggaagagccttacctcagaagtgccctccacaggggtccagtatgggcagccaggcaggtccgtgaagctgtgttgtcctggagtgactgccgggtaagtgccccacctgcctgttggtctgacactcatgaccctttcttgactctgcctagtcctcatgtcccgcccctcccatccttgcccgctctgtccgtaatcctcacctctctatctgtcctaaccgtctaactatccttattcaacagaaaattcaactggtatgttttgagcatctgccaagtgccaggtctattctaggctctgggatacagcagtgctaatgccaggcaaggtgcctgccttcaaagagcttacatcttagtggggaagacaataagcaaaggagaatcttgccagatagtaatacctgcagggcagaaaaaccaaagtgagggatgtcgaagaggacaactgagtggttactttttttttttttttttccgagagtctcactctgttgcccaggctggagtgcagtggtgcaatctgggctcactgcaacctctgcctcctgggttcaagcaattctcctgcctcagcctcccaagtagctgggattacaggtatgcg

SEQ ID NO: 350954 - DNA, 1145 bp, Homo sapiens
ctcgagcttcccatgactggggagtagatgagaaccctgagtgggtggctggtttcttgaggcatacatatacccgacacaccttacacctctgatttggctgcattttggaatcatctgggaagttttaaacaatactggtgcctaggtccaacctccagagactctgatttaattggtatggggtggggttttgcagttttcaaaccacaatatccagcaaagtttgagaaccactgccctacacagccctccttcttctttatcttatctggagtcaggggcaccttcagcttctccaatcacctggccagtggctcttgtttccagtcctgctgttccagggtggataggccttcaggcggagacccaggaatccagctccagactctgtcccaagcagcctcttcagtccgggacgggacaggaagtgtccggcggaggtgggggtggaggtgattggcagttggagtctccaatgggccaggagcccccctatttcactcctctccttccattggcgcctggcggagccacccccgctgcgggggcccagggcgggagggagtagaggccggggcagagggcgagggcgagggcagagggcgctggcggcagcggccgcggaagatgagcagcagctgctcagggctgagcagggtcctggtggccgtggctacagccctggtgtctgcctcctccccctgcccccaggcctggggccccccaggggtccagtatgggcagccaggcaggtccgtgaagctgtgttgtcctggagtgactgccggggacccagtgtcctggtttcgggatggggagccaaagctgctccagggacctgactctgggctagggcatgaactggtcctggcccaggcagacagcactgatgagggcacctacatctgccagaagttggagttctgctcaaggaacgtgtgtaatgtgtacatctgtgtccatgtgtgaccatgtgtctgtgaggcagggaacatgtattctctgcatgcatgtatgtaggtgcctggggagtgtgtgtgggtccttggctcttggcctttccccttgcaggggttgtgcaggtgtgaataaagagaataaggaagttcttggagattatactcagaaaaaaatatccaatg

SEQ ID NO: 350955 - DNA, 2864 bp, Homo sapiens
gggcggggctccgaagagctcggttcagatcccggccgcctgggctccaggagccccggaaccaggataagttggatggctgccgcggcgaagcggggggcggggtggaccgtgcccggtattttctatacgggttccggggcccggtagaggcgcgccaagaggaaaggaaagtgcggcggccctggaacctggatatcgcgcgagcaagctgcgcgcgggcgggcgggctatggcgcaggcgggttgtggggccggcgctggtggcggggcccggtgcatggcggtctgtcggcggagtcgccctcgggggctgtcagatttgtgacccagaaggaaatctctgacctcagctgtggctcttggtgctggccagaagccaacttcatgtctgagtgcacgagcagcagtttgccatggagagcttggggctgcacacggtgacccttagtgatgggacaacagcctacgtccagcaagctgtcaaaggagagaagcttcttgaagggcaggtgatccagctcgaggatgggaccaccgcatacattcaccaggtgacggtacagaaagaagctctctcctttgaggatggtcagcctgtgcagctggaagatggcagcatggcttacatacaccgcacacccagagaaggctatgaccccagcaccctggaagccgtccaactggaagatggctccactgcctacattcaccaccctgtggctgtgccatcggagagcaccatcctggccgtacagacagaggtgggcttggaggacctggcagcagaggatgatgagggcttcagtgcagacgcagtggtggccctggagcagtatgccagcaaggttcttcatgacagccagattccccgtaatggaaaagggcagcaagttggagacagagcattccgctgtggctacaagggctgtgggcgtctctacaccaccgctcatcacttaaaggtgcatgaacgagctcatacaggtgaccgtccatacagatgtgacttccccagctgtggaaaggcctttgccacaggctatggactgaagagccacgttcgtacccacactggtgagaaaccatacaagtgcccagaggagctgtgcagcaaggccttcaagacctcaggagacctgcagaagcatgtccgtacccacactggtgaacgcccgttccagtgcccttttgagggctgtggccgctccttcaccacatctaacatccgcaaggtacatgtgcgcacccacacaggcgagaggccctacacctgcccggagccccactgtggccgcggcttcaccagcgccaccaactataagaatcacgtgcgcatccacacaggggagaagccatacgtttgcacggtgccaggctgcgggaaacgcttcaccgagtactcgagcttgtataagcaccacgtggtgcacacacactgcaagccctacacctgcagcacctgcggcaagacctaccggcagacctccaccttggccatgcacaagcgcagtgcccatggcgagctggaggccacggaggagagtgagcaggccctctatgagcagcagcaacttgaggccgcctctgcagccgaggagagtccgccacccaaacgaccccggatagcttacctttcggaggtgaaggaagagagagatgacatcccagcccaggtggcgatggtgactgaagaagatggggccccccaggtggctctgatcactcaggatggtgcccagcaggtcagcctgtccccggaagacctgcaggccctggggagtgccatcagtatggtcacccagcacggcagcaccaccctcaccatccccagtcctgatgccgacctggccacatctggcacacatacagtcaccatggtcagcgccgatggcacccagacgcagcccgtcacaatcattacctctggggctgtggtggctgaggactcaagtgtagcatctcttcgtcatcaacaggtggcactgttggccacagccaacggaacgcacattgcagtgcagctggaggaacagcagaccttagaggaggccatcaatgtggccactgcggccatgcagcaaggggctgtgaccctggagacaacagtgtcggagagtggctgctgagtccaagagggctgggtcccacaccatgctggaggaagtgccatctgcatggccactcttgcccccaagggcccaggctgtggctgacacatagaaggtggccacataggtctctggggtgagaagacagcaagaaaactgcctaactgaagggaatgggggccctgctcaagaagggggccaggcagctggaatcaggggagtgcatcatcctcgggagctgacaacagccaggctacaccagggcacccgcctctcaaaatcagctgggcgcccactctcctcctaaagaacacccttctggccctcagtctgttccccttctcaggtagagattggggctgctatggggactggccctgtagggttgagccacagacagctcttcagcccagtagcagtggagcaggccctgtcctgccctcccagcaataaccacctccctggaggccagctgagatgcctggctacttggcaccagggacttcctgacaccacagtcaattaattcctcaggggcctgtggctggagaaaaggtgcccagcccccaccactcctcagctgccccccaacctctctatggcagagaggcagggagtggccctgtacatagactgctggggattgggtttgatttgttttgtttttttaaattccattttgataatttttttcctgctctgggtggtggtggcacatggatgaatgagtatttaataaaagttccaaatttc

SEQ ID NO: 350956 - DNA, 3161 bp, Homo sapiens
gggcggggctccgaagagctcggttcagatcccggccgcctgggctccaggagccccggaaccaggataagttggatggctgccgcggcgaagcggggggcggggtggaccgtgcccggtattttctatacgggttccggggcccggtagaggcgcgccaagaggaaaggaaagtgcggcggccctggaacctggatatcgcgcgagcaagctgcgcgcgggcgggcgggctatggcgcaggcgggttgtggggccggcgctggtggcggggcccggtgcatggcggtctgtcggcggagtcgccctcgggggctgtcagatttgtgacccagaaggaaatctctgacctcagctgtggctcttggtgctggccagaagccaacttcatgtctgagtgcacgagcagcagtttgccatggagagcttggggctgcacacggtgacccttagtgatgggacaacagcctacgtccagcaagctgtcaaaggagagaagcttcttgaagggcaggtgatccagctcgaggatgggaccaccgcatacattcaccaggtgacggtacagaaagaagctctctcctttgaggatggtcagcctgtgcagctggaagatggcagcatggcttacatacaccgcacacccagagaaggctatgaccccagcaccctggaagccgtccaactggaagatggctccactgcctacattcaccaccctgtggctgtgccatcggagagcaccatcctggccgtacagacagaggtgggcttggaggacctggcagcagaggatgatgagggcttcagtgcagacgcagtggtggccctggagcagtatgccagcaaggttcttcatgacagccagattccccgtaatggaaaagggcagcaagttggagacagagcattccgctgtggctacaagggctgtgggcgtctctacaccaccgctcatcacttaaaggtgcatgaacgagctcatacaggtgaccgtccatacagatgtgacttccccagctgtggaaaggcctttgccacaggctatggactgaagagccacgttcgtacccacactggtgagaaaccatacaagtgcccagaggagctgtgcagcaaggccttcaagacctcaggagacctgcagaagcatgtccgtacccacactggtgaacgcccgttccagtgcccttttgagggctgtggccgctccttcaccacatctaacatccgcaaggtacatgtgcgcacccacacaggcgagaggccctacacctgcccggagccccactgtggccgcggcttcaccagcgccaccaactataagaatcacgtgcgcatccacacaggggagaagccatacgtttgcacggtgccaggctgcgggaaacgcttcaccgagtactcgagcttgtataagcaccacgtggtgcacacacactgcaagccctacacctgcagcacctgcggcaagacctaccggcagacctccaccttggccatgcacaagcgcagtgcccatggcgagctggaggccacggaggagagtgagcaggccctctatgagcagcagcaacttgaggccgcctctgcagccgaggagagtccgccacccaaacgaccccggatagcttacctttcggaggtgaaggaagagagagatgacatcccagcccaggtggcgatggtgactgaagaagatggggccccccaggtggctctgatcactcaggatggtgcccagcaggtcagcctgtccccggaagacctgcaggccctggggagtgccatcagtatggtcacccagcacggcagcaccaccctcaccatccccagtcctgatgccgacctggccacatctggcacacatacagtcaccatggtcagcgccgatggcacccagacgcagcccgtcacaatcattacctctggggctgtggtggctgaggactcaagtgtagcatctcttcgtcatcaacaggtggcactgttggccacagccaacggaacgcacattgcagtgcagctggaggaacagcagaccttagaggaggccatcaatgtggccactgcggccatgcagcaaggggctgtgaccctggagacaacagtgtcggagagtggctgctgagtccaagagggctgggtcccacaccatgctggaggaagtgccatctgcatggccactcttgcccccaagggcccaggctgtggctgacacatagaaggtggccacataggtctctggggtgagaagacagcaagaaaactgcctaactgaagggaatgggggccctgctcaagaagggggccaggcagctggaatcaggggagtgcatcatcctcgggagctgacaacagccaggctacaccagggcacccgcctctcaaaatcagctgggcgcccactctcctcctaaagaacacccttctggccctcagtctgttccccttctcaggtagagattggggctgctatggggactggccctgtagggttgagccacagacagctcttcagcccagtagcagtggagcaggccctgtcctgccctcccagcaataaccacctccctggaggccagctgagatgcctggctacttggcaccagggacttcctgacaccacagtcaattaattcctcaggggcctgtggctggagaaaaggtgcccagcccccaccactcctcagctgccccccaacctctctatggcagagaggcagggagtggccctgtacatagactgctggggattgggtttgatttgttttgtttttttaaattccattttgataatttttttcctgctctgggtggtggtggcacatggatgaatgagtatttaataaaagttccaaatttcaaaaaaaaaaaaaaaacaacaacaccaaaaccacaaaaacaagacggcaccgacgagacggagcgcggcgagagggcggaaggcgcgaggccgcccggcgcgaggcgcagcagcgggcggcgccgaggacagaggggaggaggggggggcgacggaaaatcacgcgcgcaaggccacacgccagcagacaaaaagccgaaaaagaaggggccagccacaacgacagaacaacagcgaacaaccgagcagaaagcacacgacagcgacaagcacgaagaagaacgagacaacccggga

SEQ ID NO: 350957 - DNA, 2895 bp, Homo sapiens
gggcctccgccacctcctcacgcttctgctggaccgaatccttggaatggacagatttgtgacccagaaggaaatctctgacctcagctgtggctcttggtgctggccagaagccaacttcatgtctgagtgcacgagcagcagtttgccatggagagcttggggctgcacacggtgacccttagtgatgggacaacagcctacgtccagcaagctgtcaaaggagagaagcttcttgaagggcaggtgatccagctcgaggatgggaccaccgcatacattcaccaggtgacggtacagaaagaagctctctcctttgaggatggtcagcctgtgcagctggaagatggcagcatggcttacatacaccgcacacccagagaaggctatgaccccagcaccctggaagccgtccaactggaagatggctccactgcctacattcaccaccctgtggctgtgccatcggagagcaccatcctggccgtacagacagaggtgggcttggaggacctggcagcagaggatgatgagggcttcagtgcagacgcagtggtggccctggagcagtatgccagcaaggttcttcatgacagccagattccccgtaatggaaaagggcagcaagttggagacagagcattccgctgtggctacaagggctgtgggcgtctctacaccaccgctcatcacttaaaggtgcatgaacgagctcatacaggtgaccgtccatacagatgtgacttccccagctgtggaaaggcctttgccacaggctatggactgaagagccacgttcgtacccacactggtgagaaaccatacaagtgcccagaggagctgtgcagcaaggccttcaagacctcaggagacctgcagaagcatgtccgtacccacactggtgaacgcccgttccagtgcccttttgagggctgtggccgctccttcaccacatctaacatccgcaaggtacatgtgcgcacccacacaggcgagaggccctacacctgcccggagccccactgtggccgcggcttcaccagcgccaccaactataagaatcacgtgcgcatccacacaggggagaagccatacgtttgcacggtgccaggctgcgggaaacgcttcaccgagtactcgagcttgtataagcaccacgtggtgcacacacactgcaagccctacacctgcagcacctgcggcaagacctaccggcagacctccaccttggccatgcacaagcgcagtgcccatggcgagctggaggccacggaggagagtgagcaggccctctatgagcagcagcaacttgaggccgcctctgcagccgaggagagtccgccacccaaacgaccccggatagcttacctttcggaggtgaaggaagagagagatgacatcccagcccaggtggcgatggtgactgaagaagatggggccccccaggtggctctgatcactcaggatggtgcccagcaggtcagcctgtccccggaagacctgcaggccctggggagtgccatcagtatggtcacccagcacggcagcaccaccctcaccatccccagtcctgatgccgacctggccacatctggcacacatacagtcaccatggtcagcgccgatggcacccagacgcagcccgtcacaatcattacctctggggctgtggtggctgaggactcaagtgtagcatctcttcgtcatcaacaggtggcactgttggccacagccaacggaacgcacattgcagtgcagctggaggaacagcagaccttagaggaggccatcaatgtggccactgcggccatgcagcaaggggctgtgaccctggagacaacagtgtcggagagtggctgctgagtccaagagggctgggtcccacaccatgctggaggaagtgccatctgcatggccactcttgcccccaagggcccaggctgtggctgacacatagaaggtggccacataggtctctggggtgagaagacagcaagaaaactgcctaactgaagggaatgggggccctgctcaagaagggggccaggcagctggaatcaggggagtgcatcatcctcgggagctgacaacagccaggctacaccagggcacccgcctctcaaaatcagctgggcgcccactctcctcctaaagaacacccttctggccctcagtctgttccccttctcaggtagagattggggctgctatggggactggccctgtagggttgagccacagacagctcttcagcccagtagcagtggagcaggccctgtcctgccctcccagcaataaccacctccctggaggccagctgagatgcctggctacttggcaccagggacttcctgacaccacagtcaattaattcctcaggggcctgtggctggagaaaaggtgcccagcccccaccactcctcagctgccccccaacctctctatggcagagaggcagggagtggccctgtacatagactgctggggattgggtttgatttgttttgtttttttaaattccattttgataatttttttcctgctctgggtggtggtggcacatggatgaatgagtatttaataaaagttccaaatttcaaaaaaaaaaaaaaaacaacaacaccaaaaccacaaaaacaagacggcaccgacgagacggagcgcggcgagagggcggaaggcgcgaggccgcccggcgcgaggcgcagcagcgggcggcgccgaggacagaggggaggaggggggggcgacggaaaatcacgcgcgcaaggccacacgccagcagacaaaaagccgaaaaagaaggggccagccacaacgacagaacaacagcgaacaaccgagcagaaagcacacgacagcgacaagcacgaagaagaacgagacaacccggga

SEQ ID NO: 350958 - DNA, 2756 bp, Homo sapiens
gggcggggctccgaagagctcggttcagatcccggccgcctgggctccaggagccccggaaccaggataagttggatggctgccgcggcgaagcggggggcggggtggaccgtgcccggtattttctatacgggttccggggcccggtagaggcgcgccaagaggaaaggaaagtgcggcggccctggaacctggatatcgcgcgagcaagctgcgcgcgggcgggcgggctatggcgcaggcgggttgtggggccggcgctggtggcggggcccggtgcatggcggtctgtcggcggagtcgccctcgggggctgtcaggtgccatcggagagcaccatcctggccgtacagacagaggtgggcttggaggacctggcagcagaggatgatgagggcttcagtgcagacgcagtggtggccctggagcagtatgccagcaaggttcttcatgacagccagattccccgtaatggaaaagggcagcaagttggagacagagcattccgctgtggctacaagggctgtgggcgtctctacaccaccgctcatcacttaaaggtgcatgaacgagctcatacaggtgaccgtccatacagatgtgacttccccagctgtggaaaggcctttgccacaggctatggactgaagagccacgttcgtacccacactggtgagaaaccatacaagtgcccagaggagctgtgcagcaaggccttcaagacctcaggagacctgcagaagcatgtccgtacccacactggtgaacgcccgttccagtgcccttttgagggctgtggccgctccttcaccacatctaacatccgcaaggtacatgtgcgcacccacacaggcgagaggccctacacctgcccggagccccactgtggccgcggcttcaccagcgccaccaactataagaatcacgtgcgcatccacacaggggagaagccatacgtttgcacggtgccaggctgcgggaaacgcttcaccgagtactcgagcttgtataagcaccacgtggtgcacacacactgcaagccctacacctgcagcacctgcggcaagacctaccggcagacctccaccttggccatgcacaagcgcagtgcccatggcgagctggaggccacggaggagagtgagcaggccctctatgagcagcagcaacttgaggccgcctctgcagccgaggagagtccgccacccaaacgaccccggatagcttacctttcggaggtgaaggaagagagagatgacatcccagcccaggtggcgatggtgactgaagaagatggggccccccaggtggctctgatcactcaggatggtgcccagcaggtcagcctgtccccggaagacctgcaggccctggggagtgccatcagtatggtcacccagcacggcagcaccaccctcaccatccccagtcctgatgccgacctggccacatctggcacacatacagtcaccatggtcagcgccgatggcacccagacgcagcccgtcacaatcattacctctggggctgtggtggctgaggactcaagtgtagcatctcttcgtcatcaacaggtggcactgttggccacagccaacggaacgcacattgcagtgcagctggaggaacagcagaccttagaggaggccatcaatgtggccactgcggccatgcagcaaggggctgtgaccctggagacaacagtgtcggagagtggctgctgagtccaagagggctgggtcccacaccatgctggaggaagtgccatctgcatggccactcttgcccccaagggcccaggctgtggctgacacatagaaggtggccacataggtctctggggtgagaagacagcaagaaaactgcctaactgaagggaatgggggccctgctcaagaagggggccaggcagctggaatcaggggagtgcatcatcctcgggagctgacaacagccaggctacaccagggcacccgcctctcaaaatcagctgggcgcccactctcctcctaaagaacacccttctggccctcagtctgttccccttctcaggtagagattggggctgctatggggactggccctgtagggttgagccacagacagctcttcagcccagtagcagtggagcaggccctgtcctgccctcccagcaataaccacctccctggaggccagctgagatgcctggctacttggcaccagggacttcctgacaccacagtcaattaattcctcaggggcctgtggctggagaaaaggtgcccagcccccaccactcctcagctgccccccaacctctctatggcagagaggcagggagtggccctgtacatagactgctggggattgggtttgatttgttttgtttttttaaattccattttgataatttttttcctgctctgggtggtggtggcacatggatgaatgagtatttaataaaagttccaaatttcaaaaaaaaaaaaaaaacaacaacaccaaaaccacaaaaacaagacggcaccgacgagacggagcgcggcgagagggcggaaggcgcgaggccgcccggcgcgaggcgcagcagcgggcggcgccgaggacagaggggaggaggggggggcgacggaaaatcacgcgcgcaaggccacacgccagcagacaaaaagccgaaaaagaaggggccagccacaacgacagaacaacagcgaacaaccgagcagaaagcacacgacagcgacaagcacgaagaagaacgagacaacccggga

SEQ ID NO: 350959 - DNA, 2509 bp, Homo sapiens
gggcggggctccgaagagctcggttcagatcccggccgcctgggctccaggagccccggaaccaggataagttggatggctgccgcggcgaagcggggggcggggtggaccgtgcccggtattttctatacgggttccggggcccggtagaggcgcgccaagaggaaaggaaagtgcggcggccctggaacctggatatcgcgcgagcaagctgcgcgcgggcgggcgggctatggcgcaggcgggttgtggggccggcgctggtggcggggcccggtgcatggcggtctgtcggcggagtcgccctcgggggctgtcagatttgtgacccagaaggaaatctctgacctcagctgtggctcttggtgctggccagaagccaacttcatgtctgagtgcacgagcagcagtttgccatggagagcttggggctgcacacggtgacccttagtgatgggacaacagcctacgtccagcaagctgtcaaaggagagaagcttcttgaagggcaggtgatccagctcgaggatgggaccaccgcatacattcaccaggtgacggtacagaaagaagctctctcctttgaggatggtcagcctgtgcagctggaagatggcagcatggcttacatacaccgcacacccagagaaggctatgaccccagcaccctggaagccgtccaactggaagatggctccactgcctacattcaccaccctgtggctgtgccatcggagagcaccatcctggccgtacagacagaggtgggcttggaggacctggcagcagaggatgatgagggcttcagtgcagacgcagtggtggccctggagcagtatgccagcaaggttcttcatgacagccagattccccgtaatggaaaagggcagcaagttggagacagagcattccgctgtggctacaagggctgtgggcgtctctacaccaccgctcatcacttaaaggtgcatgaacgagctcatacaggtgaccgtccatacagatgtgacttccccagctgtggaaaggcctttgccacaggctatggactgaagagccacgttcgtacccacactggtgagaaaccatacaagtgcccagaggagctgtgcagcaaggccttcaagacctcaggagacctgcagaagcatgtccgtacccacactggtgaacgcccgttccagtgcccttttgagggctgtggccgctccttcaccacatctaacatccgcaaggtacatgtgcgcacccacacaggcgagaggccctacacctgcccggagccccactgtggccgcggcttcaccagcgccaccaactataagaatcacgtgcgcatccacacaggggagaagccatacgtttgcacggtgccaggctgcgggaaacgcttcaccgagtactcgagcttgtataagcaccacgtggtgcacacacactgcaagccctacacctgcagcacctgcggcaagacctaccggcagacctccaccttggccatgcacaagcgcagtgcccatggcgagctggaggccacggaggagagtgagcaggccctctatgagcagcagcaacttgaggccgcctctgcagccgaggagagtccgccacccaaacgaccccggatagcttacctttcggaggtgaaggaagagagagatgacatcccagcccaggtggcgatggtgactgaagaagatggggccccccaggtggctctgatcactcaggatggtgcccagcaggtcagcctgtccccggaagacctgcaggccctggggagtgccatcagtatggtcacccagcacggcagcaccaccctcaccatccccagtcctgatgccgacctggccacatctggcacacatacagtcaccatggtcagcgccgatggcacccagacgcagcccgtcacaatcattacctctggggctgtggtggctgaggactcaagtgtagcatctcttcgtcatcaacaggtggcactgttggccacagccaacggaacgcacattgcagtgcaggtgagtagagatctgggaggaaaggggatcccacggccagagaagtcaacaaggaataaaggggaattagatgaggatcttgaagagaagggcatctgactcaaaaagagcccatttcagaggacagatccctttcctcctgcatccatgcatctgtctcaggctcgctcttggctgaggcagaatgttgaagcctcttctggccttcaggataactccgatggcagtccacctgtggtccaagcccttcatcattttgtgtctctgtttcttcatctggaaatgaaggaggctgacgtagatgatcaccacggttctcttcagccagtccttcctccgtgagcaagtgggtctctctgaccctggctattccagggccccctggccatgcctagcctaataggactcttcatccgtgaacttcatgtttattggagccctactaagtgctcagcgtgtggcactgggtagatgggggagagtca

SEQ ID NO: 350960 - DNA, 2632 bp, Homo sapiens
ctgtgtcccaccttcttcactggggagaatacatatagggatctcaagacttttcccccaggttcttcatgacagccagattccccgtaatggaaaagggcagcaagttggagacagagcattccgctgtggctacaagggctgtgggcgtctctacaccaccgctcatcacttaaaggtaaggttgctggcagacagccgtcagctctgcagtcttccctcccaggctgtaattctacctttctgctttgattggaattggtccctgccctcacgttgctggagggaagaaatgagggtacacaggaatgccagcacagagcgcttgacacacatgaatggtacaggagggaagagaatcagggtcctaaagaaaaccaaagagccctggtcatacccttgctcctctgaattatgtgattgcttgtcctcacaggtgcatgaacgagctcatacaggtgaccgtccatacagatgtgacttccccagctgtggaaaggcctttgccacaggctatggactgaagagccacgttcgtacccacactggtgagaaaccatacaagtgcccagaggagctgtgcagcaaggccttcaagacctcaggagacctgcagaagcatgtccgtacccacactggtgaacgcccgttccagtgcccttttgagggctgtggccgctccttcaccacatctaacatccgcaaggtacatgtgcgcacccacacaggcgagaggccctacacctgcccggagccccactgtggccgcggcttcaccagcgccaccaactataagaatcacgtgcgcatccacacaggggagaagccatacgtttgcacggtgccaggctgcgggaaacgcttcaccgagtactcgagcttgtataagcaccacgtggtgcacacacactgcaagccctacacctgcagcacctgcggcaagacctaccggcagacctccaccttggccatgcacaagcgcagtgcccatggcgagctggaggccacggaggagagtgagcaggccctctatgagcagcagcaacttgaggccgcctctgcagccgaggagagtccgccacccaaacgaccccggatagcttacctttcggaggtgaaggaagagagagatgacatcccagcccaggtggcgatggtgactgaagaagatggggccccccaggtggctctgatcactcaggatggtgcccagcaggtcagcctgtccccggaagacctgcaggccctggggagtgccatcagtatggtcacccagcacggcagcaccaccctcaccatccccagtcctgatgccgacctggccacatctggcacacatacagtcaccatggtcagcgccgatggcacccagacgcagcccgtcacaatcattacctctggggctgtggtggctgaggactcaagtgtagcatctcttcgtcatcaacaggtggcactgttggccacagccaacggaacgcacattgcagtgcagctggaggaacagcagaccttagaggaggccatcaatgtggccactgcggccatgcagcaaggggctgtgaccctggagacaacagtgtcggagagtggctgctgagtccaagagggctgggtcccacaccatgctggaggaagtgccatctgcatggccactcttgcccccaagggcccaggctgtggctgacacatagaaggtggccacataggtctctggggtgagaagacagcaagaaaactgcctaactgaagggaatgggggccctgctcaagaagggggccaggcagctggaatcaggggagtgcatcatcctcgggagctgacaacagccaggctacaccagggcacccgcctctcaaaatcagctgggcgcccactctcctcctaaagaacacccttctggccctcagtctgttccccttctcaggtagagattggggctgctatggggactggccctgtagggttgagccacagacagctcttcagcccagtagcagtggagcaggccctgtcctgccctcccagcaataaccacctccctggaggccagctgagatgcctggctacttggcaccagggacttcctgacaccacagtcaattaattcctcaggggcctgtggctggagaaaaggtgcccagcccccaccactcctcagctgccccccaacctctctatggcagagaggcagggagtggccctgtacatagactgctggggattgggtttgatttgttttgtttttttaaattccattttgataatttttttcctgctctgggtggtggtggcacatggatgaatgagtatttaataaaagttccaaatttcaaaaaaaaaaaaaaaacaacaacaccaaaaccacaaaaacaagacggcaccgacgagacggagcgcggcgagagggcggaaggcgcgaggccgcccggcgcgaggcgcagcagcgggcggcgccgaggacagaggggaggaggggggggcgacggaaaatcacgcgcgcaaggccacacgccagcagacaaaaagccgaaaaagaaggggccagccacaacgacagaacaacagcgaacaaccgagcagaaagcacacgacagcgacaagcacgaagaagaacgagacaacccggga

SEQ ID NO: 350961 - DNA, 296 bp, Homo sapiens
ctgaattatgtgattgcttgtcctcacaggtgcatgaacgagctcatacaggtgaccgtccatacagatgtgacttccccagctgtggaaaggcctttgccacaggtaacctgcctggtgggctgcttccagttgagggtggagggttctcgttctgtttgggacctctctgaagggaacccaacaccaggctgctttcctggagaaactaccgtcagagtactctgacttgcagggtgctctctctggaggaaaccttgttacgggagtgcaaggcagcatggttcaggccagca

SEQ ID NO: 350962 - DNA, 2699 bp, Homo sapiens
gggcggggctccgaagagctcggttcagatcccggccgcctgggctccaggagccccggaaccaggataagttggatggctgccgcggcgaagcggggggcggggtggaccgtgcccggtattttctatacgggttccggggcccggtagaggcgcgccaagaggaaaggaaagtgcggcggccctggaacctggatatcgcgcgagcaagctgcgcgcgggcgggcgggctatggcgcaggcgggttgtggggccggcgctggtggcggggcccggtgcatggcggtctgtcggcggagtcgccctcgggggctgtcagatttgtgacccagaaggaaatctctgacctcagctgtggctcttggtgctggccagaagccaacttcatgtctgagtgcacgagcagcagtttgccatggagagcttggggctgcacacggtgacccttagtgatgggacaacagcctacgtccagcaagctgtcaaaggagagaagcttcttgaagggcaggtgatccagctcgaggatgggaccaccgcatacattcaccaggtgacggtacagaaagaagctctctcctttgaggatggtcagcctgtgcagctggaagatggcagcatggcttacatacaccgcacacccagagaaggctatgaccccagcaccctggaagccgtccaactggaagatggctccactgcctacattcaccaccctgtggctgtgccatcggagagcaccatcctggccgtacagacagaggtgggcttggaggacctggcagcagaggatgatgagggcttcagtgcagacgcagtggtggccctggagcagtatgccagcaaggttcttcatgacagccagattccccgtaatggaaaagggcagcaagttggagacagagcattccgctgtggctacaagggctgtgggcgtctctacaccaccgctcatcacttaaaggtgcatgaacgagctcatacaggtgaccgtccatacagatgtgacttccccagctgtggaaaggcctttgccacaggctatggactgaagagccacgttcgtacccacactggtgagaaaccatacaagtgcccagaggagctgtgcagcaaggccttcaagacctcaggagacctgcagaagcatgtccgtacccacactggtgaacgcccgttccagtgcccttttgagggctgtggccgctccttcaccacatctaacatccgcaaggtacatgtgcgcacccacacaggcgagaggccctacacctgcccggagccccactgtggccgcggcttcaccagcgccaccaactataagaatcacgtgcgcatccacacaggggagaagccatacgtttgcacggtgccaggctgcgggaaacgcttcaccgagtactcgagcttgtataagcaccacgtggtgcacacacactgcaagccctacacctgcagcacctgcggcaagacctaccggcagacctccaccttggccatgcacaagcgcagtgcccatggcgagctggaggccacggaggagagtgagcaggccctctatgagcagcagcaacttgaggccgcctctgcagccgaggagagtccgccacccaaacgaccccggatagcttacctttcggaggtgaaggaagagagagatgacatcccagcccaggtggcgatggtgactgaagaagatggggccccccaggtggctctgatcactcaggatggtgcccagcaggtcacaatcattacctctggggctgtggtggctgaggactcaagtgtagcatctcttcgtcatcaacaggtggcactgttggccacagccaacggaacgcacattgcagtgcagctggaggaacagcagaccttagaggaggccatcaatgtggccactgcggccatgcagcaaggggctgtgaccctggagacaacagtgtcggagagtggctgctgagtccaagagggctgggtcccacaccatgctggaggaagtgccatctgcatggccactcttgcccccaagggcccaggctgtggctgacacatagaaggtggccacataggtctctggggtgagaagacagcaagaaaactgcctaactgaagggaatgggggccctgctcaagaagggggccaggcagctggaatcaggggagtgcatcatcctcgggagctgacaacagccaggctacaccagggcacccgcctctcaaaatcagctgggcgcccactctcctcctaaagaacacccttctggccctcagtctgttccccttctcaggtagagattggggctgctatggggactggccctgtagggttgagccacagacagctcttcagcccagtagcagtggagcaggccctgtcctgccctcccagcaataaccacctccctggaggccagctgagatgcctggctacttggcaccagggacttcctgacaccacagtcaattaattcctcaggggcctgtggctggagaaaaggtgcccagcccccaccactcctcagctgccccccaacctctctatggcagagaggcagggagtggccctgtacatagactgctggggattgggtttgatttgttttgtttttttaaattccattttgataatttttttcctgctctgggtggtggtggcacatggatgaatgagtatttaataaaagttccaaatttc

SEQ ID NO: 350963 - DNA, 3048 bp, Homo sapiens
gggcggggctccgaagagctcggttcagatcccggccgcctgggctccaggagccccggaaccaggataagttggatggctgccgcggcgaagcggggggcggggtggaccgtgcccggtattttctatacgggttccggggcccggtagaggcgcgccaagaggaaaggaaagtgcggcggccctggaacctggatatcgcgcgagatttgtgacccagaaggaaatctctgacctcagctgtggctcttggtgctggccagaagccaacttcatgtctgagtgcacgagcagcagtttgccatggagagcttggggctgcacacggtgacccttagtgatgggacaacagcctacgtccagcaagctgtcaaaggagagaagcttcttgaagggcaggtgatccagctcgaggatgggaccaccgcatacattcaccaggtgacggtacagaaagaagctctctcctttgaggatggtcagcctgtgcagctggaagatggcagcatggcttacatacaccgcacacccagagaaggctatgaccccagcaccctggaagccgtccaactggaagatggctccactgcctacattcaccaccctgtggctgtgccatcggagagcaccatcctggccgtacagacagaggtgggcttggaggacctggcagcagaggatgatgagggcttcagtgcagacgcagtggtggccctggagcagtatgccagcaaggttcttcatgacagccagattccccgtaatggaaaagggcagcaagttggagacagagcattccgctgtggctacaagggctgtgggcgtctctacaccaccgctcatcacttaaaggtgcatgaacgagctcatacaggtgaccgtccatacagatgtgacttccccagctgtggaaaggcctttgccacaggctatggactgaagagccacgttcgtacccacactggtgagaaaccatacaagtgcccagaggagctgtgcagcaaggccttcaagacctcaggagacctgcagaagcatgtccgtacccacactggtgaacgcccgttccagtgcccttttgagggctgtggccgctccttcaccacatctaacatccgcaaggtacatgtgcgcacccacacaggcgagaggccctacacctgcccggagccccactgtggccgcggcttcaccagcgccaccaactataagaatcacgtgcgcatccacacaggggagaagccatacgtttgcacggtgccaggctgcgggaaacgcttcaccgagtactcgagcttgtataagcaccacgtggtgcacacacactgcaagccctacacctgcagcacctgcggcaagacctaccggcagacctccaccttggccatgcacaagcgcagtgcccatggcgagctggaggccacggaggagagtgagcaggccctctatgagcagcagcaacttgaggccgcctctgcagccgaggagagtccgccacccaaacgaccccggatagcttacctttcggaggtgaaggaagagagagatgacatcccagcccaggtggcgatggtgactgaagaagatggggccccccaggtggctctgatcactcaggatggtgcccagcaggtcagcctgtccccggaagacctgcaggccctggggagtgccatcagtatggtcacccagcacggcagcaccaccctcaccatccccagtcctgatgccgacctggccacatctggcacacatacagtcaccatggtcagcgccgatggcacccagacgcagcccgtcacaatcattacctctggggctgtggtggctgaggactcaagtgtagcatctcttcgtcatcaacaggtggcactgttggccacagccaacggaacgcacattgcagtgcagctggaggaacagcagaccttagaggaggccatcaatgtggccactgcggccatgcagcaaggggctgtgaccctggagacaacagtgtcggagagtggctgctgagtccaagagggctgggtcccacaccatgctggaggaagtgccatctgcatggccactcttgcccccaagggcccaggctgtggctgacacatagaaggtggccacataggtctctggggtgagaagacagcaagaaaactgcctaactgaagggaatgggggccctgctcaagaagggggccaggcagctggaatcaggggagtgcatcatcctcgggagctgacaacagccaggctacaccagggcacccgcctctcaaaatcagctgggcgcccactctcctcctaaagaacacccttctggccctcagtctgttccccttctcaggtagagattggggctgctatggggactggccctgtagggttgagccacagacagctcttcagcccagtagcagtggagcaggccctgtcctgccctcccagcaataaccacctccctggaggccagctgagatgcctggctacttggcaccagggacttcctgacaccacagtcaattaattcctcaggggcctgtggctggagaaaaggtgcccagcccccaccactcctcagctgccccccaacctctctatggcagagaggcagggagtggccctgtacatagactgctggggattgggtttgatttgttttgtttttttaaattccattttgataatttttttcctgctctgggtggtggtggcacatggatgaatgagtatttaataaaagttccaaatttcaaaaaaaaaaaaaaaacaacaacaccaaaaccacaaaaacaagacggcaccgacgagacggagcgcggcgagagggcggaaggcgcgaggccgcccggcgcgaggcgcagcagcgggcggcgccgaggacagaggggaggaggggggggcgacggaaaatcacgcgcgcaaggccacacgccagcagacaaaaagccgaaaaagaaggggccagccacaacgacagaacaacagcgaacaaccgagcagaaagcacacgacagcgacaagcacgaagaagaacgagacaacccggga

SEQ ID NO: 350964 - DNA, 3161 bp, Homo sapiens
gggcggggctccgaagagctcggttcagatcccggccgcctgggctccaggagccccggaaccaggataagttggatggctgccgcggcgaagcggggggcggggtggaccgtgcccggtattttctatacgggttccggggcccggtagaggcgcgccaagaggaaaggaaagtgcggcggccctggaacctggatatcgcgcgagatttgtgacccagaaggaaatctctgacctcagctgtggctcttggtgctggccagaagccaacttcatgtctgagtgcacgagcagcagtttgccatggagagcttggggctgcacacggtgacccttagtgatgggacaacagcctacgtccagcaagctgtcaaaggagagaagcttcttgaagggcaggtgatccagctcgaggatgggaccaccgcatacattcaccaggtgacggtacagaaaggtgagggcaccccaacacaccatgccttgtcgagggaagcctgacagcccccaccaagggacccctccatggcactgagctccagggaaaggcaggcattgctctcgttacagaagctctctcctttgaggatggtcagcctgtgcagctggaagatggcagcatggcttacatacaccgcacacccagagaaggctatgaccccagcaccctggaagccgtccaactggaagatggctccactgcctacattcaccaccctgtggctgtgccatcggagagcaccatcctggccgtacagacagaggtgggcttggaggacctggcagcagaggatgatgagggcttcagtgcagacgcagtggtggccctggagcagtatgccagcaaggttcttcatgacagccagattccccgtaatggaaaagggcagcaagttggagacagagcattccgctgtggctacaagggctgtgggcgtctctacaccaccgctcatcacttaaaggtgcatgaacgagctcatacaggtgaccgtccatacagatgtgacttccccagctgtggaaaggcctttgccacaggctatggactgaagagccacgttcgtacccacactggtgagaaaccatacaagtgcccagaggagctgtgcagcaaggccttcaagacctcaggagacctgcagaagcatgtccgtacccacactggtgaacgcccgttccagtgcccttttgagggctgtggccgctccttcaccacatctaacatccgcaaggtacatgtgcgcacccacacaggcgagaggccctacacctgcccggagccccactgtggccgcggcttcaccagcgccaccaactataagaatcacgtgcgcatccacacaggggagaagccatacgtttgcacggtgccaggctgcgggaaacgcttcaccgagtactcgagcttgtataagcaccacgtggtgcacacacactgcaagccctacacctgcagcacctgcggcaagacctaccggcagacctccaccttggccatgcacaagcgcagtgcccatggcgagctggaggccacggaggagagtgagcaggccctctatgagcagcagcaacttgaggccgcctctgcagccgaggagagtccgccacccaaacgaccccggatagcttacctttcggaggtgaaggaagagagagatgacatcccagcccaggtggcgatggtgactgaagaagatggggccccccaggtggctctgatcactcaggatggtgcccagcaggtcagcctgtccccggaagacctgcaggccctggggagtgccatcagtatggtcacccagcacggcagcaccaccctcaccatccccagtcctgatgccgacctggccacatctggcacacatacagtcaccatggtcagcgccgatggcacccagacgcagcccgtcacaatcattacctctggggctgtggtggctgaggactcaagtgtagcatctcttcgtcatcaacaggtggcactgttggccacagccaacggaacgcacattgcagtgcagctggaggaacagcagaccttagaggaggccatcaatgtggccactgcggccatgcagcaaggggctgtgaccctggagacaacagtgtcggagagtggctgctgagtccaagagggctgggtcccacaccatgctggaggaagtgccatctgcatggccactcttgcccccaagggcccaggctgtggctgacacatagaaggtggccacataggtctctggggtgagaagacagcaagaaaactgcctaactgaagggaatgggggccctgctcaagaagggggccaggcagctggaatcaggggagtgcatcatcctcgggagctgacaacagccaggctacaccagggcacccgcctctcaaaatcagctgggcgcccactctcctcctaaagaacacccttctggccctcagtctgttccccttctcaggtagagattggggctgctatggggactggccctgtagggttgagccacagacagctcttcagcccagtagcagtggagcaggccctgtcctgccctcccagcaataaccacctccctggaggccagctgagatgcctggctacttggcaccagggacttcctgacaccacagtcaattaattcctcaggggcctgtggctggagaaaaggtgcccagcccccaccactcctcagctgccccccaacctctctatggcagagaggcagggagtggccctgtacatagactgctggggattgggtttgatttgttttgtttttttaaattccattttgataatttttttcctgctctgggtggtggtggcacatggatgaatgagtatttaataaaagttccaaatttcaaaaaaaaaaaaaaaacaacaacaccaaaaccacaaaaacaagacggcaccgacgagacggagcgcggcgagagggcggaaggcgcgaggccgcccggcgcgaggcgcagcagcgggcggcgccgaggacagaggggaggaggggggggcgacggaaaatcacgcgcgcaaggccacacgccagcagacaaaaagccgaaaaagaaggggccagccacaacgacagaacaacagcgaacaaccgagcagaaagcacacgacagcgacaagcacgaagaagaacgagacaacccggga

SEQ ID NO: 350965 - DNA, 2374 bp, Homo sapiens
ctgtgtcccaccttcttcactggggagaatacatatagggatctcaagacttttcccccaggttcttcatgacagccagattccccgtaatggaaaagggcagcaagttggagacagagcattccgctgtggctacaagggctgtgggcgtctctacaccaccgctcatcacttaaaggtgcatgaacgagctcatacaggtgaccgtccatacagatgtgacttccccagctgtggaaaggcctttgccacaggctatggactgaagagccacgttcgtacccacactggtgagaaaccatacaagtgcccagaggagctgtgcagcaaggccttcaagacctcaggagacctgcagaagcatgtccgtacccacactggtgaacgcccgttccagtgcccttttgagggctgtggccgctccttcaccacatctaacatccgcaaggtacatgtgcgcacccacacaggcgagaggccctacacctgcccggagccccactgtggccgcggcttcaccagcgccaccaactataagaatcacgtgcgcatccacacaggggagaagccatacgtttgcacggtgccaggctgcgggaaacgcttcaccgagtactcgagcttgtataagcaccacgtggtgcacacacactgcaagccctacacctgcagcacctgcggcaagacctaccggcagacctccaccttggccatgcacaagcgcagtgcccatggcgagctggaggccacggaggagagtgagcaggccctctatgagcagcagcaacttgaggccgcctctgcagccgaggagagtccgccacccaaacgaccccggatagcttacctttcggaggtgaaggaagagagagatgacatcccagcccaggtggcgatggtgactgaagaagatggggccccccaggtggctctgatcactcaggatggtgcccagcaggtcagcctgtccccggaagacctgcaggccctggggagtgccatcagtatggtcacccagcacggcagcaccaccctcaccatccccagtcctgatgccgacctggccacatctggcacacatacagtcaccatggtcagcgccgatggcacccagacgcagcccgtcacaatcattacctctggggctgtggtggctgaggactcaagtgtagcatctcttcgtcatcaacaggtggcactgttggccacagccaacggaacgcacattgcagtgcagctggaggaacagcagaccttagaggaggccatcaatgtggccactgcggccatgcagcaaggggctgtgaccctggagacaacagtgtcggagagtggctgctgagtccaagagggctgggtcccacaccatgctggaggaagtgccatctgcatggccactcttgcccccaagggcccaggctgtggctgacacatagaaggtggccacataggtctctggggtgagaagacagcaagaaaactgcctaactgaagggaatgggggccctgctcaagaagggggccaggcagctggaatcaggggagtgcatcatcctcgggagctgacaacagccaggctacaccagggcacccgcctctcaaaatcagctgggcgcccactctcctcctaaagaacacccttctggccctcagtctgttccccttctcaggtagagattggggctgctatggggactggccctgtagggttgagccacagacagctcttcagcccagtagcagtggagcaggccctgtcctgccctcccagcaataaccacctccctggaggccagctgagatgcctggctacttggcaccagggacttcctgacaccacagtcaattaattcctcaggggcctgtggctggagaaaaggtgcccagcccccaccactcctcagctgccccccaacctctctatggcagagaggcagggagtggccctgtacatagactgctggggattgggtttgatttgttttgtttttttaaattccattttgataatttttttcctgctctgggtggtggtggcacatggatgaatgagtatttaataaaagttccaaatttcaaaaaaaaaaaaaaaacaacaacaccaaaaccacaaaaacaagacggcaccgacgagacggagcgcggcgagagggcggaaggcgcgaggccgcccggcgcgaggcgcagcagcgggcggcgccgaggacagaggggaggaggggggggcgacggaaaatcacgcgcgcaaggccacacgccagcagacaaaaagccgaaaaagaaggggccagccacaacgacagaacaacagcgaacaaccgagcagaaagcacacgacagcgacaagcacgaagaagaacgagacaacccggga

SEQ ID NO: 350966 - DNA, 1935 bp, Homo sapiens
gggcggggctccgaagagctcggttcagatcccggccgcctgggctccaggagccccggaaccaggataagttggatggctgccgcggcgaagcggggggcggggtggaccgtgcccggtattttctatacgggttccggggcccggtagaggcgcgccaagaggaaaggaaagtgcggcggccctggaacctggatatcgcgcgagcaagctgcgcgcgggcgggcgggctatggcgcaggcgggttgtggggccggcgctggtggcggggcccggtgcatggcggtctgtcggcggagtcgccctcgggggctgtcagatttgtgacccagaaggaaatctctgacctcagctgtggctcttggtgctggccagaagccaacttcatgtctgagtgcacgagcagcagtttgccatggagagcttggggctgcacacggtgacccttagtgatgggacaacagcctacgtccagcaagctgtcaaaggagagaagcttcttgaagggcaggtgatccagctcgaggatgggaccaccgcatacattcaccaggtgacggtacagaaagaagctctctcctttgaggatggtcagcctgtgcagctggaagatggcagcatggcttacatacaccgcacacccagagaaggctatgaccccagcaccctggaagccgtccaactggaagatggctccactgcctacattcaccaccctgtggctgtgccatcggagagcaccatcctggccgtacagacagaggtgggcttggaggacctggcagcagaggatgatgagggcttcagtgcagacgcagtggtggccctggagcagtatgccagcaaggttcttcatgacagccagattccccgtaatggaaaagggcagcaagttggagacagagcattccgctgtggctacaagggctgtgggcgtctctacaccaccgctcatcacttaaaggtgcatgaacgagctcatacaggtgaccgtccatacagatgtgacttccccagctgtggaaaggcctttgccacaggctatggactgaagagccacgttcgtacccacactggtgagaaaccatacaagtgcccagaggagctgtgcagcaaggccttcaagacctcaggagacctgcagaagcatgtccgtacccacactggtgaacgcccgttccagtgcccttttgagggctgtggccgctccttcaccacatctaacatccgcaaggtacatgtgcgcacccacacaggcgagaggccctacacctgcccggagccccactgtggccgcggcttcaccagcgccaccaactataagaatcacgtgcgcatccacacaggggagaagccatacgtttgcacggtgccaggctgcgggaaacgcttcaccgagtactcgagcttgtataagcaccacgtggtgcacacacactgcaagccctacacctgcagcacctgcggcaagacctaccggcagacctccaccttggccatgcacaagcgcagtgcccatggcgagctggaggccacggaggagagtgagcaggccctctatgagcagcagcaacttgaggccgcctctgcagccgaggagagtccgccacccaaacgaccccggatagcttacctttcggaggtgaaggaagagagagatgacatcccagcccaggtggcgatggtgactgaagaagatggggccccccaggtggctctgatcactcaggatggtgcccagcaggtcagcctgtccccggaagacctgcaggccctggggagtgccatcagtatggtcacccagcacggcagcaccaccctcaccatccccagtcctgatgccgacctggccacatctggcacacatacagtcaccatggtcagcgccgatggcacccagacgcagcccgtatgaccaggcggtttgcttgggg

SEQ ID NO: 350967 - DNA, 1892 bp, Homo sapiens
gggcggggctccgaagagctcggttcagatcccggccgcctgggctccaggagccccggaaccaggataagttggatggctgccgcggcgaagcggggggcggggtggaccgtgcccggtattttctatacgggttccggggcccggtagaggcgcgccaagaggaaaggaaagtgcggcggccctggaacctggatatcgcgcgagcaagctgcgcgcgggcgggcgggctatggcgcaggcgggttgtggggccggcgctggtggcggggcccggtgcatggcggtctgtcggcggagtcgccctcgggggctgtcagatttgtgacccagaaggaaatctctgacctcagctgtggctcttggtgctggccagaagccaacttcatgtctgagtgcacgagcagcagtttgccatggagagcttggggctgcacacggtgacccttagtgatgggacaacagcctacgtccagcaagctgtcaaaggagagaagcttcttgaagggcaggtgatccagctcgaggatgggaccaccgcatacattcaccaggtgacggtacagaaagaagctctctcctttgaggatggtcagcctgtgcagctggaagatggcagcatggcttacatacaccgcacacccagagaaggctatgaccccagcaccctggaagccgtccaactggaagatggctccactgcctacattcaccaccctgtggctgtgccatcggagagcaccatcctggccgtacagacagaggtgggcttggaggacctggcagcagaggatgatgagggcttcagtgcagacgcagtggtggccctggagcagtatgccagcaaggttcttcatgacagccagattccccgtaatggaaaagggcagcaagttggagacagagcattccgctgtggctacaagggctgtgggcgtctctacaccaccgctcatcacttaaaggtgcatgaacgagctcatacaggtgaccgtccatacagatgtgacttccccagctgtggaaaggcctttgccacaggctatggactgaagagccacgttcgtacccacactggtgagaaaccatacaagtgcccagaggagctgtgcagcaaggccttcaagacctcaggagacctgcagaagcatgtccgtacccacactggtgaacgcccgttccagtgcccttttgagggctgtggccgctccttcaccacatctaacatccgcaaggtacatgtgcgcacccacacaggcgagaggccctacacctgcccggagccccactgtggccgcggcttcaccagcgccaccaactataagaatcacgtgcgcatccacacaggtgggctagctggcatgcgaggactaccctcactcaggccccaacccctctactgtaggcttcccatctaagacacattcccaactcccagcccagaacccttctgtgccagccattccaggctggtctgggggtagggtatccccagaacaactctgcttgcagtgagtaattcctcaatttccagttaggtccaatctgaaaggtattgccagtcctctctggggtccctcagctccctaccacccctctacacccaccctgagttctccaactctgactgaactcttgaaaagaggccagggtcaggaatgatggggaagaagcagagtgaactgtcaccttcaactcctcaccttatccgccgtccatgactcctgtgtatcctcaccctccccagtgttatgcccctcatccagctttctgtgttgtgtctcagcatgtgtgtcccctctttcccatcacaactgatacttcagtcatccttgcctcttgcctctgctgttcaccattctcaacctcccaccctcaaccttataagcccc

SEQ ID NO: 350968 - DNA, 1466 bp, Homo sapiens
  misc_feature (1)..(1): n is a, c, g, or t
  misc_feature (5)..(6): n is a, c, g, or t
ngcanngaaggcgccgggtttccggggctcctggccccgcttattccgcgggggtcggcggggtcggcctgggcgcccgcgccgccgctgcgctttgtccgctgggcacactgcttctgggaggggcgggcagacatggtggcggccgccgccccctcctcggccctagcatgccgcggccgcctcgcggctacccggcttgccggtcccgagcggcagccccggggtggcgatggggtcgcgccgaggcagcggaggttctgcgggcgactggaggttggcagtgggcgggagaaagaggaaggcaggcgcggctgggcctcggcctctggcgccgcggtaccctttgtctcggcagcctgacggccccgccgggctctccggagaggggaacgggcggcgagggtggcgggtcctgggcgccctgtgctgcggggccgagaggcgctcgggtcgcggcgggatcggccggaccagacagggttaatggaagagcctggccagtcccgcgcggggcccccgcagcgacagccttggccgcggggactggagtcctgagggggagaagcctgccgttctgaaggctcgggacttctgccccaaagacttcgccgccgagaactgcgggtgcactgcctcagggaagaagttgagaattttgccaggtcatctctgccagggcacagttcatcactgtgtgtttagtgtgtttcggtgaagctctccaagtgtgttgaatcagcgtgcctagcctcaagggtgcatcgtgaaaactgaaaccaaaggaatgatacaggcctgctttgtgtgtgtcttcccactttaagcttgttttcagtacaaatactcttgctttaaacctgattggactgtggcgagcggacatctgttcaaaggaggggccgagaccacagtacttctgaagggggcttgataatgtggaaacattttaagttttctctccggactgttttgctctctcaattcaggcaagttactgaagtacgttttttatctagaaaaaggtttgatgtagtctgtaaatggtccttgtaaagtacattgccatctcagaattaaaagatccactctcatttattatgcagaagttagtggtcattctttcctgtagatagtttatctcatgtaaagacccacccagcttggtttaaatttttttctcactgacgtataaccatcagctttgatacttccattttcaggctcagactttgaatttaaggaaactaaagatgactttattttcttttctcttggttttttttttccaaaaacaaaaaataaatccattacatgttaacatagatgataagagtgacatcttgcatttttgcaaatctttttaatgcctggtttaatagaagattctcagatctacgtcagactgttgtggttagcacaccatgtaacctctggaacactccactgtacactcatactttttt

SEQ ID NO: 350969 - DNA, 1107 bp, Homo sapiens
  misc_feature (1)..(1): n is a, c, g, or t
  misc_feature (5)..(6): n is a, c, g, or t
ngcanngaaggcgccgggtttccggggctcctggccccgcttattccgcgggggtcggcggggtcggcctgggcgcccgcgccgccgctgcgctttgtccgctgggcacactgcttctgggaggggcgggcagacatggtggcggccgccgccccctcctcggccctagcatgccgcggccgcctcgcggctacccggcttgccggtcccgagcggcagccccggggtggcgatggggtcgcgccgaggcagcggaggttctgcgggcgactggaggttggcagtgggcgggagaaagaggaaggcaggcgcggctgggcctcggcctctggcgccgcggtaccctttgtctcggcagcctgacggccccgccgggctctccggagaggggaacgggcggcgagggtggcgggtcctgggcgccctgtgctgcggggccgagaggcgctcgggtcgcggcgggatcggccggaccagacagggttaatggaagagcctggccagtcccgcgcggggcccccgcagcgacagccttggccgcggggactggagtcctgagggggagaagcctgccgttctgaaggctcgggacttctgccccaaagacttcgccgccgagaactgcgggtgcactgcctcagggaagaagttgagaattttgccaggtcatctctgccagggcacagttcatcactgtgtgtttagtgtgtttcggtgaagctctccaagtgtgttgaatcagcgtgcctagcctcaagggtgcatcgtgaaaactgaaaccaaaggaatgatacaggcctgctttgtgtgtgtcttcccactttaagcttgttttcagtacaaatactcttgctttaaacctgattggactgtggcgagcggacatctgttcaaaggaggggccgagaccacagtacttctgaagggggcttgataatgtggaaacattttaagttttctctccggactgttttgctctctcaattcaggcaagttactgaagtacgttttttatctagaaaaaggtttgatgtagtctgtaaatggtccttgtaaagtacattgccatctcagaattaaaagatccactctcatttattatgcaga

SEQ ID NO: 350970 - DNA, 851 bp, Homo sapiens
  misc_feature (1)..(1): n is a, c, g, or t
  misc_feature (5)..(6): n is a, c, g, or t
ngcanngaaggcgccgggtttccggggctcctggccccgcttattccgcgggggtcggcggggtcggcctgggcgcccgcgccgccgctgcgctttgtccgctgggcacactgcttctgggaggggcgggcagacatggtggcggccgccgccccctcctcggccctagcatgccgcggccgcctcgcggctacccggcttgccggtcccgagcggcagccccggggtggcgatggggtcgcgccgaggcagcggaggttctgcgggcgactggaggttggcagtgggcgggagaaagaggaaggcaggcgcggctgggcctcggcctctggcgccgcggtacccaaagacttcgccgccgagaactgcgggtgcactgcctcagggaagaagttgagaattttgccaggtcatctctgccagggcacagttcatcactgtgtgtttagtgtgtttcggtgaagctctccaagtgtgttgaatcagcgtgcctagcctcaagggtgcatcgtgaaaactgaaaccaaaggaatgatacaggcctgctttgtgtgtgtcttcccactttaagcttgttttcagtacaaatactcttgctttaaacctgattggactgtggcgagcggacatctgttcaaaggaggggccgagaccacagtacttctgaagggggcttgataatgtggaaacattttaagttttctctccggactgttttgctctctcaattcaggcaagttactgaagtacgttttttatctagaaaaaggtttgatgtagtctgtaaatggtccttgtaaagtacattgccatctcagaattaaaagatccactctcatttattatgcaga

SEQ ID NO: 350971 - DNA, 763 bp, Homo sapiens
  misc_feature (1)..(1): n is a, c, g, or t
  misc_feature (5)..(6): n is a, c, g, or t
ngcanngaaggcgccgggtttccggggctcctggccccgcttattccgcgggggtcggcggggtcggcctgggcgcccgcgccgccgctgcgctttgtccgctgggcacactgcttctgggaggggcgggcagacatggtggcggccgccgccccctcctcggccctagcatgccgcggccgcctcgcggctacccggcttgccggtcccgagcggcagccccggggtggcgatggggtgtctgctgcctgatgtgcatgctgtgatgtgttactagctggtggcgacgtaggatgtgttttgtgcatgtagtgtgccgtgtgaggagaagcatggaaggtgcatgtgctggctgtgcttgtgtgcccttctgtgcccttcctttgtgtctgccagcgtgagatataccctatggatcatctgtgtcatggcctttgatctggtgccccctgccctggggggtctttcttctctgtggatggatgggtgggacaacggtgtgctgtgcggaggtgggattgtgcttggggtgtacgcttgtgtagctggcccttgattgcctttgctgtgtggccctgattgatggtgctgccgtccgggtgatctgctgagctgtggcatcgtggtgccgtgtggacccagagaaccagggggttttaaagttgcgaaagagaacagccgctttgtggcccaagtacgcccagctgcggtgtgtggccccaccggacaaagacaggaatccaatgcccatttgcggcccggg

SEQ ID NO: 350972 - DNA, 937 bp, Homo sapiens
tccagagctagttggtcggaggataataaaccactatccctgactttttctgtgatccttgcgaatatcttgcagatttgtttggagtacctctctcttctgaagcctgtaaccttacctatttgtaaaataaatttaagttctcctgctctctggtatctcaacatagggggagaaaagacccaatttaagtaacttttatagatctaaatttcgaaggaggatcctttcttattcaaaaccgaactaaaactaagtgacttgattcacagaaatcttaatattgagatgtctaaattgggtgggtttcagcacgtaaatgttgacaactaatagacattttaccatcgctgtggctttaccttgttgtggaagttgggttcggacaccaggataatagaatcttcctctcatttcccccagatccttgacagtataacttgatgacttctaatcctaaggaattgcataccttggttttcaggtacagccatttaaacagggtgcagtgtattgacagttcaaggaagtccaggagtcgcgtggatttgtgtgctacaattttgttgtggaaaattgtactgtaatacttctcttggtactgtaagaatttttaatgtagaaattatgctctgtaatgttgtttttggaaataaaactgtttaaactctttgggttgtttaaccttttaaagtgaaatagctgtgacagtgaaatgttacttttgagagtagtgtcttaaatctaactttacagataagccaagtgtatgtagtagctcagattgtctagttgggcactgactttcagcacattgtctcatgagacactacctcttaatttattttacttgtatcaactttagagtagcatggccatttgtttattttttaataagtgatttgtttttaaaaattaaagtacttgtgactgcaaa

SEQ ID NO: 350973 - DNA, 3883 bp, Homo sapiens
atcgcaaagttgttaaccccagagtcttctggctgtgctgcctcctctgcttttaatcttctgtggatatttctccgatttcccccaaaagcccacagatcctgggggaagccaccccattcggccaccgatcatggaagaaagtattactttttatttaccaaacattttaaagatgttggaagatccatatgctgcctggaggctgttgtttctagggacacaagtatccagcctatattgttacaattttttttcaagaactgccgtcttctttgcctgcactaatggaacatcatcttcagcgggctatttcagcacagcaggtgtatggcgagaagagggataatatggttataccggtcccagaggcagaaagtaatattgcttactatgagtctatatatcctggggaatttaagatgccaaagcagctcattcacatacagccttttagtttggatgctgaacagcctgattatgatttggattctgaagatgaagtatttgtgaataaactgaaaaagaaaatggacatctgcccattgcaatttgaggagatgattgaccgcctagaaaaaggcagtggtcagcagccagtcagtctgcaggaagccaaactactgctaaaagaagatgatgaactaattagagaagtttatgaatattggattaaaaagagaaaaaactgtcgagggccatctcttattccatcagtaaaacaagagaagcgagatggttccagcacaaatgatccttatgtggcttttagaaggcgtactgaaaaaatgcagactcgaaaaaatcgcaaaaatgatgaagcctcttacgaaaaaatgcttaagctgcgacgagatctaagtcgagctgttactattctagagatgataaaaagaagagaaaaaagtaaaagagagctattgcacttaacactggaaattatggaaaagaggtataatttgggcgactacaatggagagatcatgtctgaggttatggcacagagacagccaatgaaacctacttatgccatccccatcatccctattactaatagcagtcaatttaaacaccaggaagcaatggatgtgaaggagttcaaagttaataagcaagataaagccgatcttatccgaccgaaacggaaatatgaaaagaagcccaaagtcttaccatcgtctgccgctgctactccccaacagacgagtcctgctgcactgccagtcttcaatgctaaagatctgaatcagtatgactttcccagctcagacgaagaacctctctcccaggttttgtctggctcttcggaagctgaggaagacaatgatcctgatggtccttttgctttccgtaggaaagcaggctgtcagtactatgctcctcacttagaccaaactggcaactggccttggactagtcctaaagatggaggattaggggatgtgcgatatagatactgcttaactactctcaccgtaccccaaaggtgtattggatttgcacgaagacgggttgggcgcggtggaagggtcttactggacagagctcattcagactatgacagtgtgtttcaccatctggatttggaaatgctttcctcaccacaacattctccagtcaatcagtttgccaatacctcagaaacaaatacctcggacaaatctttctctaaagacctcagtcagatactagtcaatatcaaatcatgtagatggcggcattttaggcctcggacaccatccctacatgacagtgacaatgatgaactctcctgtagaaaattatataggagtataaaccgaacaggaacagcacaacctgggacccagacatgcagtacctctacgcaaagtaaaagtagcagtggttcagcacactttgcatttacagccgaacaataccagcaacatcaacagcaactggcactcatgcagaaacagcagcttgcacaaattcagcaacagcaagcaaatagtaattcctccaccaacacatcacagggttttgtttctaagactttggattctgctagtgcacagtttgctgcttctgctttggtgacatcagaacaactgatgggattcaagatgaaggatgatgtggtgcttggaatcggggtgaatggcgtccttccagcctcaggagtatacaagggcttacacctcagtagtactacaccaacagcacttgtacatacaagtccatcaacggcaggttcagctttgttacagccttcaaatattacacagacttcaagttcccacagtgcactgagtcatcaagtaactgctgccaattctgcaacaactcaggttctgattgggaacaacattcgattaactgtaccttcatcagttgccactgtaaactctattgccccaataaatgcacgacatatacctaggactttaagtgctgttccatcatctgccttaaagctggccgctgcagcaaactgtcaagtttccaaggtcccatcttcatcctctgtagattcagttccaagggaaaatcatgaatcagaaaagccagcactgaacaacatagcagacaacacagtagcgatggaggtgacgtagcttcctccgagtggaactgcagcctggggacttgattaggtgctatgcatcagtagcattttgaatgcaagggatgatggaaagcagcacatgcgtttctgtggcagctgtggggacttgacagcaatgctcatctctcatgcttcaatttttcttttcttactgttaataggaaaaaaatcaacatctgtaaattaagaatacagcaattatctgtacagtactacagagttgtaatacccttgtatatatgttacttgaatacagaaatgttcatttgtgatgctttgcacttgggggtggggggtgggagggaaatcaattgcaacaaagagtgtgagatgtgagattgtatagagatgaagtgtcatcacatcatgtgcatggtgcggaacctgctgttttatctatttattgtgccgtgtttacagttttttgtacactgtaccttcattggttcctgtgctgtagtaaatgtgttaggtagctgtggactccttggtattttgtaaatggtataacataacttggttcccctctgggtccttgagttttctgtgtatcatgtgaaaaaaaatggtgacatacatacagaattttacaaaaaaaaaaaaaaaaggcatcagtttttttaaaaatggggaatgtactattaaatggggatcttcctggtctactatcattaggacaagtaacaagctaaaaatgaagtctcttgaatctttccatccccaacttgcccacaaagctgtgggtggtttctggtacttaaagcactaatattatgttgctgctctgcgaacagcccagtagtcccatttccttccacaccaaaaagtgttaaatcaagtatgcaaatggagtccttacaactggagtttatgttgtcttgccctttttttagcacaaaaaaaattgtacttttttattgtcgaattgtttaaaagacttcattctttacttgttcttacgaaaaggatataagggagaagaatgcagtaattgctgtacgtgtatcatcattccagtttctaaaaacagccagccagcttttttccttttaagattctccagaaggctgcaaggccagaaccacaaatatcgggtgccttcctttggaaatatttgacctctcttctgtgaagagaatggtacttaacagactactactagtgctttgtcagtaccgaagtctgaatgcccagtccaatggcatacattatccttaaggtttttaatcccacctggaaaaattgtgatagaattctcacaaaataaacccagggcattacatgttgacaaac

SEQ ID NO: 350974 - DNA, 1027 bp, Homo sapiens
agcggggcgtgcccgcgccgctgcgcgatgcagtgtggggaatggctggggttggctgaagagcgcacagtggagttttaatgtccgccatgttggccatggcgtattgaagagagcgagcgagagaggagcggagcggcacagcctcccaccctcccggctggtgttagtgcccggacggcgggctctgcgctccgcccctcaagtccccggcagcggttggcgagtggggaccgaacccccggttctccatgatcccgctggccggggccgtttccccagagcggagaggtatctgctgcgcctgagatgagtaaactgtcgtttcgggcgcgggcgctagacgcctcgaagccgctgccggttttccgctgtgaggatctgcccgacctgcacgaatacgcctcgataaacagggccgtgccgcagatgcccaccggaatggagaaggaagaggagtcggaaatgtcgagggtgcagcgtgtttgcccggacgacttacttttctagaagatccttgacagtataacttgatgacttctaatcctaaggaattgcataccttggttttcaggtacagccatttaaacagggtgcagtgtattgacagttcaaggaagtccaggagtcgcgtggatttgtgtgctacaattttgttgtggaaaattgtactgtaatacttctcttggtactgtaagaatttttaatgtagaaattatgctctgtaatgttgtttttggaaataaaactgtttaaactctttgggttgtttaaccttttaaagtgaaatagctgtgacagtgaaatgttacttttgagagtagtgtcttaaatctaactttacagataagccaagtgtatgtagtagctcagattgtctagttgggcactgactttcagcacattgtctcatgagacactacctcttaatttattttacttgtatcaactttagagtagcatggccatttgtttattttttaataagtgatttgtttttaaaaattaaagtacttgtgactgcaaa

SEQ ID NO: 350975 - DNA, 750 bp, Homo sapiens
gcttctaacacttcaactttaaagaccactcccttagcttttggtaaagtagttgaataatctacaaaataggacttaaatattatagaaaaaaatcttaaaggccttctccttttatattataaaaattgcctatgtgatgatttttgagctataaaaatggcacttcacatggttcaaccaaataagttttaatgatcgctttatgttcttaataggcttctagtgtatttgcttttaggagtggttggagggtgtcgcatccattgtcttttattacttatatgtatattcatagtaaagataatctcctttctttaactttaaatgtgtaagacaaatctaagcttagattgtttgcgactctgaaaacaaaatccaagaattctttcttatttctttagaaagtctaggtcttgtttttatgcagacatctgtggagtttttgtcggtgaattcacacagtaaatgattgcatatggttccttctgtcagcttttagtttggatgctgaacagcctgattatgatttggattctgaagatgaagtatttgtgaataaactgaaaaagaaaatggacatctgcccattgcaatttgaggagatgattgaccgcctagaaaaaggcagtggtcagcaggtacaacttcatttgtatataacaagtatatacatattctatgtaaagaactgtattgtatggaaagagtgtgagattgcaggttggaggttatagggatcctcagagt

SEQ ID NO: 350976 - DNA, 625 bp, Homo sapiens
atcgcaaagttgttaaccccagagtcttctggctgtgctgcctcctctgcttttaatcttctgtggatatttctccgatttcccccaaaagcccacagatcctgggggaagccaccccattcggccaccgatcatggaagaaagtattactttttatttaccaaacattttaaagatgttggaagatccatatgctgcctggaggctgttgtttctagggacacaagtatccagcctatattgttacaattttttttcaagaactgccgtcttctttgcctgcactaatggtaagtttgtaattttcaccatttatgtcagtctttgaaagagccaccggctaaaaaggattttcattgtgtttcttctaacaaaaccaatctttgtatttttctttagctttgatctctgcacgttctacctaatcttgcctggttaatttttaccaaaagaaaaaaaaatagttttttttttcattgttaaagctaaatgtttataatataaattatactttaattactgtgaactacagaggaactcagatatttcaagatggacttgttttgtgccagtaatgttggcaatgccaaatatgtgcatatcctctttataaaaattatgtctt

SEQ ID NO: 350977 - DNA, 4124 bp, Homo sapiens
agcggggcgtgcccgcgccgctgcgcgatgcagtgtggggaatggctggggttggctgaagagcgcacagtggagttttaatgtccgccatgttggccatggcgtattgaagagagcgagcgagagaggagcggagcggcacagcctcccaccctcccggctggtgttagtgcccggacggcgggctctgcgctccgcccctcaagtccccggcagcggttggcgagtggggaccgaacccccggttctccatgatcccgctggccggggccgtttccccagagcggagaggtatctgctgcgcctgagatgagtaaactgtcgtttcgggcgcgggcgctagacgcctcgaagccgctgccggttttccgctgtgaggatctgcccgacctgcacgaatacgcctcgataaacagggccgtgccgcagatgcccaccggaatggagaaggaagaggagtcggaacatcatcttcagcgggctatttcagcacagcaggtgtatggcgagaagagggataatatggttataccggtcccagaggcagaaagtaatattgcttactatgagtctatatatcctggggaatttaagatgccaaagcagctcattcacatacagccttttagtttggatgctgaacagcctgattatgatttggattctgaagatgaagtatttgtgaataaactgaaaaagaaaatggacatctgcccattgcaatttgaggagatgattgaccgcctagaaaaaggcagtggtcagcagccagtcagtctgcaggaagccaaactactgctaaaagaagatgatgaactaattagagaagtttatgaatattggattaaaaagagaaaaaactgtcgagggccatctcttattccatcagtaaaacaagagaagcgagatggttccagcacaaatgatccttatgtggcttttagaaggcgtactgaaaaaatgcagactcgaaaaaatcgcaaaaatgatgaagcctcttacgaaaaaatgcttaagctgcgacgagatctaagtcgagctgttactattctagagatgataaaaagaagagaaaaaagtaaaagagagctattgcacttaacactggaaattatggaaaagaggtataatttgggcgactacaatggagagatcatgtctgaggttatggcacagagacagccaatgaaacctacttatgccatccccatcatccctattactaatagcagtcaatttaaacaccaggaagcaatggatgtgaaggagttcaaagttaataagcaagataaagccgatcttatccgaccgaaacggaaatatgaaaagaagcccaaagtcttaccatcgtctgccgctgctactccccaacagacgagtcctgctgcactgccagtcttcaatgctaaagatctgaatcagtatgactttcccagctcagacgaagaacctctctcccaggttttgtctggctcttcggaagctgaggaagacaatgatcctgatggtccttttgctttccgtaggaaagcaggctgtcagtactatgctcctcacttagaccaaactggcaactggccttggactagtcctaaagatggaggattaggggatgtgcgatatagatactgcttaactactctcaccgtaccccaaaggtgtattggatttgcacgaagacgggttgggcgcggtggaagggtcttactggacagagctcattcagactatgacagtgtgtttcaccatctggatttggaaatgctttcctcaccacaacattctccagtcaatcagtttgccaatacctcagaaacaaatacctcggacaaatctttctctaaagacctcagtcagatactagtcaatatcaaatcatgtagatggcggcattttaggcctcggacaccatccctacatgacagtgacaatgatgaactctcctgtagaaaattatataggagtataaaccgaacaggaacagcacaacctgggacccagacatgcagtacctctacgcaaagtaaaagtagcagtggttcagcacactttgcatttacagccgaacaataccagcaacatcaacagcaactggcactcatgcagaaacagcagcttgcacaaattcagcaacagcaagcaaatagtaattcctccaccaacacatcacagaaccttgcatctaaccagcagaaaagtggctttcgcctgaatatacagggtttagaaagaacactacagggttttgtttctaagactttggattctgctagtgcacagtttgctgcttctgctttggtgacatcagaacaactgatgggattcaagatgaaggatgatgtggtgcttggaatcggggtgaatggcgtccttccagcctcaggagtatacaagggcttacacctcagtagtactacaccaacagcacttgtacatacaagtccatcaacggcaggttcagctttgttacagccttcaaatattacacagacttcaagttcccacagtgcactgagtcatcaagtaactgctgccaattctgcaacaactcaggttctgattgggaacaacattcgattaactgtaccttcatcagttgccactgtaaactctattgccccaataaatgcacgacatatacctaggactttaagtgctgttccatcatctgccttaaagctggccgctgcagcaaactgtcaagtttccaaggtcccatcttcatcctctgtagattcagttccaagggaaaatcatgaatcagaaaagccagcactgaacaacatagcagacaacacagtagcgatggaggtgacgtagcttcctccgagtggaactgcagcctggggacttgattaggtgctatgcatcagtagcattttgaatgcaagggatgatggaaagcagcacatgcgtttctgtggcagctgtggggacttgacagcaatgctcatctctcatgcttcaatttttcttttcttactgttaataggaaaaaaatcaacatctgtaaattaagaatacagcaattatctgtacagtactacagagttgtaatacccttgtatatatgttacttgaatacagaaatgttcatttgtgatgctttgcacttgggggtggggggtgggagggaaatcaattgcaacaaagagtgtgagatgtgagattgtatagagatgaagtgtcatcacatcatgtgcatggtgcggaacctgctgttttatctatttattgtgccgtgtttacagttttttgtacactgtaccttcattggttcctgtgctgtagtaaatgtgttaggtagctgtggactccttggtattttgtaaatggtataacataacttggttcccctctgggtccttgagttttctgtgtatcatgtgaaaaaaaatggtgacatacatacagaattttacaaaaaaaaaaaaaaaaggcatcagtttttttaaaaatggggaatgtactattaaatggggatcttcctggtctactatcattaggacaagtaacaagctaaaaatgaagtctcttgaatctttccatccccaacttgcccacaaagctgtgggtggtttctggtacttaaagcactaatattatgttgctgctctgcgaacagcccagtagtcccatttccttccacaccaaaaagtgttaaatcaagtatgcaaatggagtccttacaactggagtttatgttgtcttgccctttttttagcacaaaaaaaattgtacttttttattgtcgaattgtttaaaagacttcattctttacttgttcttacgaaaaggatataagggagaagaatgcagtaattgctgtacgtgtatcatcattccagtttctaaaaacagccagccagcttttttccttttaagattctccagaaggctgcaaggccagaaccacaaatatcgggtgccttcctttggaaatatttgacctctcttctgtgaagagaatggtacttaacagactactactagtgctttgtcagtaccgaagtctgaatgcccagtccaatggcatacattatccttaaggtttttaatcccacctggaaaaattgtgatagaattctcacaaaataaacccagggcattacatgttgacaaac

SEQ ID NO: 350978 - DNA, 3928 bp, Homo sapiens
gcttctaacacttcaactttaaagaccactcccttagcttttggtaaagtagttgaataatctacaaaataggacttaaatattatagaaaaaaatcttaaaggccttctccttttatattataaaaattgcctatgtgatgatttttgagctataaaaatggcacttcacatggttcaaccaaataagttttaatgatcgctttatgttcttaataggcttctagtgtatttgcttttaggagtggttggagggtgtcgcatccattgtcttttattacttatatgtatattcatagtaaagataatctcctttctttaactttaaatgtgtaagacaaatctaagcttagattgtttgcgactctgaaaacaaaatccaagaattctttcttatttctttagaaagtctaggtcttgtttttatgcagacatctgtggagtttttgtcggtgaattcacacagtaaatgattgcatatggttccttctgtcagcttttagtttggatgctgaacagcctgattatgatttggattctgaagatgaagtatttgtgaataaactgaaaaagaaaatggacatctgcccattgcaatttgaggagatgattgaccgcctagaaaaaggcagtggtcagcagccagtcagtctgcaggaagccaaactactgctaaaagaagatgatgaactaattagagaagtttatgaatattggattaaaaagagaaaaaactgtcgagggccatctcttattccatcagtaaaacaagagaagcgagatggttccagcacaaatgatccttatgtggcttttagaaggcgtactgaaaaaatgcagactcgaaaaaatcgcaaaaatgatgaagcctcttacgaaaaaatgcttaagctgcgacgagatctaagtcgagctgttactattctagagatgataaaaagaagagaaaaaagtaaaagagagctattgcacttaacactggaaattatggaaaagaggtataatttgggcgactacaatggagagatcatgtctgaggttatggcacagagacagccaatgaaacctacttatgccatccccatcatccctattactaatagcagtcaatttaaacaccaggaagcaatggatgtgaaggagttcaaagttaataagcaagataaagccgatcttatccgaccgaaacggaaatatgaaaagaagcccaaagtcttaccatcgtctgccgctgctactccccaacagacgagtcctgctgcactgccagtcttcaatgctaaagatctgaatcagtatgactttcccagctcagacgaagaacctctctcccaggttttgtctggctcttcggaagctgaggaagacaatgatcctgatggtccttttgctttccgtaggaaagcaggctgtcagtactatgctcctcacttagaccaaactggcaactggccttggactagtcctaaagatggaggattaggggatgtgcgatatagatactgcttaactactctcaccgtaccccaaaggtgtattggatttgcacgaagacgggttgggcgcggtggaagggtcttactggacagagctcattcagactatgacagtgtgtttcaccatctggatttggaaatgctttcctcaccacaacattctccagtcaatcagtttgccaatacctcagaaacaaatacctcggacaaatctttctctaaagacctcagtcagatactagtcaatatcaaatcatgtagatggcggcattttaggcctcggacaccatccctacatgacagtgacaatgatgaactctcctgtagaaaattatataggagtataaaccgaacaggaacagcacaacctgggacccagacatgcagtacctctacgcaaagtaaaagtagcagtggttcagcacactttgcatttacagccgaacaataccagcaacatcaacagcaactggcactcatgcagaaacagcagcttgcacaaattcagcaacagcaagcaaatagtaattcctccaccaacacatcacagggttttgtttctaagactttggattctgctagtgcacagtttgctgcttctgctttggtgacatcagaacaactgatgggattcaagatgaaggatgatgtggtgcttggaatcggggtgaatggcgtccttccagcctcaggagtatacaagggcttacacctcagtagtactacaccaacagcacttgtacatacaagtccatcaacggcaggttcagctttgttacagccttcaaatattacacagacttcaagttcccacagtgcactgagtcatcaagtaactgctgccaattctgcaacaactcaggttctgattgggaacaacattcgattaactgtaccttcatcagttgccactgtaaactctattgccccaataaatgcacgacatatacctaggactttaagtgctgttccatcatctgccttaaagctggccgctgcagcaaactgtcaagtttccaaggtcccatcttcatcctctgtagattcagttccaagggaaaatcatgaatcagaaaagccagcactgaacaacatagcagacaacacagtagcgatggaggtgacgtagcttcctccgagtggaactgcagcctggggacttgattaggtgctatgcatcagtagcattttgaatgcaagggatgatggaaagcagcacatgcgtttctgtggcagctgtggggacttgacagcaatgctcatctctcatgcttcaatttttcttttcttactgttaataggaaaaaaatcaacatctgtaaattaagaatacagcaattatctgtacagtactacagagttgtaatacccttgtatatatgttacttgaatacagaaatgttcatttgtgatgctttgcacttgggggtggggggtgggagggaaatcaattgcaacaaagagtgtgagatgtgagattgtatagagatgaagtgtcatcacatcatgtgcatggtgcggaacctgctgttttatctatttattgtgccgtgtttacagttttttgtacactgtaccttcattggttcctgtgctgtagtaaatgtgttaggtagctgtggactccttggtattttgtaaatggtataacataacttggttcccctctgggtccttgagttttctgtgtatcatgtgaaaaaaaatggtgacatacatacagaattttacaaaaaaaaaaaaaaaaggcatcagtttttttaaaaatggggaatgtactattaaatggggatcttcctggtctactatcattaggacaagtaacaagctaaaaatgaagtctcttgaatctttccatccccaacttgcccacaaagctgtgggtggtttctggtacttaaagcactaatattatgttgctgctctgcgaacagcccagtagtcccatttccttccacaccaaaaagtgttaaatcaagtatgcaaatggagtccttacaactggagtttatgttgtcttgccctttttttagcacaaaaaaaattgtacttttttattgtcgaattgtttaaaagacttcattctttacttgttcttacgaaaaggatataagggagaagaatgcagtaattgctgtacgtgtatcatcattccagtttctaaaaacagccagccagcttttttccttttaagattctccagaaggctgcaaggccagaaccacaaatatcgggtgccttcctttggaaatatttgacctctcttctgtgaagagaatggtacttaacagactactactagtgctttgtcagtaccgaagtctgaatgcccagtccaatggcatacattatccttaaggtttttaatcccacctggaaaaattgtgatagaattctcacaaaataaacccagggcattacatgttgacaaac

SEQ ID NO: 350979 - DNA, 3974 bp, Homo sapiens
agcggggcgtgcccgcgccgctgcgcgatgcagtgtggggaatggctggggttggctgaagagcgcacagtggagttttaatgtccgccatgttggccatggcgtattgaagagagcgagcgagagaggagcggagcggcacagcctcccaccctcccggctggtgttagtgcccggacggcgggctctgcgctccgcccctcaagtccccggcagcggttggcgagtggggaccgaacccccggttctccatgatcccgctggccggggccgtttccccagagcggagaggtatctgctgcgcctgagatgagtaaactgtcgtttcgggcgcgggcgctagacgcctcgaagccgctgccggttttccgctgtgaggatctgcccgacctgcacgaatacgcctcgataaacagggccgtgccgcagatgcccaccggaatggagaaggaagaggagtcggaacatcatcttcagcgggctatttcagcacagcaggtgtatggcgagaagagggataatatggttataccggtcccagaggcagaaagtaatattgcttactatgagtctatatatcctggggaatttaagatgccaaagcagctcattcacatacagccttttagtttggatgctgaacagcctgattatgatttggattctgaagatgaagtatttgtgaataaactgaaaaagaaaatggacatctgcccattgcaatttgaggagatgattgaccgcctagaaaaaggcagtggtcagcagccagtcagtctgcaggaagccaaactactgctaaaagaagatgatgaactaattagagaagtttatgaatattggattaaaaagagaaaaaactgtcgagggccatctcttattccatcagtaaaacaagagaagcgagatggttccagcacaaatgatccttatgtggcttttagaaggcgtactgaaaaaatgcagactcgaaaaaatcgcaaaaatgatgaagcctcttacgaaaaaatgcttaagctgcgacgagatctaagtcgagctgttactattctagagatgataaaaagaagagaaaaaagtaaaagagagctattgcacttaacactggaaattatggaaaagaggtataatttgggcgactacaatggagagatcatgtctgaggttatggcacagagacagccaatgaaacctacttatgccatccccatcatccctattactaatagcagtcaatttaaacaccaggaagcaatggatgtgaaggagttcaaagttaataagcaagataaagccgatcttatccgaccgaaacggaaatatgaaaagaagcccaaagtcttaccatcgtctgccgctgctactccccaacagacgagtcctgctgcactgccagtcttcaatgctaaagatctgaatcagtatgactttcccagctcagacgaagaacctctctcccaggttttgtctggctcttcggaagctgaggaagacaatgatcctgatggtccttttgctttccgtaggaaagcaggctgtcagtactatgctcctcacttagaccaaactggcaactggccttggactagtcctaaagatggaggattaggggatgtgcgatatagatactgcttaactactctcaccgtaccccaaaggtgtattggatttgcacgaagacgggttgggcgcggtggaagggtcttactggacagagctcattcagactatgacagtgtgtttcaccatctggatttggaaatgctttcctcaccacaacattctccagtcaatcagtttgccaatacctcagaaacaaatacctcggacaaatctttctctaaagacctcagtcagatactagtcaatatcaaatcatgtagatggcggcattttaggcctcggacaccatccctacatgacagtgacaatgatgaactctcctgtagaaaattatataggagtataaaccgaacaggaacagcacaacctgggacccagacatgcagtacctctacgcaaagtaaaagtagcagtggttcagcacactttgcatttacagccgaacaataccagcaacatcaacagcaactggcactcatgcagaaacagcagcttgcacaaattcagcaacagcaagcaaatagtaattcctccaccaacacatcacagaaccttgcatctaaccagcagaaaagtggctttcgcctgaatatacagggtttagaaagaacactacagggttttgtttctaagactttggattctgctagtgcacagtttgctgcttctgctttggtgacatcagaacaactgatgggattcaagatgaaggatgatgtggtgcttggaatcggggtgaatggcgtccttccagcctcaggagtatacaagggcttacacctcagtagtactacaccaacagcacttgtacatacaagtccatcaacggcaggttcagctttgttacagccttcaaatattacacagacttcaagttcccacagtgcactgagtcatcaagtaactgctgccaattctgcaacaactcaggttctgattgggaacaacattcgattaactgtaccttcatcagttgccactgtaaactctattgccccaataaatgcacgacatatacctaggactttaagtgctgttccatcatctgccttaaagctggccgctgcagcaaactgtcaagtttccaaggtcccatcttcatcctctgtagattcagttccaagggaaaatcatgaatcagaaaagccagcactgaacaacatagcagacaacacagtagcgatggaggtgacgtagcttcctccgagtggaactgcagcctggggacttgattaggtgctatgcatcagtagcattttgaatgcaagggatgatggaaagcagcacatgcgtttctgtggcagctgtggggacttgacagcaatgctcatctctcatgcttcaatttttcttttcttactgttaataggaaaaaaatcaacatctgtaaattaagaatacagcagatgaagtgtcatcacatcatgtgcatggtgcggaacctgctgttttatctatttattgtgccgtgtttacagttttttgtacactgtaccttcattggttcctgtgctgtagtaaatgtgttaggtagctgtggactccttggtattttgtaaatggtataacataacttggttcccctctgggtccttgagttttctgtgtatcatgtgaaaaaaaatggtgacatacatacagaattttacaaaaaaaaaaaaaaaaggcatcagtttttttaaaaatggggaatgtactattaaatggggatcttcctggtctactatcattaggacaagtaacaagctaaaaatgaagtctcttgaatctttccatccccaacttgcccacaaagctgtgggtggtttctggtacttaaagcactaatattatgttgctgctctgcgaacagcccagtagtcccatttccttccacaccaaaaagtgttaaatcaagtatgcaaatggagtccttacaactggagtttatgttgtcttgccctttttttagcacaaaaaaaattgtacttttttattgtcgaattgtttaaaagacttcattctttacttgttcttacgaaaaggatataagggagaagaatgcagtaattgctgtacgtgtatcatcattccagtttctaaaaacagccagccagcttttttccttttaagattctccagaaggctgcaaggccagaaccacaaatatcgggtgccttcctttggaaatatttgacctctcttctgtgaagagaatggtacttaacagactactactagtgctttgtcagtaccgaagtctgaatgcccagtccaatggcatacattatccttaaggtttttaatcccacctggaaaaattgtgatagaattctcacaaaataaacccagggcattacatgttgacaaac

SEQ ID NO: 350980 - DNA, 3873 bp, Homo sapiens
  misc_feature (1438)..(1438): n is a, c, g, or t
  misc_feature (1443)..(1443): n is a, c, g, or t
  misc_feature (1449)..(1449): n is a, c, g, or t
  misc_feature (1476)..(1476): n is a, c, g, or t
  misc_feature (1487)..(1487): n is a, c, g, or t
  misc_feature (1508)..(1508): n is a, c, g, or t
  misc_feature (1535)..(1535): n is a, c, g, or t
  misc_feature (1539)..(1539): n is a, c, g, or t
  misc_feature (1570)..(1570): n is a, c, g, or t
  misc_feature (1574)..(1574): n is a, c, g, or t
  misc_feature (1577)..(1578): n is a, c, g, or t
  misc_feature (1580)..(1581): n is a, c, g, or t
  misc_feature (1589)..(1589): n is a, c, g, or t
  misc_feature (1592)..(1592): n is a, c, g, or t
  misc_feature (1598)..(1598): n is a, c, g, or t
  misc_feature (1602)..(1603): n is a, c, g, or t
  misc_feature (1610)..(1611): n is a, c, g, or t
  misc_feature (1613)..(1613): n is a, c, g, or t
  misc_feature (1616)..(1616): n is a, c, g, or t
  misc_feature (1623)..(1623): n is a, c, g, or t
  misc_feature (1633)..(1633): n is a, c, g, or t
  misc_feature (1663)..(1663): n is a, c, g, or t
  misc_feature (1665)..(1665): n is a, c, g, or t
  misc_feature (1675)..(1675): n is a, c, g, or t
  misc_feature (1681)..(1681): n is a, c, g, or t
  misc_feature (1688)..(1688): n is a, c, g, or t
  misc_feature (1701)..(1701): n is a, c, g, or t
ctgtagtcggacacactcccagctggcccagtttgtgcatgaggtgaagaagagcccctttggcaaggatgttcggctggtctcccttggctcccggcaggtaaacagtagccagtatttccaccaggggccatcctgctcctttcgccacaactttgtcctgctcgtccaggccttgggagacgctgggtctgtgacaggctgaaccgtgtgaggagcagccccctccctgacctggccggcccagcactggaaggcaaaggagaggtggcggggcaggtccacatgtgttggtaggatgtcatttagctggcaccatctttttgcctctttctttctcctttgctgcagaacctttgtgtaaatgaagacgtgaaaagcctaggttctgtgcagcttatcaacgaccgctgcgtggacatgcagagaagcaggcacggtagccactgggaccgtggtgtagccgcaggtggtctggagagagtgaggcaggggtggcagtgactgaagaccattaagtgtctttcatagaaagaatggcagaggagaccccagttccttcctgagtcccctctccttgggaaaaagtgttcctactctctgggtcagtgtctggtccgaatccttggcttggagatgattttacgggctctttctggagaacagaagtaaaaccttacagtgttccgatgagaccacagtaggcagtacttgggagggtcttatagaccccaccccacggaagtgggtctcaacattacacaaccccctcttgggcccgtggacagttgctgtcctctctgttttctctctttgtgcctgtgccaccctcagagaagaagaaaggagctgaggaggagaagccaaagaggaggaggcaggagaagcaggcagcctgccccttctacaaccacgagcagatgggccttctccgggatgaggccctggcagaggtgaaggacatggagcagctgctggcccttgggaaggaggcccgggcctgtccctattacgggagccgccttgccatccctgcagcccagctggtggtgctgccctatcagatgctgctgcatgcggccactcggcaggccgcgggcatccggctgcaggaccaggtggtgatcatcgacgaggcacacaacctgatcgacaccatcacgggcatgcacagcgtggaggtcagcggctcccagctctgccaggcccattcccagctgctgcagtacgtggagcgatacggcgtttgaaggccaagaacctgatgtacctgaagcagatcctgtatttgctggagaaattcgtggctgtgctagggggtgagagcctcgtccccctgctgaccccgggcctgcaaaactcgctgggctgctttttccttggatgcccatcaggacacctcagttctctgtgtttttaagaagggtcggctgggtgnggtgnctcacncctgtaatcccagcacttgggaggccnaggcaggtggntcacctgaggtcaggagtttnagaccagcctggccaacatggtgaaancccntctctactaaaaatacaaaaattagctgggngtgntgnngnngcctgtantcncagctnctcnngaggctnngncangagaatngcttgaaccngggaggcggaggttgcagtgagccgagatngngccactgcantccagnctgggcnacagagtgagacngtctcaaaaaaaaaaaaaaaaaaaaaaggccacagcatcgagtcggccttgttggcctactgggtttgccaatacctcagaaacaaatacctcggacaaatctttctctaaagacctcagtcagatactagtcaatatcaaatcatgtagatggcggcattttaggcctcggacaccatccctacatgacagtgacaatgatgaactctcctgtagaaaattatataggagtataaaccgaacaggaacagcacaacctgggacccagacatgcagtacctctacgcaaagtaaaagtagcagtggttcagcacactttgcatttacagccgaacaataccagcaacatcaacagcaactggcactcatgcagaaacagcagcttgcacaaattcagcaacagcaagcaaatagtaattcctccaccaacacatcacagggttttgtttctaagactttggattctgctagtgcacagtttgctgcttctgctttggtgacatcagaacaactgatgggattcaagatgaaggatgatgtggtgcttggaatcggggtgaatggcgtccttccagcctcaggagtatacaagggcttacacctcagtagtactacaccaacagcacttgtacatacaagtccatcaacggcaggttcagctttgttacagccttcaaatattacacagacttcaagttcccacagtgcactgagtcatcaagtaactgctgccaattctgcaacaactcaggttctgattgggaacaacattcgattaactgtaccttcatcagttgccactgtaaactctattgccccaataaatgcacgacatatacctaggactttaagtgctgttccatcatctgccttaaagctggccgctgcagcaaactgtcaagtttccaaggtcccatcttcatcctctgtagattcagttccaagggaaaatcatgaatcagaaaagccagcactgaacaacatagcagacaacacagtagcgatggaggtgacgtagcttcctccgagtggaactgcagcctggggacttgattaggtgctatgcatcagtagcattttgaatgcaagggatgatggaaagcagcacatgcgtttctgtggcagctgtggggacttgacagcaatgctcatctctcatgcttcaatttttcttttcttactgttaataggaaaaaaatcaacatctgtaaattaagaatacagcagatgaagtgtcatcacatcatgtgcatggtgcggaacctgctgttttatctatttattgtgccgtgtttacagttttttgtacactgtaccttcattggttcctgtgctgtagtaaatgtgttaggtagctgtggactccttggtattttgtaaatggtataacataacttggttcccctctgggtccttgagttttctgtgtatcatgtgaaaaaaaatggtgacatacatacagaattttacaaaaaaaaaaaaaaaaggcatcagtttttttaaaaatggggaatgtactattaaatggggatcttcctggtctactatcattaggacaagtaacaagctaaaaatgaagtctcttgaatctttccatccccaacttgcccacaaagctgtgggtggtttctggtacttaaagcactaatattatgttgctgctctgcgaacagcccagtagtcccatttccttccacaccaaaaagtgttaaatcaagtatgcaaatggagtccttacaactggagtttatgttgtcttgccctttttttagcacaaaaaaaattgtacttttttattgtcgaattgtttaaaagacttcattctttacttgttcttacgaaaaggatataagggagaagaatgcagtaattgctgtacgtgtatcatcattccagtttctaaaaacagccagccagcttttttccttttaagattctccagaaggctgcaaggccagaaccacaaatatcgggtgccttcctttggaaatatttgacctctcttctgtgaagagaatggtacttaacagactactactagtgctttgtcagtaccgaagtctgaatgcccagtccaatggcatacattatccttaaggtttttaatcccacctggaaaaattgtgatagaattctcacaaaataaacccagggcattacatgttgacaaac

SEQ ID NO: 350981 - DNA, 3850 bp, Homo sapiens
agcggggcgtgcccgcgccgctgcgcgatgcagtgtggggaatggctggggttggctgaagagcgcacagtggagttttaatgtccgccatgttggccatggcgtattgaagagagcgagcgagagaggagcggagcggcacagcctcccaccctcccggctggtgttagtgcccggacggcgggctctgcgctccgcccctcaagtccccggcagcggttggcgagtggggaccgaacccccggttctccatgatcccgctggccggggccgtttccccagagcggagaggtatctgctgcgcctgagatgagtaaactgtcgtttcgggcgcgggcgctagacgcctcgaagccgctgccggttttccgctgtgaggatctgcccgacctgcacgaatacgcctcgataaacagggccgtgccgcagatgcccaccggaatggagaaggaagaggagtcggaacatcatcttcagcgggctatttcagcacagcaggtgtatggcgagaagagggataatatggttataccggtcccagaggcagaaagtaatattgcttactatgagtctatatatcctggggaatttaagatgccaaagcagctcattcacatacagccttttagtttggatgctgaacagcctgattatgatttggattctgaagatgaagtatttgtgaataaactgaaaaagaaaatggacatctgcccattgcaatttgaggagatgattgaccgcctagaaaaaggcagtggtcagcagccagtcagtctgcaggaagccaaactactgctaaaagaagatgatgaactaattagagaagtttatgaatattggattaaaaagagaaaaaactgtcgagggccatctcttattccatcagtaaaacaagagaagcgagatggttccagcacaaatgatccttatgtggcttttagaaggcgtactgaaaaaatgcagactcgaaaaaatcgcaaaaatgatgaagcctcttacgaaaaaatgcttaagctgcgacgagatctaagtcgagctgttactattctagagatgataaaaagaagagaaaaaagtaaaagagagctattgcacttaacactggaaattatggaaaagaggtataatttgggcgactacaatggagagatcatgtctgaggttatggcacagagacagccaatgaaacctacttatgccatccccatcatccctattactaatagcagtcaatttaaacaccaggaagcaatggatgtgaaggagttcaaagttaataagcaagataaagccgatcttatccgaccgaaacggaaatatgaaaagaagcccaaagtcttaccatcgtctgccgctgctactccccaacagacgagtcctgctgcactgccagtcttcaatgctaaagatctgaatcagtatgactttcccagctcagacgaagaacctctctcccaggttttgtctggctcttcggaagctgaggaagacaatgatcctgatggtccttttgctttccgtaggaaagcaggctgtcagtactatgctcctcacttagaccaaactggcaactggccttggactagtcctaaagatggaggattaggggatgtgcgatatagatactgcttaactactctcaccgtaccccaaaggtgtattggatttgcacgaagacgggttgggcgcggtggaagggtcttactggacagagctcattcagactatgacagtgtgtttcaccatctggatttggaaatgctttcctcaccacaacattctccagtcaatcagtttgccaatacctcagaaacaaatacctcggacaaatctttctctaaagacctcagtcagatactagtcaatatcaaatcatgtagatggcggcattttaggcctcggacaccatccctacatgacagtgacaatgatgaactctcctgtagaaaattatataggagtataaaccgaacaggaacagcacaacctgggacccagacatgcagtacctctacgcaaagtaaaagtagcagtggttcagcacactttgcatttacagccgaacaataccagcaacatcaacagcaactggcactcatgcagaaacagcagcttgcacaaattcagcaacagcaagcaaatagtaattcctccaccaacacatcacagggttttgtttctaagactttggattctgctagtgcacagtttgctgcttctgctttggtgacatcagaacaactgatgggattcaagatgaaggatgatgtggtgcttggaatcggggtgaatggcgtccttccagcctcaggagtatacaagggcttacacctcagtagtactacaccaacagcacttgtacatacaagtccatcaacggcaggttcagctttgttacagccttcaaatattacacagacttcaagttcccacagtgcactgagtcatcaagtaactgctgccaattctgcaacaactcaggttctgattgggaacaacattcgattaactgtaccttcatcagttgccactgtaaactctattgccccaataaatgcacgacatatacctaggactttaagtgctgttccatcatctgccttaaagctggccgctgcagcaaactgtcaagtttccaaggtcccatcttcatcctctgtagattcagttccaagatctctcatgcttcaatttttcttttcttactgttaataggaaaaaaatcaacatctgtaaattaagaatacagcaattatctgtacagtactacagagttgtaatacccttgtatatatgttacttgaatacagaaatgttcatttgtgatgctttgcacttgggggtggggggtgggagggaaatcaattgcaacaaagagtgtgagatgtgagattgtatagagatgaagtgtcatcacatcatgtgcatggtgcggaacctgctgttttatctatttattgtgccgtgtttacagttttttgtacactgtaccttcattggttcctgtgctgtagtaaatgtgttaggtagctgtggactccttggtattttgtaaatggtataacataacttggttcccctctgggtccttgagttttctgtgtatcatgtgaaaaaaaatggtgacatacatacagaattttacaaaaaaaaaaaaaaaaggcatcagtttttttaaaaatggggaatgtactattaaatggggatcttcctggtctactatcattaggacaagtaacaagctaaaaatgaagtctcttgaatctttccatccccaacttgcccacaaagctgtgggtggtttctggtacttaaagcactaatattatgttgctgctctgcgaacagcccagtagtcccatttccttccacaccaaaaagtgttaaatcaagtatgcaaatggagtccttacaactggagtttatgttgtcttgccctttttttagcacaaaaaaaattgtacttttttattgtcgaattgtttaaaagacttcattctttacttgttcttacgaaaaggatataagggagaagaatgcagtaattgctgtacgtgtatcatcattccagtttctaaaaacagccagccagcttttttccttttaagattctccagaaggctgcaaggccagaaccacaaatatcgggtgccttcctttggaaatatttgacctctcttctgtgaagagaatggtacttaacagactactactagtgctttgtcagtaccgaagtctgaatgcccagtccaatggcatacattatccttaaggtttttaatcccacctggaaaaattgtgatagaattctcacaaaataaacccagggcattacatgttgacaaac

SEQ ID NO: 350982 - DNA, 1642 bp, Homo sapiens
ttctttgtttttaacatctaggttgcttgagtactactataattttgatggtaatgtagttgactgtggaatttatttatagtcaacattagcctgatttctgataataaactataaagattcgtattcctctacttgctagcttgttcccaaagagtccaatttcttcctgttaataaaaataaactttttgttgggaagataatgttcatttgctgaatatttatgttgtagataagtaattgattgaactttatttcaacagggaaaatcatgaatcagaaaagccagcactgaacaacatagcagacaacacagtagcgatggaggtgacgtagcttcctccgagtggaactgcagcctggggacttgattaggtgctatgcatcagtagcattttgaatgcaagggatgatggaaagcagcacatgcgtttctgtggcagctgtggggacttgacagcaatgctcatctctcatgcttcaatttttcttttcttactgttaataggaaaaaaatcaacatctgtaaattaagaatacagcaattatctgtacagtactacagagttgtaatacccttgtatatatgttacttgaatacagaaatgttcatttgtgatgctttgcacttgggggtggggggtgggagggaaatcaattgcaacaaagagtgtgagatgtgagattgtatagagatgaagtgtcatcacatcatgtgcatggtgcggaacctgctgttttatctatttattgtgccgtgtttacagttttttgtacactgtaccttcattggttcctgtgctgtagtaaatgtgttaggtagctgtggactccttggtattttgtaaatggtataacataacttggttcccctctgggtccttgagttttctgtgtatcatgtgaaaaaaaatggtgacatacatacagaattttacaaaaaaaaaaaaaaaaggcatcagtttttttaaaaatggggaatgtactattaaatggggatcttcctggtctactatcattaggacaagtaacaagctaaaaatgaagtctcttgaatctttccatccccaacttgcccacaaagctgtgggtggtttctggtacttaaagcactaatattatgttgctgctctgcgaacagcccagtagtcccatttccttccacaccaaaaagtgttaaatcaagtatgcaaatggagtccttacaactggagtttatgttgtcttgccctttttttagcacaaaaaaaattgtacttttttattgtcgaattgtttaaaagacttcattctttacttgttcttacgaaaaggatataagggagaagaatgcagtaattgctgtacgtgtatcatcattccagtttctaaaaacagccagccagcttttttccttttaagattctccagaaggctgcaaggccagaaccacaaatatcgggtgccttcctttggaaatatttgacctctcttctgtgaagagaatggtacttaacagactactactagtgctttgtcagtaccgaagtctgaatgcccagtccaatggcatacattatccttaaggtttttaatcccacctggaaaaattgtgatagaattctcacaaaataaacccagggcattacatgttgacaaac

SEQ ID NO: 350983 - DNA, 1152 bp, Homo sapiens
  misc_feature (258)..(258): n is a, c, g, or t
  misc_feature (266)..(266): n is a, c, g, or t
  misc_feature (269)..(269): n is a, c, g, or t
  misc_feature (271)..(271): n is a, c, g, or t
  misc_feature (312)..(313): n is a, c, g, or t
tggttctggcaagcccatgtgtgttagagcttccaaacctcccccttgctacatctccccttgcatctcacacccgagcgctccatctaccatccttctctctccctattccttacctgccttacgtcctcgtacccaaagaatttccccctagagtagccccttccaaatttattcctaggtttccatccttatccctcccccccccccatcttaagttgtggtttttccccaccaaggacaacccccgggaagaantttggggnttntngggggcccccctacacccccttttttattattgaagacaannccgtagtaaatgtgttaggtagctgtggactccttggtattttgtaaatggtataacataacttggttcccctctgggtccttgagttttctgtgtatcatgtgaaaaaaaatggtgacatacatacagaattttacaaaaaaaaaaaaaaaaggcatcagtttttttaaaaatggggaatgtactattaaatggggatcttcctggtctactatcattaggacaagtaacaagctaaaaatgaagtctcttgaatctttccatccccaacttgcccacaaagctgtgggtggtttctggtacttaaagcactaatattatgttgctgctctgcgaacagcccagtagtcccatttccttccacaccaaaaagtgttaaatcaagtatgcaaatggagtccttacaactggagtttatgttgtcttgccctttttttagcacaaaaaaaattgtacttttttattgtcgaattgtttaaaagacttcattctttacttgttcttacgaaaaggatataagggagaagaatgcagtaattgctgtacgtgtatcatcattccagtttctaaaaacagccagccagcttttttccttttaagattctccagaaggctgcaaggccagaaccacaaatatcgggtgccttcctttggaaatatttgacctctcttctgtgaagagaatggtacttaacagactactactagtgctttgtcagtaccgaagtctgaatgcccagtccaatggcatacattatccttaaggtttttaatcccacctggaaaaattgtgatagaattctcacaaaataaacccagggcattacatgttgacaaac

SEQ ID NO: 350984 - DNA, 2658 bp, Homo sapiens
agcggggcgtgcccgcgccgctgcgcgatgcagtgtggggaatggctggggttggctgaagagcgcacagtggagttttaatgtccgccatgttggccatggcgtattgaagagagcgagcgagagaggagcggagcggcacagcctcccaccctcccggctggtgttagtgcccggacggcgggctctgcgctccgcccctcaagtccccggcagcggttggcgagtggggaccgaacccccggttctccatgatcccgctggccggggccgtttccccagagcggagaggtatctgctgcgcctgagatgagtaaactgtcgtttcgggcgcgggcgctagacgcctcgaagccgctgccggttttccgctgtgaggatctgcccgacctgcacgaatacgcctcgataaacagggccgtgccgcagatgcccaccggaatggagaaggaagaggagtcggaacatcatcttcagcgggctatttcagcacagcaggtgtatggcgagaagagggataatatggttataccggtcccagaggcagaaagtaatattgcttactatgagtctatatatcctggggaatttaagatgccaaagcagctcattcacatacagccttttagtttggatgctgaacagcctgattatgatttggattctgaagatgaagtatttgtgaataaactgaaaaagaaaatggacatctgcccattgcaatttgaggagatgattgaccgcctagaaaaaggcagtggtcagcagccagtcagtctgcaggaagccaaactactgctaaaagaagatgatgaactaattagagaagtttatgaatattggattaaaaagagaaaaaactgtcgagggccatctcttattccatcagtaaaacaagagaagcgagatggttccagcacaaatgatccttatgtggcttttagaaggcgtactgaaaaaatgcagactcgaaaaaatcgcaaaaatgatgaagcctcttacgaaaaaatgcttaagctgcgacgagatctaagtcgagctgttactattctagagatgataaaaagaagagaaaaaagtaaaagagagctattgcacttaacactggaaattatggaaaagaggtataatttgggcgactacaatggagagatcatgtctgaggttatggcacagagacagccaatgaaacctacttatgccatccccatcatccctattactaatagcagtcaatttaaacaccaggaagcaatggatgtgaaggagttcaaagttaataagcaagataaagccgatcttatccgaccgaaacggaaatatgaaaagaagcccaaagtcttaccatcgtctgccgctgctactccccaacagacgagtcctgctgcactgccagtcttcaatgctaaagatctgaatcagtatgactttcccagctcagacgaagaacctctctcccaggttttgtctggctcttcggaagctgaggaagacaatgatcctgatggtccttttgctttccgtaggaaagcaggctgtcagtactatgctcctcacttagaccaaactggcaactggccttggactagtcctaaagatggaggattaggggatgtgcgatatagatactgcttaactactctcaccgtaccccaaaggtgtattggatttgcacgaagacgggttgggcgcggtggaagggtcttactggacagagctcattcagactatgacagtgtgtttcaccatctggatttggaaatgctttcctcaccacaacattctccagtcaatcagtttgccaatacctcagaaacaaatacctcggacaaatctttctctaaagacctcagtcagatactagtcaatatcaaatcatgtagatggcggcattttaggcctcggacaccatccctacatgacagtgacaatgatgaactctcctgtagaaaattatataggagtataaaccgaacaggaacagcacaacctgggacccagacatgcagtacctctacgcaaagtaaaagtagcagtggttcagcacactttggtatgttgactgttaatgatgtacgtttctatagaaatgtcaggtccaaccatttcccatttgttcgactatgtggtctgttacatttatggcttaaagtccttttctcttaaacagttaaaaaaaaaatcttggtctaagtatttatttgaatcctgttgctataggagtttgtatgtgtgtgtcttcatttaaacatacctgcatacaaagatggtttatttctatttaatatgtgacatttgtttcctggatatagtccgtgaaccacaagatttatcatatttttcaataatatgagaagaaaatgggccgtaaattgttaaccattttatgttcagatatttctctagtttttacctagtttgctttaacatagagaccagcaagtgaatatatatgcataaccttatatgttgacacaataattcagaataatttgttaaagataaactaatttttcagagaagaacatttaaagggttaatatttttgaaacgttttcagataatatctatttgattattgtggcttctatttgaaatgtgtctaaaataaatgctgtttatttaaaatattcctataatcttagctgtctgttttaa

SEQ ID NO: 350985 - DNA, 449 bp, Homo sapiens
cctttttttagcacaaaaaaaattgtacttttttattgtcgaattgtttaaaagacttcattctttacttgttcttacgaaaaggatataagggagaagaatgcagtaattgctgtacgtgtatcatcattccagtttctaaaaacagccagccagcttttttccttttaagattctccagaaggctgcaaggccagaaccacaaatatcgggtgccttcctttggaaatatttgacctctcttctgtgaagagaatggtacttaacagactactactagtgctttgtcagtaccgaagtctgaatgcccagtccaatggcatacattatccttaaggtttttaatcccacctggaaaaattgtgatagaattctcacaaaataaacccagggcattacatgttgacaaactaatgtgtagtggtcttttgcttttgttttcaacccaa

SEQ ID NO: 350986 - DNA, 915 bp, Homo sapiens
agcggggcgtgcccgcgccgctgcgcgatgcagtgtggggaatggctggggttggctgaagagcgcacagtggagttttaatgtccgccatgttggccatggcgtattgaagagagcgagcgagagaggagcggagcggcacagcctcccaccctcccggctggtgttagtgcccggacggcgggctctgcgctccgcccctcaagtccccggcagcggttggcgagtggggaccgaacccccggttctccatgatcccgctggccggggccgtttccccagagcggagaggtatctgctgcgcctgagatgagtaaactgtcgtttcgggcgcgggcgctagacgcctcgaagccgctgccggttttccgctgtgaggatctgcccgacctgcacgaatacgcctcgataaacagggccgtgccgcagatgcccaccggaatggagaaggaagaggagtcggtacagccatttaaacagggtgcagtgtattgacagttcaaggaagtccaggagtcgcgtggatttgtgtgctacaattttgttgtggaaaattgtactgtaatacttctcttggtactgtaagaatttttaatgtagaaattatgctctgtaatgttgtttttggaaataaaactgtttaaactctttgggttgtttaaccttttaaagtgaaatagctgtgacagtgaaatgttacttttgagagtagtgtcttaaatctaactttacagataagccaagtgtatgtagtagctcagattgtctagttgggcactgactttcagcacattgtctcatgagacactacctcttaatttattttacttgtatcaactttagagtagcatggccatttgtttattttttaataagtgatttgtttttaaaaattaaagtacttgtgactgcaaa

SEQ ID NO: 350987 - DNA, 976 bp, Homo sapiens
agcggggcgtgcccgcgccgctgcgcgatgcagtgtggggaatggctggggttggctgaagagcgcacagtggagttttaatgtccgccatgttggccatggcgtattgaagagagcgagcgagagaggagcggagcggcacagcctcccaccctcccggctggtgttagtgcccggacggcgggctctgcgctccgcccctcaagtccccggcagcggttggcgagtggggaccgaacccccggttctccatgatcccgctggccggggccgtttccccagagcggagaggtatctgctgcgcctgagatgagtaaactgtcgtttcgggcgcgggcgctagacgcctcgaagccgctgccggttttccgctgtgaggatctgcccgacctgcacgaatacgcctcgataaacagggccgtgccgcagatgcccaccggaatggagaaggaagaggagtcgatccttgacagtataacttgatgacttctaatcctaaggaattgcataccttggttttcaggtacagccatttaaacagggtgcagtgtattgacagttcaaggaagtccaggagtcgcgtggatttgtgtgctacaattttgttgtggaaaattgtactgtaatacttctcttggtactgtaagaatttttaatgtagaaattatgctctgtaatgttgtttttggaaataaaactgtttaaactctttgggttgtttaaccttttaaagtgaaatagctgtgacagtgaaatgttacttttgagagtagtgtcttaaatctaactttacagataagccaagtgtatgtagtagctcagattgtctagttgggcactgactttcagcacattgtctcatgagacactacctcttaatttattttacttgtatcaactttagagtagcatggccatttgtttattttttaataagtgatttgtttttaaaaattaaagtacttgtgactgcaaa

SEQ ID NO: 350988 - DNA, 870 bp, Homo sapiens
agcggggcgtgcccgcgccgctgcgcgatgcagtgtggggaatggctggggttggctgaagagcgcacagtggagttttaatgtccgccatgttggccatggcgtattgaagagagcgagcgagagaggagcggagcggcacagcctcccaccctcccggctggtgttagtgcccggacggcgggctctgcgctccgcccctcaagtccccggcagcggttggcgagtggggaccgaacccccggttctccatgatcccgctggccggggccgtttccccagagcggagaggtatctgctgcgcctgagatgagtaaactgtcgtttcgggcgcgggcgctagacgcctcgaagccgctgccggttttccgctgtgaggatctgcccgacctgcacgaatacgcctcgataaacagggccgtgccgcagatgcccaccggaatggagaaggaagaggagtcggtacgtgttaactcccctgtccgacccaccgtcaggcccgctccctctgctgcctgcggcggcggcggagcagcaaacccacacaaaatggccgccatcttctcttcgccgccgactctcagtcgccggccgggcctataccccgcctcccccagcctcgacccccggccgccgcggcccagcggggccccttctaaggccacccgctgaccctggccacttgtacccgggtcccgcggagttcgggggcccgaaaggcacaaaggggtcacgtgacgaagctgccggcagccattttgtgtcttagttcttgggttgggccttgtgcatccggagaggggaacgggctgggtggctgtgggggtgcggcgagtcgggagccgtggaggacccgcctacaggcctctc

SEQ ID NO: 350989 - DNA, 4182 bp, Homo sapiens
agcggggcgtgcccgcgccgctgcgcgatgcagtgtggggaatggctggggttggctgaagagcgcacagtggagttttaatgtccgccatgttggccatggcgtattgaagagagcgagcgagagaggagcggagcggcacagcctcccaccctcccggctggtgttagtgcccggacggcgggctctgcgctccgcccctcaagtccccggcagcggttggcgagtggggaccgaacccccggttctccatgatcccgctggccggggccgtttccccagagcggagaggtatctgctgcgcctgagatgagtaaactgtcgtttcgggcgcgggcgctagacgcctcgaagccgctgccggttttccgctgtgaggatctgcccgacctgcacgaatacgcctcgataaacagggccgtgccgcagatgcccaccggaatggagaaggaagaggagtcggaacatcatcttcagcgggctatttcagcacagcaggtgtatggcgagaagagggataatatggttataccggtcccagaggcagaaagtaatattgcttactatgagtctatatatcctggggaatttaagatgccaaagcagctcattcacatacagccttttagtttggatgctgaacagcctgattatgatttggattctgaagatgaagtatttgtgaataaactgaaaaagaaaatggacatctgcccattgcaatttgaggagatgattgaccgcctagaaaaaggcagtggtcagcagccagtcagtctgcaggaagccaaactactgctaaaagaagatgatgaactaattagagaagtttatgaatattggattaaaaagagaaaaaactgtcgagggccatctcttattccatcagtaaaacaagagaagcgagatggttccagcacaaatgatccttatgtggcttttagaaggcgtactgaaaaaatgcagactcgaaaaaatcgcaaaaatgatgaagcctcttacgaaaaaatgcttaagctgcgacgagatctaagtcgagctgttactattctagagatgataaaaagaagagaaaaaagtaaaagagagctattgcacttaacactggaaattatggaaaagaggtataatttgggcgactacaatggagagatcatgtctgaggttatggcacagagacagccaatgaaacctacttatgccatccccatcatccctattactaatagcagtcaatttaaacaccaggaagcaatggatgtgaaggagttcaaagttaataagcaagataaagccgatcttatccgaccgaaacggaaatatgaaaagaagcccaaagtcttaccatcgtctgccgctgctactccccaacagacgagtcctgctgcactgccagtcttcaatgctaaagatctgaatcagtatgactttcccagctcagacgaagaacctctctcccaggttttgtctggctcttcggaagctgaggaagacaatgatcctgatggtccttttgctttccgtaggaaagcaggctgtcagtactatgctcctcacttagaccaaactggcaactggccttggactagtcctaaagatggaggattaggggatgtgcgatatagatactgcttaactactctcaccgtaccccaaaggtgtattggatttgcacgaagacgggttgggcgcggtggaagggtcttactggacagagctcattcagactatgacagtgtgtttcaccatctggatttggaaatgctttcctcaccacaacattctccagtcaatcagtttgccaatacctcagaaacaaatacctcggacaaatctttctctaaagacctcagtcagatactagtcaatatcaaatcatgtagatggcggcattttaggcctcggacaccatccctacatgacagtgacaatgatgaactctcctgtagaaaattatataggagtataaaccgaacaggaacagcacaacctgggacccagacatgcagtacctctacgcaaagtaaaagtagcagtggttcagcacactttgcatttacagccgaacaataccagcaacatcaacagcaactggcactcatgcagaaacagcagcttgcacaaattcagcaacagcaagcaaatagtaattcctccaccaacacatcacagaaccttgcatctaaccagcagaaaagtggctttcgcctgaatatacagggtttagaaagaacactacagggttttgtttctaagactttggattctgctagtgcacagtttgctgcttctgctttggtgacatcagaacaactgatgggattcaagatgaaggatgatgtggtgcttggaatcggggtgaatggcgtccttccagcctcaggagtatacaagggcttacacctcagtagtactacaccaacagcacttgtacatacaagtccatcaacggcaggttcagctttgttacagccttcaaatattacacagacttcaagttcccacagtgcactgagtcatcaagtaactgctgccaattctgcaacaactcaggttctgattgggaacaacattcgattaactgtaccttcatcagttgccactgtaaactctattgccccaataaatgcacgacatatacctaggactttaagtgctgttccatcatctgccttaaagctggccgctgcagcaaactgtcaagtttccaaggtcccatcttcatcctctgtagattcagttccaagggaaaatcatgaatcagaaaagccagcactgaacaacatagcagacaacacagtagcgatggaggtgacgtagcttcctccgagtggaactgcagcctggggacttgattaggtgctatgcatcagtagcattttgaatgcaagggatgatggaaagcagcacatgcgtttctgtggcagctgtggggacttgacagcaatgctcatctctcatgcttcaatttttcttttcttactgttaataggaaaaaaatcaacatctgtaaattaagaatacagcaattatctgtacagtactacagagttgtaatacccttgtatatatgttacttgaatacagaaatgttcatttgtgatgctttgcacttgggggtggggggtgggagggaaatcaattgcaacaaagagtgtgagatgtgagattgtatagagatgaagtgtcatcacatcatgtgcatggtgcggaacctgctgttttatctatttattgtgccgtgtttacagttttttgtacactgtaccttcattggttcctgtgctgtagtaaatgtgttaggtagctgtggactccttggtattttgtaaatggtataacataacttggttcccctctgggtccttgagttttctgtgtatcatgtgaaaaaaaatggtgacatacatacagaattttacaaaaaaaaaaaaaaaaggcatcagtttttttaaaaatggggaatgtactattaaatggggatcttcctggtctactatcattaggacaagtaacaagctaaaaatgaagtctcttgaatctttccatccccaacttgcccacaaagctgtgggtggtttctggtacttaaagcactaatattatgttgctgctctgcgaacagcccagtagtcccatttccttccacaccaaaaagtgttaaatcaagtatgcaaatggagtccttacaactggagtttatgttgtcttgccctttttttagcacaaaaaaaattgtacttttttattgtcgaattgtttaaaagacttcattctttacttgttcttacgaaaaggatataagggagaagaatgcagtaattgctgtacgtgtatcatcattccagtttctaaaaacagccagccagcttttttccttttaagattctccagaaggctgcaaggccagaaccacaaatatcgggtgccttcctttggaaatatttgacctctcttctgtgaagagaatggtacttaacagactactactagtgctttgtcagtaccgaagtctgaatgcccagtccaatggcatacattatccttaaggtttttaatcccacctggaaaaattgtgatagaattctcacaaaataaacccagggcattacatgttgacaaacaaaaaaaacacaaagggagaccgaagggacaagacacacaaatacgacacagggccaa

SEQ ID NO: 350990 - DNA, 3658 bp, Homo sapiens
ctgactcttgaggatccacgtacagttcggcagatgcccaccgtaatgcagaaggaagaggagtcgaacatcatcttcagcgggctatttcagcacagcaggtgtatggcgagaagagggataatatggttataccggtcccagaggcagaaagtaatattgcttactatgagtctatatatcctggggaatttaagatgccaaagcagctcattcacatacagccttttagtttggatgctgaacagcctgattatgatttggattctgaagatgaagtatttgtgaataaactgaaaaagaaaatggacatctgcccattgcaatttgaggagatgattgaccgcctagaaaaaggcagtggtcagcagccagtcagtctgcaggaagccaaactactgctaaaagaagatgatgaactaattagagaagtttatgaatattggattaaaaagagaaaaaactgtcgagggccatctcttattccatcagtaaaacaagagaagcgagatggttccagcacaaatgatccttatgtggcttttagaaggcgtactgaaaaaatgcagactcgaaaaaatcgcaaaaatgatgaagcctcttacgaaaaaatgcttaagctgcgacgagatctaagtcgagctgttactattctagagatgataaaaagaagagaaaaaagtaaaagagagctattgcacttaacactggaaattatggaaaagaggtataatttgggcgactacaatggagagatcatgtctgaggttatggcacagagacagccaatgaaacctacttatgccatccccatcatccctattactaatagcagtcaatttaaacaccaggaagcaatggatgtgaaggagttcaaagttaataagcaagataaagccgatcttatccgaccgaaacggaaatatgaaaagaagcccaaagtcttaccatcgtctgccgctgctactccccaacagacgagtcctgctgcactgccagtcttcaatgctaaagatctgaatcagtatgactttcccagctcagacgaagaacctctctcccaggttttgtctggctcttcggaagctgaggaagacaatgatcctgatggtccttttgctttccgtaggaaagcaggctgtcagtactatgctcctcacttagaccaaactggcaactggccttggactagtcctaaagatggaggattaggggatgtgcgatatagatactgcttaactactctcaccgtaccccaaaggtgtattggatttgcacgaagacgggttgggcgcggtggaagggtcttactggacagagctcattcagactatgacagtgtgtttcaccatctggatttggaaatgctttcctcaccacaacattctccagtcaatcagtttgccaatacctcagaaacaaatacctcggacaaatctttctctaaagacctcagtcagatactagtcaatatcaaatcatgtagatggcggcattttaggcctcggacaccatccctacatgacagtgacaatgatgaactctcctgtagaaaattatataggagtataaaccgaacaggaacagcacaacctgggacccagacatgcagtacctctacgcaaagtaaaagtagcagtggttcagcacactttgcatttacagccgaacaataccagcaacatcaacagcaactggcactcatgcagaaacagcagcttgcacaaattcagcaacagcaagcaaatagtaattcctccaccaacacatcacagggttttgtttctaagactttggattctgctagtgcacagtttgctgcttctgctttggtgacatcagaacaactgatgggattcaagatgaaggatgatgtggtgcttggaatcggggtgaatggcgtccttccagcctcaggagtatacaagggcttacacctcagtagtactacaccaacagcacttgtacatacaagtccatcaacggcaggttcagctttgttacagccttcaaatattacacagacttcaagttcccacagtgcactgagtcatcaagtaactgctgccaattctgcaacaactcaggttctgattgggaacaacattcgattaactgtaccttcatcagttgccactgtaaactctattgccccaataaatgcacgacatatacctaggactttaagtgctgttccatcatctgccttaaagctggccgctgcagcaaactgtcaagtttccaaggtcccatcttcatcctctgtagattcagttccaagggaaaatcatgaatcagaaaagccagcactgaacaacatagcagacaacacagtagcgatggaggtgacgtagcttcctccgagtggaactgcagcctggggacttgattaggtgctatgcatcagtagcattttgaatgcaagggatgatggaaagcagcacatgcgtttctgtggcagctgtggggacttgacagcaatgctcatctctcatgcttcaatttttcttttcttactgttaataggaaaaaaatcaacatctgtaaattaagaatacagcaattatctgtacagtactacagagttgtaatacccttgtatatatgttacttgaatacagaaatgttcatttgtgatgctttgcacttgggggtggggggtgggagggaaatcaattgcaacaaagagtgtgagatgtgagattgtatagagatgaagtgtcatcacatcatgtgcatggtgcggaacctgctgttttatctatttattgtgccgtgtttacagttttttgtacactgtaccttcattggttcctgtgctgtagtaaatgtgttaggtagctgtggactccttggtattttgtaaatggtataacataacttggttcccctctgggtccttgagttttctgtgtatcatgtgaaaaaaaatggtgacatacatacagaattttacaaaaaaaaaaaaaaaaggcatcagtttttttaaaaatggggaatgtactattaaatggggatcttcctggtctactatcattaggacaagtaacaagctaaaaatgaagtctcttgaatctttccatccccaacttgcccacaaagctgtgggtggtttctggtacttaaagcactaatattatgttgctgctctgcgaacagcccagtagtcccatttccttccacaccaaaaagtgttaaatcaagtatgcaaatggagtccttacaactggagtttatgttgtcttgccctttttttagcacaaaaaaaattgtacttttttattgtcgaattgtttaaaagacttcattctttacttgttcttacgaaaaggatataagggagaagaatgcagtaattgctgtacgtgtatcatcattccagtttctaaaaacagccagccagcttttttccttttaagattctccagaaggctgcaaggccagaaccacaaatatcgggtgccttcctttggaaatatttgacctctcttctgtgaagagaatggtacttaacagactactactagtgctttgtcagtaccgaagtctgaatgcccagtccaatggcatacattatccttaaggtttttaatcccacctggaaaaattgtgatagaattctcacaaaataaacccagggcattacatgttgacaaac

SEQ ID NO: 350991 - DNA, 3081 bp, Homo sapiens
agcggggcgtgcccgcgccgctgcgcgatgcagtgtggggaatggctggggttggctgaagagcgcacagtggagttttaatgtccgccatgttggccatggcgtattgaagagagcgagcgagagaggagcggagcggcacagcctcccaccctcccggctggtgttagtgcccggacggcgggctctgcgctccgcccctcaagtccccggcagcggttggcgagtggggaccgaacccccggttctccatgatcccgctggccggggccgtttccccagagcggagaggtatctgctgcgcctgagatgagtaaactgtcgtttcgggcgcgggcgctagacgcctcgaagccgctgccggttttccgctgtgaggatctgcccgacctgcacgaatacgcctcgataaacagggccgtgccgcagatgcccaccggaatggagaaggaagaggagtcggaacatcatcttcagcgggctatttcagcacagcaggtgtatggcgagaagagggataatatggttataccggtcccagaggcagaaagtaatattgcttactatgagtctatatatcctggggaatttaagatgccaaagcagctcattcacatacagccttttagtttggatgctgaacagcctgattatgatttggattctgaagatgaagtatttgtgaataaactgaaaaagaaaatggacatctgcccattgcaatttgaggagatgattgaccgcctagaaaaaggcagtggtcagcagccagtcagtctgcaggaagccaaactactgctaaaagaagatgatgaactaattagagaagtttatgaatattggattaaaaagagaaaaaactgtcgagggccatctcttattccatcagtaaaacaagagaagcgagatggttccagcacaaatgatccttatgtggcttttagaaggcgtactgaaaaaatgcagactcgaaaaaatcgcaaaaatgatgaagcctcttacgaaaaaatgcttaagctgcgacgagatctaagtcgagctgttactattctagagatgataaaaagaagagaaaaaagtaaaagagagctattgcacttaacactggaaattatggaaaagaggtataatttgggcgactacaatggagagatcatgtctgaggttatggcacagagacagccaatgaaacctacttatgccatccccatcatccctattactaatagcagtcaatttaaacaccaggaagcaatggatgtgaaggagttcaaagttaataagcaagataaagccgatcttatccgaccgaaacggaaatatgaaaagaagcccaaagtcttaccatcgtctgccgctgctactccccaacagacgagtcctgctgcactgccagtcttcaatgctaaagatctgaatcagtatgactttcccagctcagacgaagaacctctctcccaggttttgtctggctcttcggaagctgaggaagacaatgatcctgatggtccttttgctttccgtaggaaagcaggctgtcagtactatgctcctcacttagaccaaactggcaactggccttggactagtcctaaagatggaggattaggggatgtgcgatatagatactgcttaactactctcaccgtaccccaaaggtgtattggatttgcacgaagacgggttgggcgcggtggaagggtcttactggacagagctcattcagactatgacagtgtgtttcaccatctggatttggaaatgctttcctcaccacaacattctccagtcaatcagtttgccaatacctcagaaacaaatacctcggacaaatctttctctaaagacctcagtcagatactagtcaatatcaaatcatgtagatggcggcattttaggcctcggacaccatccctacatgacagtgacaatgatgaactctcctgtagaaaattatataggagtataaaccgaacaggaacagcacaacctgggacccagacatgcagtacctctacgcaaagtaaaagtagcagtggttcagcacactttgcatttacagccgaacaataccagcaacatcaacagcaactggcactcatgcagaaacagcagcttgcacaaattcagcaacagcaagcaaatagtaattcctccaccaacacatcacagaaccttgcatctaaccagcagaaaagtggctttcgcctgaatatacagggtttagaaagaacactacagggttttgtttctaagactttggattctgctagtgcacagtttgctgcttctgctttggtgacatcagaacaactgatgggattcaagatgaaggatgatgtggtgcttggaatcggggtgaatggcgtccttccagcctcaggagtatacaagggcttacacctcagtagtactacaccaacagcacttgtacatacaagtccatcaacggcaggttcagctttgttacagccttcaaatattacacagacttcaagttcccacagtgcactgagtcatcaagtaactgctgccaattctgcaacaactcaggttctgattgggaacaacattcgattaactgtaccttcatcagttgccactgtaaactctattgccccaataaatgcacgacatatacctaggactttaagtgctgttccatcatctgccttaaagctggccgctgcagcaaactgtcaagtttccaaggtcccatcttcatcctctgtagattcagttccaagggaaaatcatgaatcagaaaagccagcactgaacaacatagcagacaacacagtagcgatggaggtgacgtagcttcctccgagtggaactgcagcctggggacttgattaggtgctatgcatcagtagcattttgaatgcaagggatgatggaaagcagcacatgcgtttctgtggcagctgtggggacttgacagcaatgctcatctctcatgcttcaatttttcttttcttactgctgcccacaggcacgttcataaatggcttgcggaacaatgaaatgagacttgcgttggggttcataagtgacaagcacttccatgtagcatttatc

SEQ ID NO: 350992 - DNA, 2992 bp, Homo sapiens
agcggggcgtgcccgcgccgctgcgcgatgcagtgtggggaatggctggggttggctgaagagcgcacagtggagttttaatgtccgccatgttggccatggcgtattgaagagagcgagcgagagaggagcggagcggcacagcctcccaccctcccggctggtgttagtgcccggacggcgggctctgcgctccgcccctcaagtccccggcagcggttggcgagtggggaccgaacccccggttctccatgatcccgctggccggggccgtttccccagagcggagaggtatctgctgcgcctgagatgagtaaactgtcgtttcgggcgcgggcgctagacgcctcgaagccgctgccggttttccgctgtgaggatctgcccgacctgcacgaatacgcctcgataaacagggccgtgccgcagatgcccaccggaatggagaaggaagaggagtcggaacatcatcttcagcgggctatttcagcacagcaggtgtatggcgagaagagggataatatggttataccggtcccagaggcagaaagtaatattgcttactatgagtctatatatcctggggaatttaagatgccaaagcagctcattcacatacagccttttagtttggatgctgaacagcctgattatgatttggattctgaagatgaagtatttgtgaataaactgaaaaagaaaatggacatctgcccattgcaatttgaggagatgattgaccgcctagaaaaaggcagtggtcagcagccagtcagtctgcaggaagccaaactactgctaaaagaagatgatgaactaattagagaagtttatgaatattggattaaaaagagaaaaaactgtcgagggccatctcttattccatcagtaaaacaagagaagcgagatggttccagcacaaatgatccttatgtggcttttagaaggcgtactgaaaaaatgcagactcgaaaaaatcgcaaaaatgatgaagcctcttacgaaaaaatgcttaagctgcgacgagatctaagtcgagctgttactattctagagatgataaaaagaagagaaaaaagtaaaagagagctattgcacttaacactggaaattatggaaaagaggtataatttgggcgactacaatggagagatcatgtctgaggttatggcacagagacagccaatgaaacctacttatgccatccccatcatccctattactaatagcagtcaatttaaacaccaggaagcaatggatgtgaaggagttcaaagttaataagcaagataaagccgatcttatccgaccgaaacggaaatatgaaaagaagcccaaagtcttaccatcgtctgccgctgctactccccaacagacgagtcctgctgcactgccagtcttcaatgctaaagatctgaatcagtatgactttcccagctcagacgaagaacctctctcccaggttttgtctggctcttcggaagctgaggaagacaatgatcctgatggtccttttgctttccgtaggaaagcaggctgtcagtactatgctcctcacttagaccaaactggcaactggccttggactagtcctaaagatggaggattaggggatgtgcgatatagatactgcttaactactctcaccgtaccccaaaggtgtattggatttgcacgaagacgggttgggcgcggtggaagggtcttactggacagagctcattcagactatgacagtgtgtttcaccatctggatttggaaatgctttcctcaccacaacattctccagtcaatcagtttgccaatacctcagaaacaaatacctcggacaaatctttctctaaagacctcagtcagatactagtcaatatcaaatcatgtagatggcggcattttaggcctcggacaccatccctacatgacagtgacaatgatgaactctcctgtagaaaattatataggagtataaaccgaacaggaacagcacaacctgggacccagacatgcagtacctctacgcaaagtaaaagtagcagtggttcagcacactttgcatttacagccgaacaataccagcaacatcaacagcaactggcactcatgcagaaacagcagcttgcacaaattcagcaacagcaagcaaatagtaattcctccaccaacacatcacagaaccttgcatctaaccagcagaaaagtggctttcgcctgaatatacagggtttagaaagaacactacagggttttgtttctaagactttggattctgctagtgcacagtttgctgcttctgctttggtgacatcagaacaactgatgggattcaagatgaaggatgatgtggtgcttggaatcggggtgaatggcgtccttccagcctcaggagtatacaagggcttacacctcagtagtactacaccaacagcacttgtacatacaagtccatcaacggcaggttcagctttgttacagccttcaaatattacacagacttcaagttcccacagtgcactgagtcatcaagtaactgctgccaattctgcaacaactcaggttctgattgggaacaacattcgattaactgtaccttcatcagttgccactgtaaactctattgccccaataaatgcacgacatatacctaggactttaagtgctgttccatcatctgccttaaagctggccgctgcagcaaactgtcaagtttccaaggtcccatcttcatcctctgtagattcagttccaagggaaaatcatgaatcagaaaagccagcactgaacaacatagcagacaacacagtagcgatggaggtgacgtagcttcctccgagtggaactgcagcctggggacttgattaggtgctatgcatcagtagcattttgaatgcaagggatgatggaaagcagcacatgcgtgtaacacgacagcccagtgagaaccggacatcacggttaaagctgtatgctgagtgtaacacgacggcacagtgaa

SEQ ID NO: 350993 - DNA, 1536 bp, Homo sapiens
agcggggcgtgcccgcgccgctgcgcgatgcagtgtggggaatggctggggttggctgaagagcgcacagtggagttttaatgtccgccatgttggccatggcgtattgaagagagcgagcgagagaggagcggagcggcacagcctcccaccctcccggctggtgttagtgcccggacggcgggctctgcgctccgcccctcaagtccccggcagcggttggcgagtggggaccgaacccccggttctccatgatcccgctggccggggccgtttccccagagcggagaggtatctgctgcgcctgagatgagtaaactgtcgtttcgggcgcgggcgctagacgcctcgaagccgctgccggttttccgctgtgaggatctgcccgacctgcacgaatacgcctcgataaacagggccgtgccgcagatgcccaccggaatggagaaggaagaggagtcggaacatcatcttcagcgggctatttcagcacagcaggtgtatggcgagaagagggataatatggttataccggtcccagaggcagaaagtaatattgcttactatgagtctatatatcctggggaatttaagatgccaaagcagctcattcacatacagccttttagtttggatgctgaacagcctgattatgatttggattctgaagatgaagtatttgtgaataaactgaaaaagaaaatggacatctgcccattgcaatttgaggagatgattgaccgcctagaaaaaggcagtggtcagcagccagtcagtctgcaggaagccaaactactgctaaaagaagatgatgaactaattagagaagtttatgaatattggattaaaaagagaaaaaactgtcgagggccatctcttattccatcagtaaaacaagagaagcgagatggttccagcacaaatgatccttatgtggcttttagaaggcgtactgaaaaaatgcagactcgaaaaaatcgcaaaaatgatgaagcctcttacgaaaaaatgcttaagctgcgacgagatctaagtcgagctgttactattctagagatgataaaaagaagagaaaaaagtaaaagagagctattgcacttaacactggaaattatggaaaagaggtaatgtatattttaataatgttagaggaagtatagtgccattaacattttgtatattgagttaatttatttcctatgcaataatctaattacagaaatatctttttttaataatagagactttaaatatgtggtatgatactttttatacttttacatgttttcctctattttctttaaaagtgactggattcacttaagttaaaacataccaagtatttccatttcaaagtggtcttttttggtccttgagttgcatgtaggacttgagttaattgatagtactgcttcttttttaatgcatataaaatttaaaacactggattgttaaatagaaaagggtaaagaaagagggagaaaggcccatatatcttaccactcaagcatttggcaaggtacacaatgaaaactt

SEQ ID NO: 350994 - DNA, 1795 bp, Homo sapiens
ggcccgggagtctgggcaatacagttttgtgctcactgggtgaagaggctgacttagggcggggaaaggagggagccaggctggatctctttccgcagctctcctcacgttcccctctagtcccggcgcggcgctgctgcccaggggactggcctatcctcggccaatccgctgggtccttattgcctgttgggcccctagtgcgaatcagtcccgccagagacccttgacgggcatactgtttcctccgggctcctgcctcatgaggggagagaatggcgccattttgcggtacggaagctacacagcaacacgtataggagactctccccgagatcttctagggagtgacccatctatttttgtttgggaagaggaaactccgaaatgggatcgcggaagacttaaagggccaggctgatttttttttcctactgcaggtctctgaggctgtggttgctacagggtcaccacgagcttggcttacttgtctcatccttcccttgcctggtatcattttctcagttctcccaaaagccatgtcccggcccttgctcatcaccttcaccccagccactgaccccagcgacctctggaaggatgggcagcagcagccacagcccgagaagccagagtccaccctggatggggctgcagcccgagctttctatgaggccctgattggggatgagagcagcgctcctgactcccagagatctcagactgaacctgccagagaaagaaagagaaagaaaagaagaataatgaaggcaccagcagcagaagcagtggcagaaggagcatcaggaagacatggacaagggagatcccttgaggctgaggataagatgactcaccggatactgagggcagcccaggagggggacctgccagaacttaggagactgctggaaccgcatgaggcaggaggagctggggggaatatcaacgcccgggatgccttctggtggaccccactgatgtgtgctgctcgagcgggccagggggcagctgtgagctatctcctgggccgtggggctgcctgggtgggggtctgtgagctgagtggcagggatgcggctcagctcgctgaagaagctggcttccctgaggtagcccgcatggtcagggagagccatggagagacaaggagcccggaaaaccggtctcctactccctccctccagtactgcgagaactgtgacacccacttccaagattccaaccaccgcacatccactgctcacctgctgtcactgtcgcagggtcctcagcctcccaaccttccacttggggtgcccatctccagcccgggcttcaaactgctgctgagggggggctgggagccaggaatggggctgggaccccggggtgagggccgtgccaatcccatccccactgtcctcaagagggaccaggaaggactaggctacagatcagcaccccagccccgagtgacacatttcccagcttgggatacccgagctgtggctgggagggagagaccccctcgggtggccacactgagctggagggaggagagaaggagggaggagaaagacagggcttgggagcgggatctaaggacttacatgaacctcgagttctgactttggtaaagtctgaccctagtctgctgctgaagtctgaacttgggcctctgacctgggccctttgacttccccttcctgggatctgctcagatgcagatcctgaagtttttggtcaataggctctgtcttcgtgagagacgggctgagagtcagaaataaatcaaccatttgtggtttattca

SEQ ID NO: 350995 - DNA, 2677 bp, Homo sapiens
ggcccgggagtctgggcaatacagttttgtgctcactgggtgaagaggctgacttagggcggggaaaggagggagccaggctggatctctttccgcagctctcctcacgttcccctctagtcccggcgcggcgctgctgcccaggggactggcctatcctcggccaatccgctgggtccttattgcctgttgggcccctagtgcgaatcagtcccgccagagacccttgacgggcatactgtttcctccgggctcctgcctcatgaggggagagaatggcgccattttgcggtacggaagctacacagcaacacgtataggagactctccccgagatcttctagggagtgacccatctatttttgtttgggaagaggaaactccgaaatgggatcgcggaagacttaaagggccaggctgatttttttttcctactgcaggtctctgaggctgtggttgctacagggtcaccacgagcttggcttacttgtctcatccttcccttgcctggtatcattttctcagttctcccaaaagccatgtcccggcccttgctcatcaccttcaccccagccactgaccccagcgacctctggaaggatgggcagcagcagccacagcccgagaagccagagtccaccctggatggggctgcagcccgagctttctatgaggccctgattggggatgagagcagcgctcctgactcccagagatctcagactgaacctgccagagaaagaaagagaaagaaaagaagaataatgaaggcaccagcagcagaagcagtggcagaaggagcatcaggaagacatggacaagggagatcccttgaggctgaggataagatgactcaccggatactgagggcagcccaggagggggacctgccagaacttaggagactgctggaaccgcatgaggcaggaggagctggggggaatatcaacgcccgggatgccttctggtggaccccactgatgtgtgctgctcgagcgggccagggggcagctgtgagctatctcctgggccgtggggctgcctgggtgggggtctgtgagctgagtggcagggatgcggctcagctcgctgaagaagctggcttccctgaggtagcccgcatggtcagggagagccatggagagacaaggagcccggaaaaccggtctcctactccctccctccagtactgcgagaactgtgacacccacttccaagattccaaccaccgcacatccactgctcacctgctgtcactgtcgcagggtcctcagcctcccaaccttccacttggggtgcccatctccagcccgggcttcaaactgctgctgagggggggctgggagccaggaatggggctgggaccccggggtgagggccgtgccaatcccatccccactgtcctcaagagggaccaggaaggactaggctacagatcagcaccccagccccgagtgacacatttcccagcttgggatacccgagctgtggctgggagggagagaccccctcgggtggccacactgagctggagggaggagagaaggagggaggagaaagacagggcttgggagcgggatctaaggacttacatgaacctcgagttctgactttggtaaagtctgaccctagtctgctgctgaagtctgaacttgggcctctgacctgggccctttgacttccccttcctgggatctgctcagatgcagatcctgaagtttttggtcaataggctctgtcttcgtgagagacgggctgagagtcagaaataaatcaaccatttgtggtttattcaaaaaaaaaaaaaaaaaaaaaaaaaaaaaaaaaaaaacttttggggcacgcgccagcgcgacgccaccgaagaagaatctttctagagacaacaccaatcgacgtagaggagcggcgcggcgaggcccccaatggggtgacaggtgacaaactgcgtggtccgaacgcaactgacgtgtcccacgtgcgagaaaaccgcgctgggacgaagcacagaacgaggcgaggggccatctccacaccagaaatacaaagaacaccgccgcggcgggcacaccacacgcggggcaggcccgaggaacaagaacaccccacagagcagggagcccccggcgagagaatcaaaacgagcggaacacataacaaaaggaggggacacccaaagacaacagctggccgaaaaacataaaaacgatgatgggcgcccaaacggcagagggagaaccaccagcaacaagcacgagaacacacatatccagacgactttgcctcgaacacataatcggcacacaaaggaactaacgacgagtctagaacgccaccgtgtacggctatacagccactcaactatcacttagagacacccgaacccaaaaaatcatgaaaatcactcaactactgcagacgatttaatgacacagagatgaagtgctctagcaaatataaggagagcgcaaagcggaggcagagaaaggaagcggcgggacagcagcggcagaagagcgcggagcggggcgcgcgacaagcgacgagctgggacgaggcaggaatagcagccatcaggagagcgcgggacaagtggctgagagacagcacacgcgggacaaaagcgacggaagggggagcgcgacggaggaggggcccggacaggagagggaagccc

SEQ ID NO: 350996 - DNA, 1488 bp, Homo sapiens
gagcaaagtcggtattgtagggttccatgtttttacgcaaagtctctctcccttaggccctgcagagtcctaagttgtggggttactttagtggcaggaaagtgtttttgactactttttctcatcccagcaggtctctgaggctgtggttgctacagggtcaccacgagcttggcttacttgtctcatccttcccttgcctggtatcattttctcagttctcccaaaagccatgtcccggcccttgctcatcaccttcaccccagccactgaccccagcgacctctggaaggatgggcagcagcagccacagcccgagaagccagagtccaccctggatggggctgcagcccgagctttctatgaggccctgattggggatgagagcagcgctcctgactcccagagatctcagactgaacctgccagagaaagaaagagaaagaaaagaagaataatgaaggcaccagcagcagaagcagtggcagaaggagcatcaggaagacatggacaagggagatcccttgaggctgaggataagatgactcaccggatactgagggcagcccaggagggggacctgccagaacttaggagactgctggaaccgcatgaggcaggaggagctggggggaatatcaacgcccgggatgccttctggtggaccccactgatgtgtgctgctcgagcgggccagggggcagctgtgagctatctcctgggccgtggggctgcctgggtgggggtctgtgagctgagtggcagggatgcggctcagctcgctgaagaagctggcttccctgaggtagcccgcatggtcagggagagccatggagagacaaggagcccggaaaaccggtctcctactccctccctccagtactgcgagaactgtgacacccacttccaagattccaaccaccgcacatccactgctcacctgctgtcactgtcgcagggtcctcagcctcccaaccttccacttggggtgcccatctccagcccgggcttcaaactgctgctgagggggggctgggagccaggaatggggctgggaccccggggtgagggccgtgccaatcccatccccactgtcctcaagagggaccaggaaggactaggctacagatcagcaccccagccccgagtgacacatttcccagcttgggatacccgagctgtggctgggagggagagaccccctcgggtggccacactgagctggagggaggagagaaggagggaggagaaagacagggcttgggagcgggatctaaggacttacatgaacctcgagttctgactttggtaaagtctgaccctagtctgctgctgaagtctgaacttgggcctctgacctgggccctttgacttccccttcctgggatctgctcagatgcagatcctgaagtttttggtcaataggctctgtcttcgtgagagacgggctgagagtcagaaataaatcaaccatttgtggtttattca

SEQ ID NO: 350997 - DNA, 1753 bp, Homo sapiens
ggcccgggagtctgggcaatacagttttgtgctcactgggtgaagaggctgacttagggcggggaaaggagggagccaggctggatctctttccgcagctctcctcacgttcccctctagtcccggcgcggcgctgctgcccaggggactggcctatcctcggccaatccgctgggtccttattgcctgttgggcccctagtgcgaatcagtcccgccagagacccttgacgggcatactgtttcctccgggctcctgcctcatgaggggagagaatggcgccattttgcggtacggaagctacacagcaacacgtataggagactctccccgagatcttctagggagtgacccatctatttttgtttgggaagaggaaactccgaaatgggatcgcggaagacttaaagggccaggctgatttttttttcctactgcaggtctctgaggctgtggttgctacagggtcaccacgagcttggcttacttgtctcatccttcccttgcctggtatcattttctcagttctcccaaaagccatgtcccggcccttgctcatcaccttcaccccagccactgaccccagcgacctctggaaggatgggcagcagcagccacagcccgagaagccagagtccaccctggatggggctgcagcccgagctttctatgaggccctgattggggatgagagcagcgctcctgactcccagagatctcagactgaacctgccagagaaagaaagagaaagaaaagaagaataatgaaggcaccagcagcagaagcagtggcagaaggagcatcaggaagacatggacaagggagatcccttgaggctgaggataagatgactcaccggatactgagggcagcccaggagggggacctgccagaacttaggagactgctggaaccgcatgaggcaggaggagctggggggaatatcaacgcccgggatgccttctggtggaccccactgatgtgtgctgctcgagcgggccagggggcagctgtgagctatctcctgggccgtggggctgcctgggtgggggtctgtgagctgagtggcagggatgcggctcagctcgctgaagaagctggcttccctgaggtagcccgcatggtcagggagagccatggagagacaaggagcccggaaaaccggtctcctactccctccctccagtactgcgagaactgtgacacccacttccaagattccaaccaccgcacatccactgctcacctgctgtcactgtcgcagggtcctcagcctcccaaccttccacttggggtgcccatctccagaatggggctgggaccccggggtgagggccgtgccaatcccatccccactgtcctcaagagggaccaggaaggactaggctacagatcagcaccccagccccgagtgacacatttcccagcttgggatacccgagctgtggctgggagggagagaccccctcgggtggccacactgagctggagggaggagagaaggagggaggagaaagacagggcttgggagcgggatctaaggacttacatgaacctcgagttctgactttggtaaagtctgaccctagtctgctgctgaagtctgaacttgggcctctgacctgggccctttgacttccccttcctgggatctgctcagatgcagatcctgaagtttttggtcaataggctctgtcttcgtgagagacgggctgagagtcagaaataaatcaaccatttgtggtttattca

SEQ ID NO: 350998 - DNA, 1618 bp, Homo sapiens
ggcccgggagtctgggcaatacagttttgtgctcactgggtgaagaggctgacttagggcggggaaaggagggagccaggctggatctctttccgcagctctcctcacgttcccctctagtcccggcgcggcgctgctgcccaggggactggcctatcctcggccaatccgctgggtccttattgcctgttgggcccctagtgcgaatcagtcccgccagagacccttgacgggcatactgtttcctccgggctcctgcctcatgaggggagagaatggcgccattttgcggtacggaagctacacagcaacacgtataggagactctccccgagatcttctagggagtgacccatctatttttgtttgggaagaggaaactccgaaatgggatcgcggaagacttaaagggccaggctgatttttttttcctactgcaggtctctgaggctgtggttgctacagggtcaccacgagcttggcttacttgtctcatccttcccttgcctggtatcattttctcagttctcccaaaagccatgtcccggcccttgctcatcaccttcaccccagccactgaccccagcgacctctggaaggatgggcagcagcagccacagcccgagaagccagagtccaccctggatggggctgcagcccgagctttctatgaggccctgattggggatgagagcagcgctcctgactcccagagatctcagactgaacctgccagagaaagaaagagaaagaaaagaagaataatgaaggcaccagcagcagaagcagtggcagaaggagcatcaggaagacatggacaagggagatcccttgaggctgaggataagatgactcaccggatactgagggcagcccaggagggggacctgccagaacttaggagactgctggaaccgcatgaggcaggaggagctggggggaatatcaacgcccgggatgccttctggtggaccccactgatgtgtgctgctcgagcgggccagggggcagctgtgagctatctcctgggccgtggggctgcctgggtgggggtctgtgagctgagtggcagggatgcggctcagctcgctgaagaagctggcttccctgaggtagcccgcatggtcagggagagccatggagagacaaggagcccggaaaaccggtaaggggaaactttagctcagacccatgtctcattgtgttctgcctctcccagccacaccacaccagacgccccagcacagtgctgaagagttctttccttatcctcatgtgtaggttgacagggtagtatagtcaagtggttataaacatgagctccctggatttaaagcctgattccacttacttgggcaaacaacctaatgtctacatgttccagttttctcatcttagaaatgggggtagtaagaatcgttgttaggattcaatgggttaatatatgtaaaatgctagaatagtgcatgccgcatagtatgcaatacatgaatgttagctatagtcattatgactaatgtccctccccttgcccaagagtttgctaggtctggttaccaaacctttctttgtactcttgccatgtgatagtatccaatcaatggtaagaacagatccg

SEQ ID NO: 350999 - DNA, 1210 bp, Homo sapiens
gtgctgtggggatatcaggccgggatgcttctggtgacccactgatgtgtgctgtcgagcgggcaggggcatgctgtgagctatctcctgggccgtggggctgcctgggtgggggtctgtgagctgagtggcagggatgcggctcagctcgctgaagaagctggcttccctgaggtagcccgcatggtcagggagagccatggaggagagaaggagggaggagaagacatggacaagggagatcccttgaggctgaggataagatgactcaccggatactgagggcagcccaggagggggacctgccagaacttaggagactgctggaaccgcatgaggcaggaggagctggggggaatatcaacgcccgggatgccttctggtggaccccactgatgtgtgctgctcgagcgggccagggggcagctgtgagctatctcctgggccgtggggctgcctgggtgggggtctgtgagctgagtggcagggatgcggctcagctcgctgaagaagctggcttccctgaggtagcccgcatggtcagggagagccatggagagacaaggagcccggaaaaccggtctcctactccctccctccagtactgcgagaactgtgacacccacttccaagattccaaccaccgcacatccactgctcacctgctgtcactgtcgcagggtcctcagcctcccaaccttccacttggggtgcccatctccagcccgggcttcaaactgctgctgagggggggctgggagccaggaatggggctgggaccccggggtgagggccgtgccaatcccatccccactgtcctcaagagggaccaggaaggactaggctacagatcagcaccccagccccgagtgacacatttcccagcttgggatacccgagctgtggctgggagggagagaccccctcgggtggccacactgagctggagggaggagagaaggagggaggagaaagacagggcttgggagcgggatctaaggacttacatgaacctcgagttctgactttggtaaagtctgaccctagtctgctgctgaagtctgaacttgggcctctgacctgggccctttgacttccccttcctgggatctgctcagatgcagatcctgaagtttttggtcaataggctctgtcttcgtgagagacgggctgagagtcagaaataaatcaaccatttgtggtttattca

SEQ ID NO: 351000 - DNA, 1140 bp, Homo sapiens
ggcccgggagtctgggcaatacagttttgtgctcactgggtgaagaggctgacttagggcggggaaaggagggagccaggctggatctctttccgcagctctcctcacgttcccctctagtcccggcgcggcgctgctgcccaggggactggcctatcctcggccaatccgctgggtccttattgcctgttgggcccctagtgcgaatcagtcccgccagagacccttgacgggcatactgtttcctccgggctcctgcctcatgaggggagagaatggcgccattttgcggtacggaagctacacagcaacacgtataggagactctccccgagatcttctagggagtgacccatctatttttgtttgggaagaggaaactccgaaatgggatcgcggaagacttaaagggccaggctgatttttttttcctactgcaggtctctgaggctgtggttgctacagggtcaccacgagcttggcttacttgtctcatccttcccttgcctggtatcattttctcagttctcccaaaagccatgtcccggcccttgctcatcaccttcaccccagccactgaccccagcgacctctggaaggatgggcagcagcagccacagcccgagaagccagagtccaccctggatggggctgcagcccgagctttctatgaggccctgattggggatgagagcagcgctcctgactcccagagatctcagactgaacctgccagagaaagaaagagaaagaaaagaagaataatgaaggcaccagcagcagaagcagtggcagaaggagcatcaggaagacatggacaagggagatcccttgaggctgaggataagatgactcaccggatactgagggcagcccaggagggggacctgccagaacttaggagaacagggcttgggagcgggatctaaggacttacatgaacctcgagttctgactttggtaaagtctgaccctagtctgctgctgaagtctgaacttgggcctctgacctgggccctttgacttccccttcctgggatctgctcagatgcagatcctgaagtttttggtcaataggctctgtcttcgtgagagacgggctgagagtcagaaataaatcaaccatttgtggtttattca

SEQ ID NO: 351001 - DNA, 618 bp, Homo sapiens
aaatcaaccatttgtggtttattcacttttctggaagctattttgaggaagccaaacagaagcctgggagccacatgcaagtcccacctgagtcagaaggggcagcctctccaggtggcatgataaggtcacctccctgccaatctgggttcactttcaggtcccagaccctcctgggagtcccccacctattctttcaacccccctggaccaagaattgcccagcttcgtgcaagtctcacttcccccaggaggagttccctgactacagccaattcactgatttcacaaacataagtccatatactatgtgccaagaatacaggtaaagacattcccaaccctcaaagagttcacagctggagagggaaagtgccatgttatcaatttttttcttttttttttgagatgcagtttcgctctcattgcccaggctggagtgcaatggcatgatctcggctcaccacaacctctgccccccgagttcaagggattctcctgcctcagcctccccagtagctgggattacaggcatgccccaccacgcccagctaattttgtatttttagtagagacggggtttctccatgttggccaagctggtcttgaactcccgac

SEQ ID NO: 351002 - DNA, 1910 bp, Homo sapiens
acgagggtgacgttatttcattacacggcttctcggcattccacaggtttccctccgcctcctgagggcctttcctaacccacagagtggattcctggctccagaaaatgggcttggagcgggggccacgttgaggaaggcgaagggcattgtgggggcgttatgtaaaagtaggaccccaaccgacagatcctagtgctcgcgccacctgggcgcgcggagctttgctcgtttactattgaaaaagttccagcgcgggaaactgaacccggagctttgcgcacgcccgagccctcaagtaatgtgggttgtggtttttgttgttgttgtcgccacgcatgcgtcttcgtgccgtgtggctatttgattgtgtcaactcttctgattagaatggcgccattttgcggtacggaagctacacagcaacacgtataggagactctccccgagatcttctagggagtgacccatctatttttgtttgggaagaggaaactccgaaatgggatcgcggaagacttaaagggccaggctgatttttttttcctactgcaggtctctgaggctgtggttgctacagggtcaccacgagcttggcttacttgtctcatccttcccttgcctggtatcattttctcagttctcccaaaagccatgtcccggcccttgctcatcaccttcaccccagccactgaccccagcgacctctggaaggatgggcagcagcagccacagcccgagaagccagagtccaccctggatggggctgcagcccgagctttctatgaggccctgattggggatgagagcagcgctcctgactcccagagatctcagactgaacctgccagagaaagaaagagaaagaaaagaagaataatgaaggcaccagcagcagaagcagtggcagaaggagcatcaggaagacatggacaagggagatcccttgaggctgaggataagatgactcaccggatactgagggcagcccaggagggggacctgccagaacttaggagactgctggaaccgcatgaggcaggaggagctggggggaatatcaacgcccgggatgccttctggtggaccccactgatgtgtgctgctcgagcgggccagggggcagctgtgagctatctcctgggccgtggggctgcctgggtgggggtctgtgagctgagtggcagggatgcggctcagctcgctgaagaagctggcttccctgaggtagcccgcatggtcagggagagccatggagagacaaggagcccggaaaaccggtctcctactccctccctccagtactgcgagaactgtgacacccacttccaagattccaaccaccgcacatccactgctcacctgctgtcactgtcgcagggtcctcagcctcccaaccttccacttggggtgcccatctccagcccgggcttcaaactgctgctgagggggggctgggagccaggaatggggctgggaccccggggtgagggccgtgccaatcccatccccactgtcctcaagagggaccaggaaggactaggctacagatcagcaccccagccccgagtgacacatttcccagcttgggatacccgagctgtggctgggagggagagaccccctcgggtggccacactgagctggagggaggagagaaggagggaggagaaagacagggcttgggagcgggatctaaggacttacatgaacctcgagttctgactttggtaaagtctgaccctagtctgctgctgaagtctgaacttgggcctctgacctgggccctttgacttccccttcctgggatctgctcagatgcagatcctgaagtttttggtcaataggctctgtcttcgtgagagacgggctgagagtcagaaataaatcaaccatttgtggtttattca

SEQ ID NO: 351003 - DNA, 1564 bp, Homo sapiens
cttaggctctaagtgtgaccttcgaaccctggtcagagtaatgaatggcgccattttgcggtacggaagctacacagcaacacgtataggagactctccccgagatcttctagggagtgacccatctatttttgtttgggaagaggaaactccgaaatgggatcgcggaagacttaaagggccaggctgatttttttttcctactgcaggtctctgaggctgtggttgctacagggtcaccacgagcttggcttacttgtctcatccttcccttgcctggtatcattttctcagttctcccaaaagccatgtcccggcccttgctcatcaccttcaccccagccactgaccccagcgacctctggaaggatgggcagcagcagccacagcccgagaagccagagtccaccctggatggggctgcagcccgagctttctatgaggccctgattggggatgagagcagcgctcctgactcccagagatctcagactgaacctgccagagaaagaaagagaaagaaaagaagaataatgaaggcaccagcagcagaagcagtggcagaaggagcatcaggaagacatggacaagggagatcccttgaggctgaggataagatgactcaccggatactgagggcagcccaggagggggacctgccagaacttaggagactgctggaaccgcatgaggcaggaggagctggggggaatatcaacgcccgggatgccttctggtggaccccactgatgtgtgctgctcgagcgggccagggggcagctgtgagctatctcctgggccgtggggctgcctgggtgggggtctgtgagctgagtggcagggatgcggctcagctcgctgaagaagctggcttccctgaggtagcccgcatggtcagggagagccatggagagacaaggagcccggaaaaccggtctcctactccctccctccagtactgcgagaactgtgacacccacttccaagattccaaccaccgcacatccactgctcacctgctgtcactgtcgcagggtcctcagcctcccaaccttccacttggggtgcccatctccagcccgggcttcaaactgctgctgagggggggctgggagccaggaatggggctgggaccccggggtgagggccgtgccaatcccatccccactgtcctcaagagggaccaggaaggactaggctacagatcagcaccccagccccgagtgacacatttcccagcttgggatacccgagctgtggctgggagggagagaccccctcgggtggccacactgagctggagggaggagagaaggagggaggagaaagacagggcttgggagcgggatctaaggacttacatgaacctcgagttctgactttggtaaagtctgaccctagtctgctgctgaagtctgaacttgggcctctgacctgggccctttgacttccccttcctgggatctgctcagatgcagatcctgaagtttttggtcaataggctctgtcttcgtgagagacgggctgagagtcagaaataaatcaaccatttgtggtttattca

SEQ ID NO: 351004 - DNA, 1699 bp, Homo sapiens
ggcccgggagtctgggcaatacagttttgtgctcactgggtgaagaggctgacttagggcggggaaaggagggagccaggctggatctctttccgcagctctcctcacgttcccctctagtcccggcgcggcgctgctgcccaggggactggcctatcctcggccaatccgctgggtccttattgcctgttgggcccctagtgcgaatcagtcccgccagagacccttgacgggcatactgtttcctccgggctcctgcctcatgaggggagaggaagaggaaactccgaaatgggatcgcggaagacttaaagggccaggctgatttttttttcctactgcaggtctctgaggctgtggttgctacagggtcaccacgagcttggcttacttgtctcatccttcccttgcctggtatcattttctcagttctcccaaaagccatgtcccggcccttgctcatcaccttcaccccagccactgaccccagcgacctctggaaggatgggcagcagcagccacagcccgagaagccagagtccaccctggatggggctgcagcccgagctttctatgaggccctgattggggatgagagcagcgctcctgactcccagagatctcagactgaacctgccagagaaagaaagagaaagaaaagaagaataatgaaggcaccagcagcagaagcagtggcagaaggagcatcaggaagacatggacaagggagatcccttgaggctgaggataagatgactcaccggatactgagggcagcccaggagggggacctgccagaacttaggagactgctggaaccgcatgaggcaggaggagctggggggaatatcaacgcccgggatgccttctggtggaccccactgatgtgtgctgctcgagcgggccagggggcagctgtgagctatctcctgggccgtggggctgcctgggtgggggtctgtgagctgagtggcagggatgcggctcagctcgctgaagaagctggcttccctgaggtagcccgcatggtcagggagagccatggagagacaaggagcccggaaaaccggtctcctactccctccctccagtactgcgagaactgtgacacccacttccaagattccaaccaccgcacatccactgctcacctgctgtcactgtcgcagggtcctcagcctcccaaccttccacttggggtgcccatctccagcccgggcttcaaactgctgctgagggggggctgggagccaggaatggggctgggaccccggggtgagggccgtgccaatcccatccccactgtcctcaagagggaccaggaaggactaggctacagatcagcaccccagccccgagtgacacatttcccagcttgggatacccgagctgtggctgggagggagagaccccctcgggtggccacactgagctggagggaggagagaaggagggaggagaaagacagggcttgggagcgggatctaaggacttacatgaacctcgagttctgactttggtaaagtctgaccctagtctgctgctgaagtctgaacttgggcctctgacctgggccctttgacttccccttcctgggatctgctcagatgcagatcctgaagtttttggtcaataggctctgtcttcgtgagagacgggctgagagtcagaaataaatcaaccatttgtggtttattca

SEQ ID NO: 351005 - DNA, 1440 bp, Homo sapiens
gagcaaagtcggtattgtagggttccatgtttttacgcaaagtctctctcccttaggccctgcagagtcctaagttgtggggttactttagtggcaggaaagtgtttttgactactttttctcatcccagcaggtctctgaggctgtggttgctacagggtcaccacgagcttggcttacttgtctcatccttcccttgcctggtatcattttctcagttctcccaaaagccatgtcccggcccttgctcatcaccttcaccccagccactgaccccaagtccaccctggatggggctgcagcccgagctttctatgaggccctgattggggatgagagcagcgctcctgactcccagagatctcagactgaacctgccagagaaagaaagagaaagaaaagaagaataatgaaggcaccagcagcagaagcagtggcagaaggagcatcaggaagacatggacaagggagatcccttgaggctgaggataagatgactcaccggatactgagggcagcccaggagggggacctgccagaacttaggagactgctggaaccgcatgaggcaggaggagctggggggaatatcaacgcccgggatgccttctggtggaccccactgatgtgtgctgctcgagcgggccagggggcagctgtgagctatctcctgggccgtggggctgcctgggtgggggtctgtgagctgagtggcagggatgcggctcagctcgctgaagaagctggcttccctgaggtagcccgcatggtcagggagagccatggagagacaaggagcccggaaaaccggtctcctactccctccctccagtactgcgagaactgtgacacccacttccaagattccaaccaccgcacatccactgctcacctgctgtcactgtcgcagggtcctcagcctcccaaccttccacttggggtgcccatctccagcccgggcttcaaactgctgctgagggggggctgggagccaggaatggggctgggaccccggggtgagggccgtgccaatcccatccccactgtcctcaagagggaccaggaaggactaggctacagatcagcaccccagccccgagtgacacatttcccagcttgggatacccgagctgtggctgggagggagagaccccctcgggtggccacactgagctggagggaggagagaaggagggaggagaaagacagggcttgggagcgggatctaaggacttacatgaacctcgagttctgactttggtaaagtctgaccctagtctgctgctgaagtctgaacttgggcctctgacctgggccctttgacttccccttcctgggatctgctcagatgcagatcctgaagtttttggtcaataggctctgtcttcgtgagagacgggctgagagtcagaaataaatcaaccatttgtggtttattca

SEQ ID NO: 351006 - DNA, 1402 bp, Homo sapiens
ggcccgggagtctgggcaatacagttttgtgctcactgggtgaagaggctgacttagggcggggaaaggagggagccaggctggatctctttccgcagctctcctcacgttcccctctagtcccggcgcggcgctgctgcccaggggactggcctatcctcggccaatccgctgggtccttattgcctgttgggcccctagtgcgaatcagtcccgccagagacccttgacgggcatactgtttcctccgggctcctgcctcatgaggggagagaatggcgccattttgcggtacggaagctacacagcaacacgtataggagactctccccgagatcttctagggagtgacccatctatttttgtttgggaagaggaaactccgaaatgggatcgcggaagacttaaagggccaggctgatttttttttcctactgcaggtctctgaggctgtggttgctacagggtcaccacgagcttggcttacttgtctcatccttcccttgcctggtatcattttctcagttctcccaaaagccatgtcccggcccttgctcatcaccttcaccccagccactgaccccagcgacctctggaaggatgggcagcagcagccacagcccgagaagccagagtccaccctggatggggctgcagcccgagctttctatgaggccctgattggggatgagagcagcgctcctgactcccagagatctcagactgaacctgccagagaaagaaagagaaagaaaagaagaataatgaaggcaccagcagcagaagcagtggcagaaggagcatcaggaagacatggacaagggagatcccttgaggctgaggataagatgactcaccggatactgagggcagcccaggagggggacctgccagaacttaggagactgctggaaccgcatgaggcaggaggagctggggggaatatcaacgcccgggatgccttctggtggaccccactgatgtgtgctgctcgagcgggccagggggcagctgtgagctatctcctgggccgtggggctgcctgggtgggggtctgtgagctgagtggcagggatgcggctcagctcgctgaagaagctggcttccctgaggtagcccgcatggtcagggagagccatggagagacaaggagcccggaaaaccggtaaggggaaactttagctcagacccatgtctcattgtgttctgcctctcccagccacaccacaccagacgccccaccctcggccactctcccagcccgcccatggtgaggaaccgcacctgggaaaggccaggcctcgcaggctgctgccggggttgcctcttgcctcattgcctatctttagagtgtccaagatccgggcagactgacgtgaagccccaggtatttactcaacaa

SEQ ID NO: 351007 - DNA, 1691 bp, Homo sapiens
gcgtgagccactacacctggcctcagtcagatataaaaattaaaaactcagattgggatctgaaagacttgtaagtgcaacaataatttattcagcatacatatcctccagctctcccccgctaatcctccccaactttgcaaagaaaaaggaactaaagcagcactaaaaagtagaaagaactcacagggtcttacattctcctgttttctggaactcttgtttgaaaggtgatacttcctcttgcctcccacctcagatacttacagaccaataacctaaaacctaagtggagactgttgggctaaccagaggtgagctcagtcttcttaaatctgtgactctgttccagatcaacccttagtgaaatctgaataattatttcctcactttaatcagacgaaatgggagctctcactctctaggaaaagcattaatgttcttcagtcaccactgttcttccataatacaaacatacagagcaaccaaaaaagagagtgacacccacaattaaatttttaaaatcagcaaaaaccaacctatagatgattcagatattggaactggagacagactttaactgtcatgttcatagggcttatgggaaaatagttgaaacagtggttgaataaggaatctcagcagagaaatggaagcttaaaaaaaccaatggaaaggccgggcacagtggctcacgcctgtaatgccagcactttgggaggccaaggcgggcggatcacgaggtcaggagttcaagaccagcctggccaacatggtgaaaccccatctctactaaaaatactaaaattagccggcatggtggcgcgcccctgtagtcccagctactcgggaggttgaggcaggagaaccacttgaacccaggaggcagaggttgtggtgagccgagatcacaccactgcactccagcctgggaaacagagcgagactccatctcaaaaaaaaaaacaaaaacgcaagtcgttatctgtatttgaagtttaaatctagtacgtgaaataaaaaacaaaataggcttaacagcagagtgaatactacaaaagaacagtgaactcgaagacgtatcaatagaaattatctaaaatgaaggtcagagagatggaaaaaaaatggatagagcatttctacgatctatgcaacaatatcaggcagtccaatatatgtgtaatcagagtcctagaagggtaggagacagaatgggtaggataaattcacaaaagaagtgcaaaacttatacaatgaatactataaaacattgttgaaattaatgacaacctaaataaatgaaaatacatcccatattcatggatcagaagactcaacattttgttaaaatggaatactcttagctagtaaattgtagaaccagtactgaaaccaaggtctgttcaaattaatttaatcattcatataggaattcatggtgagtaggacaggcaaaggtggctgtgttcatggagcctccattagatggagggagtcattctttaataaaacggtataatttcagatagtgttaagtactgtgaaataaagcatgatgtgataataattggggaagatggtttaggttagatggtcaggaaatgcctctctgaaaaagtctcataaatgtctctttttctttttacattttgttttcttgaattaggaccaaataaaggccacacatt

SEQ ID NO: 351008 - DNA, 2062 bp, Homo sapiens
gcgtgagccactacacctggcctcagtcagatataaaaattaaaaactcagattgggatctgaaagacttgtaagtgcaacaataatttattcagcatacatatcctccagctctcccccgctaatcctccccaactttgcaaagaaaaaggaactaaagcagcactaaaaagtagaaagaactcacagggtcttacattctcctgttttctggaactcttgtttgaaaggtgatacttcctcttgcctcccacctcagatacttacagaccaataacctaaaacctaagtggagactgttgggctaaccagaggtgagctcagtcttcttaaatctgtgactctgttccagatcaacccttagtgaaatctgaataattatttcctcactttaatcagacgaaatgggagctctcactctctaggaaaagcattaatgttcttcagtcaccactgttcttccataatacaaacatacagagcaaccaaaaaagagagtgacacccacaattaaatttttaaaatcagcaaaaaccaacctatagatgattcagatattggaactggagacagactttaactgtcatgttcatagggcttatgggaaaatagttgaaacagtggttgaataaggaatctcagcagagaaatggaagcttaaaaaaaccaatggaaaggccgggcacagtggctcacgcctgtaatgccagcactttgggaggccaaggcgggcggatcacgaggtcaggagttcaagaccagcctggccaacatggtgaaaccccatctctactaaaaatactaaaattagccggcatggtggcgcgcccctgtagtcccagctactcgggaggttgaggcaggagaaccacttgaacccaggaggcagaggttgtggtgagccgagatcacaccactgcactccagcctgggaaacagagcgagactccatctcaaaaaaaaaaacaaaaacgcaagtcgttatctgtatttgaagtttaaatctagtacgtgaaataaaaaacaaaataggcttaacagcagagtgaatactacaaaagaacagtgaactcgaagacgtatcaatagaaattatctaaaatgaaggtcagagagatggaaaaaaaatggatagagcatttctacgatctatgcaacaatatcaggcagtccaatatatgtgtaatcagagtcctagaagggtaggagacagaatgggtaggataaattcacaaaagaagtgcaaaacttatacaatgaatactataaaacattgttgaaattaatgacaacctaaataaatgaaaatacatcccatattcatggatcagaagactcaacattttgttaaaatggaatactcttagctagtaaattgtagaaccagtactgaaaccaaggtctgttcaaattaatttaatcattcatataggaattcatggtgagtaggacaggcaaaggtggctgtgttcatggagcctccattagatggagggagtcattctttaataaaacggtataatttcagatagtgttaagtactgtgaaataaagcatgatgtgataataattggggaagatggtttaggttagatggtcaggaaatgcctctctgaaaaagtctcataaatgtctctttttctttttacattttgttttcttgaattaggaccaaataaaggccacacattgagattgcttgctatgtctcttaagtctctttatgtataggttcctctttcatatctcgcttttgaatttttcctggtaattcagttgttgaacaaagctggtcatttgtcctgtggcgtttcccatgatctggtttctgactgcacagcttccaagtgaatgccatctgttgcgggaagtcagggaccccaaatggagggacctgctgaagccgtgacagaagaacataaattgtgaagatttcatggacatttattagttccccaaattaatacttttgtaatttcttacgcctgtctttactacaatctctgaacataaatcgtgaaaatgtcatggacgtttatcacttccctgatcagtactcttg

SEQ ID NO: 351009 - DNA, 256 bp, Homo sapiens
tgatctgcctgcctcggcctcccaaagtgctgggattacaggcgtgagccactacacctggcctcagtcagatataaaaattaaaaactcagattgggatctgaaagacttgtaagtgcaacaataatttattcagcatacatatcctccagctctcccccgctaatcctccccaactttgcaaagaaaaaggaactaaagcagcactaaaaagtagaaagaactcacagggtcttacattctcctgttttctgga

SEQ ID NO: 351010 - DNA, 187 bp, Homo sapiens
ttttttttttggttacatatttcagtttattatcaaagaaaacaatagtctttttcctgagcgagatgttagaatgtgtatttaactgaaattcaaaaaaaggatgaactggaatcatttaaaatgtatcagtatgtctaatatataagtaaatgtcgacgcggccgcgaatttagtagtagtagag

SEQ ID NO: 351011 - DNA, 155 bp, Homo sapiens
ggcccaagttggtctcagctaaacgaacatgcccccactcaaattctaccatgactttcactgtgagtagagatgaggcagttggtttggctgagggacgtttgtgatgggtgaaatgggaggtgagctgagacccttctggagtgaaggaggaa

SEQ ID NO: 351012 - DNA, 7565 bp, Homo sapiens
  misc_feature (24)..(24): n is a, c, g, or t
ggctggcgtctagaggatccctcnaaacgtatcagaacggacctacagaaagtttctgacctgtctgccccattctcccagagcgctggggtggatcaaaaggaactgtccttcagcccatccttattgaagatcttctgccaactattctccattcatgtagatgctataaacatcatggttctcaaggtggatacctctgagtccttatggcatattcagatcagtagaagcagatttcttttggatagtgatgggaaaaggctaatctgtgaggtgagcttatgtaagatcaacagcaaagttctaaagagtggtcagctggaggacacctgcctagtggagctttcactggccctggacctgtgtctaaaggtgggcattagcagtcggcatctcactgctatcactgtggatgtgtggacactccatgctgaactgcatgagggcctcttccagagccaactgctgtgccagggcccaagcctagcatctaagcctgttccctgttcagaggtgacagaaaacttagttgagccaactctgcctggcctattccttctccagcagctgccagaccaggtcaaggttaagatggagaacacaagcgtggtattgtccatgaatagtcaaaagaggcacctgacttggactctgaagctgctgcagttcctgtaccaccgtgatgaggatcagctgccccttcgaagcttcacagcaaactctgatatggcacagatgagcactgaactgctgctggaagatgggttgttgttgtcccagagtcgccaacgcattgtctgcctcaactccctcaaggctagtgtgcaggtgaccaccattgacctctcagcctccctagttctgaacacttgcatcattcactaccggcaccaggaattctctcactggctgcacctgctagcactggaaacccaagggtctagttcacctgttctaaagcaaaggaaaaaaagaaccttcccccaaatcctggctcccatcatctttagcacctccatctccaatgtcaacatttccattcaacttggagatacaccaccttttgccttgggattcaattctatctctctggattaccagcacctcaggccacaaagcatccatcagcggggcgtcctaactgtggaccacctctgctggcgtgtgggcagtgactcccacattcagcgggcgccacacccacccaatatgcatgtttggggtgaggcacttgttctggactccttcacactacagggtagctataaccagcctctgggcctgtccagcacccagtcagataccctttttcttgattgtaccattcgaggacttcaggtggaagcatcagatacctgtgcccaatgtctgtctcgtatcttatccctgatgggtccacaatctgggaagtcagctgtctctaggcactcttcatttggggaatctgtgtcattactgtggaaggtggacttgaaggtcgaagacatgaacttgtttaccctttctgccttggttggtgcttcagaggtacgactggacaccctaactatcctgggcagtgcagagacgtccactgtggggattcaaggacttgtgttagcgctggtgaaatcagtcacggagaagatgcaaccctgttgcaaggcccctgacatccctaccccagtgctcagcctttccatgctctccatcacctatcacagcagcatccgctctctggaggttcagtgtggtgcagggctgaccttactttggagccccccagatcacatgtacctgtaccagcatgtcctggccactctacagtgccgagacctactaagagccactgtgtttcctgagactgtaccatcccttgcactagagacttcaggaactacttctgagctagaaggccgtgcccctgagccattacccccaaagcggctgctaaacctaaccctggaggtgagcacagccaagctcacagcttttgtagctgaggacaagttcattaccctggctgcagagagtgtgtcactgagccggcatggaggttccctgcaggcatactgtccagagctggctgctggctttgatggcaatagtatcttcaacttcaaggaggtggaggtgcagctgctacctgagctggaagagatgatcctccaccggaaccccttccctgcgctgcagaccctccggaaccgtgtttggctcctctctttcggctcagtctcggtggagtttccttatcagtatgacttttctcgaactctagatgaggctgtgggagttcagaagtggctgaagggactacatcaagggactcgtgcttgggcctctccaagccctgtcccactcccacctgatctactcttaaaggttgagcacttctcatgggttttcttggatgatgtttttgaggtgaaacttcatgataactacgagctgatgaaggatgaaagtaaggagagtgccaaaagactacagctactggatgctaaagtggccgcccttcggaagcagcatggggagttgttgcctgcccgcaaaattgaggagctctatgcctctttggaacgcaaaaacattgaaatctacatccagcgttcccgtcgtctctatggcaacacacccatgcgccgggcactgcttacttggagcttagcagggctagaactggtagctctggcagatgcctccttccatggtcctgagcatgtggtagaacaggttcaagagcttgatccaggcagcccttttccccctgagggattagatcttgtcattcagtggtgtcgaatgctcaagtgcaatgtcaagagctttctggttcggatcagggactatccacggtacctgtttgagatccgtgactggcggctaatgggtcgacttgtgggcaccgagcagagtggtcagccttgctcccgtcggcgtcagatcttgcacttggggcttccgtggggtaacgtggcagtggagaggaacatgcccccactcaaattctaccatgactttcactcggaaatattccagtacacagtggtgtggggcccatgctgggatccagcctggacactaattggccagtgtgtggacctcttgaccaagccctcagctgaccccagcccacctttgccctggtgggacaagagccgtcttctgttccatggagactggcacatggacattgaacaggcgaacctgcaccagctggccactgaggatccatacaacacaactgaaaatatgcactgggagtggagccacctgtcttttcattggaaacctggtcagtttgtgttcaagggtgacttggatatcaacgtgagaacagcctctaagtatgacgactgctgcttccttcacctgcctgacctctgcatgacactggacctgcagtggctgtgccatgggaacccccatgatcaccatagtgtcactctgcgggccccagagttcctgcctgaggtgcccttgggccagcttcatgactcctaccgggcctttcgctcggagaacctcaatctctccatcaagatggatctgactcggcacagtggaacaatatcccagccccgaattctgctatatagtagtaccctgcgctggatgcaaaacttctgggcaacttggacaagtgtcacaaggcctatctgcaggggaaagctcttcaataacctgaaacccagcaagaagaaacttggtcagcactacaagcaactttcctatacagccctctttccccagctgcaggtacattattgggcctcatttgcccagcaacggggcatccagattgagtgcagtcagggccatgtcttcactcgggggactcagcggcttatacctcaagcaggcacagtgatgcggcgccttatctctgattggagtgttacccagatggtgagtgacctaagtcaggtgaccgttcacctgatggcctcacccactgaagagaatgctgatcactgtcttgatcccttggtaacaaagacccacctgctgagcttgtcctccctcacctaccaacggcatagcaatcgcacagctgaggaggagctctctgctcgtgatggggatcctacctttcatacacatcagctgcacttagtagatttacggatttcctggacaactaccaatcgagacattgcctttgggttatatgatgggtacaaaaaggcagctgtactcaaacgtaatctttctactgaggccctgaaggggttaaagattgatccacagatgccagccaaaaagccaaagcggggtgtcccaactagtgcctcagccccacctcgtgttaacactcccagcttcagtggacaacctgataaggggtcatcaggaggtgcttacatgttgcagaagctaattgaagagacagataggtttgtagtgttcacagaagaggaatcaggcatgagtgaccagttgtgtggcattgctgcctgccagacggatgacatatacaaccgaaactgccttattgaattggtcaactgtcagatggttcttcgtggagcagagacagaaggctgtgtcattgtgtcagctgccaaagcccaactgctgcagtgccagcaccatccagcctggtatggtgatacattgaagcaaaagacatcctggacttgcctcttggatggcatgcagtactttgccaccactgaaagcagccccacagagcaggatggccgacagctctggttagaggtgaagaatatcgaggagcaccggcagcgtagtctggactctgtgcaggagctgatggagagtgggcaggcagtgggcggcatggttaccacaaccacagattggaaccagccagctgaggcacagcaagcccagcaagtccagcggatcatttcgcgttgcaactgccgaatgtactatattagttacagccatgacattgatcctgaactagcaactcagattaagccacctgaagttcttgagaaccaggaaaaggaagatctcctaaagaagcaggaaggggctgtggataccttcacccttatccaccatgagctggaaatttccaccaacccagctcagtatgccatgatcctggacattgtcaacaacctgctgctccatgtagaacctaagcggaaggaacatagtgagaagaagcaacgggtcaggttccagcttgagatctctagcaatccagaggagcaacgcagcagcatactgcatttgcaggaggctgtgcggcagcatgtggcccaaatacgacagctggagaagcagatgtattctatcatgaagtctttgcaggatgacagcaagaatgagaatctgcttgacctgaaccagaagcttcagttgcagctaaaccaggagaaggccaacctgcagctggaaagtgaagaactgaatatcctcatcaggtgttttaaggatttccaactgcagcgggctaacaagatggagctgcgaaagcagcaagaagatgtgagtgtggtccgtcgcactgagttttactttgctcaggcacggtggcgcctgacagaggaagatggacagctgggaattgctgaattagaactgcagaggttcctctacagcaaggtgaataagtctgatgacacagcagaacatcttctggagttgggctggtttaccatgaacaacctcctccccaatgctgtctataaggtagtactgcggccccagagctcctgccagtctgggcgacagctagctctccgcctcttcagcaaagttcggccccctgttgggggtatctctgttaaggagcattttgaggtaaatgtggtgcctctcaccatccagctgacacaccagttcttccacagaatgatgggctttttctttcctggccgaagtgtggaagatgatgaagttggtgatgaagaggataagtccaaactggtgactactggaataccagtggtgaagcctcggcagctgattgcaacagatgatgcagtaccactgggccctgggaagggtgtggcacagggtttgactcggagttctggggtcagaaggtcatttcgcaaatcgccagaggtaccaaacatgcccctgatgatagaaaaatgggagagtcttgaggtcctgtttggtgtggcttgggatttcttcggtttcctctaagtccattctagggataaaagaagagggagatgtttggggtcctgagtttcttctgatggattcagggctcacactccttgcctgcctttcttagcaccctgtggatgacattgacaagatgaaagagcgagctgccatgaacaactccttcatctacataaagattccacaggttccactgtgtgtcagctacaaggtctgcacctctcaagcactttgtagaacagggtgggaagggaaccagataagatcagagattctatacagggagacagctaggttgtttgtgatgctgagctgtgggtgataaatctgctgttccctctgctcccctcaagagtcagcatcattacgaggctgaggtaaggggaaatcagtatctgtaggttactattgtaggacttggcactcaagtggctggctgggactcaaaatggcagctgatgtattccccacccctctttttttctttcccctccccctcctcttacagggtgagaagaacagtgtggactggggtgaccttaacctggtgctgccctgtctggagtaccacaacaacacatggacatggctagactttgccatggctgtcaaaagggacagccgcaaagccctggttgcccaggtaatcaaagagaagctaaggctgaagtctgcaacaggctctgaggtccggggaaagctagaaactaaatcggacctgaacatgcaacagcaggaagaggaggagaaagcccggctcctcattggtttaagtgtgggcgacaagaaccctggcaagaagtccatctttggcaggcgcaaatgatttggcgattcgagtggctgcagtacaggatctgactctggctcaggctccagggacttgtggggtgggaggggcttcccgttatccacgaggatttgtgggtgtcagagcccataggcatcactcttcagcacctggtctgttcgctgcagggcatggtggacagtaatgctgagttctgtctcacactgatcaggctcagggccagagaggcaacaagagagcaagacccagggaatgggcccagggcaggaccctattcccttggggtcaagtgaaagggtagggggatagtcctgatcaagtgtgataaatttttatagacatatataaatatatatatattatatatatatttctaagtgtaactgtccttcctctgtgccaggaaacgggagggggctgatcctctgatcctcactccactgtcatgtttgaaagaggtattggtgttctggagtgggggtcaacccctccccagtctctgtgctaagttcacttgggaggatggcagtaggagccagggctggccatgggtcccctacccttccccgtaggatataccctggagaatggcaaaatgatttaaagagaaaaaaaaagatattttaaatttgatgctcaaatttgt

SEQ ID NO: 351013 - DNA, 6976 bp, Homo sapiens
  misc_feature (24)..(24): n is a, c, g, or t
ggctggcgtctagaggatccctcnaaacgtatcagaacggacctacagaaagtttctgacctgtctgccccattctcccagagcgctggggtggatcaaaaggaactgtccttcagcccatccttattgaagatcttctgccaactattctccattcatgtagatgctataaacatcatggttctcaaggtggatacctctgagtccttatggcatattcagatcagtagaagcagatttcttttggatagtgatgggaaaaggctaatctgtgaggtgagcttatgtaagatcaacagcaaagttctaaagagtggtcagctggaggacacctgcctagtggagctttcactggccctggacctgtgtctaaaggtgggcattagcagtcggcatctcactgctatcactgtggatgtgtggacactccatgctgaactgcatgagggcctcttccagagccaactgctgtgccagggcccaagcctagcatctaagcctgttccctgttcagaggtgacagaaaacttagttgagccaactctgcctggcctattccttctccagcagctgccagaccaggtcaaggttaagatggagaacacaagcgtggtattgtccatgaatagtcaaaagaggcacctgacttggactctgaagctgctgcagttcctgtaccaccgtgatgaggatcagctgccccttcgaagcttcacagcaaactctgatatggcacagatgagcactgaactgctgctggaagatgggttgttgttgtcccagagtcgccaacgcattgtctgcctcaactccctcaaggctagtgtgcaggtgaccaccattgacctctcagcctccctagttctgaacacttgcatcattcactaccggcaccaggaattctctcactggctgcacctgctagcactggaaacccaagggtctagttcacctgttctaaagcaaaggaaaaaaagaaccttcccccaaatcctggctcccatcatctttagcacctccatctccaatgtcaacatttccattcaacttggagatacaccaccttttgccttgggattcaattctatctctctggattaccagcacctcaggccacaaagcatccatcagcggggcgtcctaactgtggaccacctctgctggcgtgtgggcagtgactcccacattcagcgggcgccacacccacccaatatgcatgtttggggtgaggcacttgttctggactccttcacactacagggtagctataaccagcctctgggcctgtccagcacccagtcagataccctttttcttgattgtaccattcgaggacttcaggtggaagcatcagatacctgtgcccaatgtctgtctcgtatcttatccctgatgggtccacaatctgggaagtcagctgtctctaggcactcttcatttggggaatctgtgtcattactgtggaaggtggacttgaaggtcgaagacatgaacttgtttaccctttctgccttggttggtgcttcagaggtacgactggacaccctaactatcctgggcagtgcagagacgtccactgtggggattcaaggacttgtgttagcgctggtgaaatcagtcacggagaagatgcaaccctgttgcaaggcccctgacatccctaccccagtgctcagcctttccatgctctccatcacctatcacagcagcatccgctctctggaggttcagtgtggtgcagggctgaccttactttggagccccccagatcacatgtacctgtaccagcatgtcctggccactctacagtgccgagacctactaagagccactgtgtttcctgagactgtaccatcccttgcactagagacttcaggaactacttctgagctagaaggccgtgcccctgagccattacccccaaagcggctgctaaacctaaccctggaggtgagcacagccaagctcacagcttttgtagctgaggacaagttcattaccctggctgcagagagtgtgtcactgagccggcatggaggttccctgcaggcatactgtccagagctggctgctggctttgatggcaatagtatcttcaacttcaaggaggtggaggtgcagctgctacctgagctggaagagatgatcctccaccggaaccccttccctgcgctgcagaccctccggaaccgtgtttggctcctctctttcggctcagtctcggtggagtttccttatcagtatgacttttctcgaactctagatgaggctgtgggagttcagaagtggctgaagggactacatcaagggactcgtgcttgggcctctccaagccctgtcccactcccacctgatctactcttaaaggttgagcacttctcatgggttttcttggatgatgtttttgaggtgaaacttcatgataactacgagctgatgaaggatgaaagtaaggagagtgccaaaagactacagctactggatgctaaagtggccgcccttcggaagcagcatggggagttgttgcctgcccgcaaaattgaggagctctatgcctctttggaacgcaaaaacattgaaatctacatccagcgttcccgtcgtctctatggcaacacacccatgcgccgggcactgcttacttggagcttagcagggctagaactggtagctctggcagatgcctccttccatggtcctgagcatgtggtagaacaggttcaagagcttgatccaggcagcccttttccccctgagggattagatcttgtcattcagtggtgtcgaatgctcaagtgcaatgtcaagagctttctggttcggatcagggactatccacggtacctgtttgagatccgtgactggcggctaatgggtcgacttgtgggcaccgagcagagtggtcagccttgctcccgtcggcgtcagatcttgcacttggggcttccgtggggtaacgtggcagtggagaggaacatgcccccactcaaattctaccatgactttcactcggaaatattccagtacacagtggtgtggggcccatgctgggatccagcctggacactaattggccagtgtgtggacctcttgaccaagccctcagctgaccccagcccacctttgccctggtgggacaagagccgtcttctgttccatggagactggcacatggacattgaacaggcgaacctgcaccagctggccactgaggatccatacaacacaactgaaaatatgcactgggagtggagccacctgtcttttcattggaaacctggtcagtttgtgttcaagggtgacttggatatcaacgtgagaacagcctctaagtatgacgactgctgcttccttcacctgcctgacctctgcatgacactggacctgcagtggctgtgccatgggaacccccatgatcaccatagtgtcactctgcgggccccagagttcctgcctgaggtgcccttgggccagcttcatgactcctaccgggcctttcgctcggagaacctcaatctctccatcaagatggatctgactcggcacagtggaacaatatcccagccccgaattctgctatatagtagtaccctgcgctggatgcaaaacttctgggcaacttggacaagtgtcacaaggcctatctgcaggggaaagctcttcaataacctgaaacccagcaagaagaaacttggtcagcactacaagcaactttcctatacagccctctttccccagctgcaggtacattattgggcctcatttgcccagcaacggggcatccagattgagtgcagtcagggccatgtcttcactcgggggactcagcggcttatacctcaagcaggcacagtgatgcggcgccttatctctgattggagtgttacccagatggtgagtgacctaagtcaggtgaccgttcacctgatggcctcacccactgaagagaatgctgatcactgtcttgatcccttggtaacaaagacccacctgctgagcttgtcctccctcacctaccaacggcatagcaatcgcacagctgaggaggagctctctgctcgtgatggggatcctacctttcatacacatcagctgcacttagtagatttacggatttcctggacaactaccaatcgagacattgcctttgggttatatgatgggtacaaaaaggcagctgtactcaaacgtaatctttctactgaggccctgaaggggttaaagattgatccacagatgccagccaaaaagccaaagcggggtgtcccaactagtgcctcagccccacctcgtgttaacactcccagcttcagtggacaacctgataaggggtcatcaggaggtgcttacatgttgcagaagctaattgaagagacagataggtttgtagtgttcacagaagaggaatcaggcatgagtgaccagttgtgtggcattgctgcctgccagacggatgacatatacaaccgaaactgccttattgaattggtcaactgtcagatggttcttcgtggagcagagacagaaggctgtgtcattgtgtcagctgccaaagcccaactgctgcagtgccagcaccatccagcctggtatggtgatacattgaagcaaaagacatcctggacttgcctcttggatggcatgcagtactttgccaccactgaaagcagccccacagagcaggatggccgacagctctggttagaggtgaagaatatcgaggagcaccggcagcgtagtctggactctgtgcaggagctgatggagagtgggcaggcagtgggcggcatggttaccacaaccacagattggaaccagccagctgaggcacagcaagcccagcaagtccagcggatcatttcgcgttgcaactgccgaatgtactatattagttacagccatgacattgatcctgaactagcaactcagattaagccacctgaagttcttgagaaccaggaaaaggaagatctcctaaagaagcaggaaggggctgtggataccttcacccttatccaccatgagctggaaatttccaccaacccagctcagtatgccatgatcctggacattgtcaacaacctgctgctccatgtagaacctaagcggaaggaacatagtgagaagaagcaacgggtcaggttccagcttgagatctctagcaatccagaggagcaacgcagcagcatactgcatttgcaggaggctgtgcggcagcatgtggcccaaatacgacagctggagaagcagatgtattctatcatgaagtctttgcaggatgacagcaagaatgagaatctgcttgacctgaaccagaagcttcagttgcagctaaaccaggagaaggccaacctgcagctggaaagtgaagaactgaatatcctcatcaggtgttttaaggatttccaactgcagcgggctaacaagatggagctgcgaaagcagcaagaagatgtgagtgtggtccgtcgcactgagttttactttgctcaggcacggtggcgcctgacagaggaagatggacagctgggaattgctgaattagaactgcagaggttcctctacagcaaggtgaataagtctgatgacacagcagaacatcttctggagttgggctggtttaccatgaacaacctcctccccaatgctgtctataaggtaaatgtggtgcctctcaccatccagctgacacaccagttcttccacagaatgatgggctttttctttcctggccgaagtgtggaagatgatgaagttggtgatgaagaggataagtccaaactggtgactactggaataccagtggtgaagcctcggcagctgattgcaacagatgatgcagtaccactgggccctgggaagggtgtggcacagggtttgactcggagttctggggtcagaaggtcatttcgcaaatcgccagagcaccctgtggatgacattgacaagatgaaagagcgagctgccatgaacaactccttcatctacataaagattccacaggttccactgtgtgtcagctacaagggtgagaagaacagtgtggactggggtgaccttaacctggtgctgccctgtctggagtaccacaacaacacatggacatggctagactttgccatggctgtcaaaagggacagccgcaaagccctggttgcccaggtaatcaaagagaagctaaggctgaagtctgcaacaggctctgaggtccggggaaagctagaaactaaatcggacctgaacatgcaacagcaggaagaggaggagaaagcccggctcctcattggtttaagtgtgggcgacaagaaccctggcaagaagtccatctttggcaggcgcaaatgatttggcgattcgagtggctgcagtacaggatctgactctggctcaggctccagggacttgtggggtgggaggggcttcccgttatccacgaggatttgtgggtgtcagagcccataggcatcactcttcagcacctggtctgttcgctgcagggcatggtggacagtaatgctgagttctgtctcacactgatcaggctcagggccagagaggcaacaagagagcaagacccagggaatgggcccagggcaggaccctattcccttggggtcaagtgaaagggtagggggatagtcctgatcaagtgtgataaatttttatagacatatataaatatatatatattatatatatatttctaagtgtaactgtccttcctctgtgccaggaaacgggagggggctgatcctctgatcctcactccactgtcatgtttgaaagaggtattggtgttctggagtgggggtcaacccctccccagtctctgtgctaagttcacttgggaggatggcagtaggagccagggctggccatgggtcccctacccttccccgtaggatataccctggagaatggcaaaatgatttaaagagaaaaaaaaagatattttaaatttgatgctcaaatttgt

SEQ ID NO: 351014 - DNA, 7345 bp, Homo sapiens
  misc_feature (24)..(24): n is a, c, g, or t
ggctggcgtctagaggatccctcnaaacgtatcagaacggacctacagaaagtttctgacctgtctgccccattctcccagagcgctggggtggatcaaaaggaactgtccttcagcccatccttattgaagatcttctgccaactattctccattcatgtagatgctataaacatcatggttctcaaggtggatacctctgagtccttatggcatattcagatcagtagaagcagatttcttttggatagtgatgggaaaaggctaatctgtgaggtgagcttatgtaagatcaacagcaaagttctaaagagtggtcagctggaggacacctgcctagtggagctttcactggccctggacctgtgtctaaaggtgggcattagcagtcggcatctcactgctatcactgtggatgtgtggacactccatgctgaactgcatgagggcctcttccagagccaactgctgtgccagggcccaagcctagcatctaagcctgttccctgttcagaggtgacagaaaacttagttgagccaactctgcctggcctattccttctccagcagctgccagaccaggtcaaggttaagatggagaacacaagcgtggtattgtccatgaatagtcaaaagaggcacctgacttggactctgaagctgctgcagttcctgtaccaccgtgatgaggatcagctgccccttcgaagcttcacagcaaactctgatatggcacagatgagcactgaactgctgctggaaggttcatgggtcggggtactggtactgagcgagaatgggaggactagatactctctttgctcatgccccatatggtctccttaatctaatctcagtgtaactggggagtggaaggagggaacatactgagagaaaatagccccagctcacaagttttgatgacagtctgttgatccctttgccggcttctgaccctctcccagttttacctcttgcccttccagtgctctcctctgatctgtcctctggcctcttacagatgggttgttgttgtcccagagtcgccaacgcattgtctgcctcaactccctcaaggctagtgtgcaggtgaccaccattgacctctcagcctccctagttctgaacacttgcatcattcactaccggcaccaggaattctctcactggctgcacctgctagcactggaaacccaagggtctagttcacctgttctaaagcaaaggaaaaaaagaaccttcccccaaatcctggctcccatcatctttagcacctccatctccaatgtcaacatttccattcaacttggagatacaccaccttttgccttgggattcaattctatctctctggattaccagcacctcaggccacaaagcatccatcagcggggcgtcctaactgtggaccacctctgctggcgtgtgggcagtgactcccacattcagcgggcgccacacccacccaatatgcatgtttggggtgaggcacttgttctggactccttcacactacagggtagctataaccagcctctgggcctgtccagcacccagtcagataccctttttcttgattgtaccattcgaggacttcaggtggaagcatcagatacctgtgcccaatgtctgtctcgtatcttatccctgatgggtccacaatctgggaagtcagctgtctctaggcactcttcatttggggaatctgtgtcattactgtggaaggtggacttgaaggtcgaagacatgaacttgtttaccctttctgccttggttggtgcttcagaggtacgactggacaccctaactatcctgggcagtgcagagacgtccactgtggggattcaaggacttgtgttagcgctggtgaaatcagtcacggagaagatgcaaccctgttgcaaggcccctgacatccctaccccagtgctcagcctttccatgctctccatcacctatcacagcagcatccgctctctggaggttcagtgtggtgcagggctgaccttactttggagccccccagatcacatgtacctgtaccagcatgtcctggccactctacagtgccgagacctactaagagccactgtgtttcctgagactgtaccatcccttgcactagagacttcaggaactacttctgagctagaaggccgtgcccctgagccattacccccaaagcggctgctaaacctaaccctggaggtgagcacagccaagctcacagcttttgtagctgaggacaagttcattaccctggctgcagagagtgtgtcactgagccggcatggaggttccctgcaggcatactgtccagagctggctgctggctttgatggcaatagtatcttcaacttcaaggaggtggaggtgcagctgctacctgagctggaagagatgatcctccaccggaaccccttccctgcgctgcagaccctccggaaccgtgtttggctcctctctttcggctcagtctcggtggagtttccttatcagtatgacttttctcgaactctagatgaggctgtgggagttcagaagtggctgaagggactacatcaagggactcgtgcttgggcctctccaagccctgtcccactcccacctgatctactcttaaaggttgagcacttctcatgggttttcttggatgatgtttttgaggtgaaacttcatgataactacgagctgatgaaggatgaaagtaaggagagtgccaaaagactacagctactggatgctaaagtggccgcccttcggaagcagcatggggagttgttgcctgcccgcaaaattgaggagctctatgcctctttggaacgcaaaaacattgaaatctacatccagcgttcccgtcgtctctatggcaacacacccatgcgccgggcactgcttacttggagcttagcagggctagaactggtagctctggcagatgcctccttccatggtcctgagcatgtggtagaacaggttcaagagcttgatccaggcagcccttttccccctgagggattagatcttgtcattcagtggtgtcgaatgctcaagtgcaatgtcaagagctttctggttcggatcagggactatccacggtacctgtttgagatccgtgactggcggctaatgggtcgacttgtgggcaccgagcagagtggtcagccttgctcccgtcggcgtcagatcttgcacttggggcttccgtggggtaacgtggcagtggagaggaacatgcccccactcaaattctaccatgactttcactcggaaatattccagtacacagtggtgtggggcccatgctgggatccagcctggacactaattggccagtgtgtggacctcttgaccaagccctcagctgaccccagcccacctttgccctggtgggacaagagccgtcttctgttccatggagactggcacatggacattgaacaggcgaacctgcaccagctggccactgaggatccatacaacacaactgaaaatatgcactgggagtggagccacctgtcttttcattggaaacctggtcagtttgtgttcaagggtgacttggatatcaacgtgagaacagcctctaagtatgacgactgctgcttccttcacctgcctgacctctgcatgacactggacctgcagtggctgtgccatgggaacccccatgatcaccatagtgtcactctgcgggccccagagttcctgcctgaggtgcccttgggccagcttcatgactcctaccgggcctttcgctcggagaacctcaatctctccatcaagatggatctgactcggcacagtggaacaatatcccagccccgaattctgctatatagtagtaccctgcgctggatgcaaaacttctgggcaacttggacaagtgtcacaaggcctatctgcaggggaaagctcttcaataacctgaaacccagcaagaagaaacttggtcagcactacaagcaactttcctatacagccctctttccccagctgcaggtacattattgggcctcatttgcccagcaacggggcatccagattgagtgcagtcagggccatgtcttcactcgggggactcagcggcttatacctcaagcaggcacagtgatgcggcgccttatctctgattggagtgttacccagatggtgagtgacctaagtcaggtgaccgttcacctgatggcctcacccactgaagagaatgctgatcactgtcttgatcccttggtaacaaagacccacctgctgagcttgtcctccctcacctaccaacggcatagcaatcgcacagctgaggaggagctctctgctcgtgatggggatcctacctttcatacacatcagctgcacttagtagatttacggatttcctggacaactaccaatcgagacattgcctttgggttatatgatgggtacaaaaaggcagctgtactcaaacgtaatctttctactgaggccctgaaggggttaaagattgatccacagatgccagccaaaaagccaaagcggggtgtcccaactagtgcctcagccccacctcgtgttaacactcccagcttcagtggacaacctgataaggggtcatcaggaggtgcttacatgttgcagaagctaattgaagagacagataggtttgtagtgttcacagaagaggaatcaggcatgagtgaccagttgtgtggcattgctgcctgccagacggatgacatatacaaccgaaactgccttattgaattggtcaactgtcagatggttcttcgtggagcagagacagaaggctgtgtcattgtgtcagctgccaaagcccaactgctgcagtgccagcaccatccagcctggtatggtgatacattgaagcaaaagacatcctggacttgcctcttggatggcatgcagtactttgccaccactgaaagcagccccacagagcaggatggccgacagctctggttagaggtgaagaatatcgaggagcaccggcagcgtagtctggactctgtgcaggagctgatggagagtgggcaggcagtgggcggcatggttaccacaaccacagattggaaccagccagctgaggcacagcaagcccagcaagtccagcggatcatttcgcgttgcaactgccgaatgtactatattagttacagccatgacattgatcctgaactagcaactcagattaagccacctgaagttcttgagaaccaggaaaaggaagatctcctaaagaagcaggaaggggctgtggataccttcacccttatccaccatgagctggaaatttccaccaacccagctcagtatgccatgatcctggacattgtcaacaacctgctgctccatgtagaacctaagcggaaggaacatagtgagaagaagcaacgggtcaggttccagcttgagatctctagcaatccagaggagcaacgcagcagcatactgcatttgcaggaggctgtgcggcagcatgtggcccaaatacgacagctggagaagcagatgtattctatcatgaagtctttgcaggatgacagcaagaatgagaatctgcttgacctgaaccagaagcttcagttgcagctaaaccaggagaaggccaacctgcagctggaaagtgaagaactgaatatcctcatcaggtgttttaaggatttccaactgcagcgggctaacaagatggagctgcgaaagcagcaagaagatgtgagtgtggtccgtcgcactgagttttactttgctcaggcacggtggcgcctgacagaggaagatggacagctgggaattgctgaattagaactgcagaggttcctctacagcaaggtgaataagtctgatgacacagcagaacatcttctggagttgggctggtttaccatgaacaacctcctccccaatgctgtctataaggtagtactgcggccccagagctcctgccagtctgggcgacagctagctctccgcctcttcagcaaagttcggccccctgttgggggtatctctgttaaggagcattttgaggtaaatgtggtgcctctcaccatccagctgacacaccagttcttccacagaatgatgggctttttctttcctggccgaagtgtggaagatgatgaagttggtgatgaagaggataagtccaaactggtgactactggaataccagtggtgaagcctcggcagctgattgcaacagatgatgcagtaccactgggccctgggaagggtgtggcacagggtttgactcggagttctggggtcagaaggtcatttcgcaaatcgccagagcaccctgtggatgacattgacaagatgaaagagcgagctgccatgaacaactccttcatctacataaagattccacaggttccactgtgtgtcagctacaagggtgagaagaacagtgtggactggggtgaccttaacctggtgctgccctgtctggagtaccacaacaacacatggacatggctagactttgccatggctgtcaaaagggacagccgcaaagccctggttgcccaggtaatcaaagagaagctaaggctgaagtctgcaacaggctctgaggtccggggaaagctagaaactaaatcggacctgaacatgcaacagcaggaagaggaggagaaagcccggctcctcattggtttaagtgtgggcgacaagaaccctggcaagaagtccatctttggcaggcgcaaatgatttggcgattcgagtggctgcagtacaggatctgactctggctcaggctccagggacttgtggggtgggaggggcttcccgttatccacgaggatttgtgggtgtcagagcccataggcatcactcttcagcacctggtctgttcgctgcagggcatggtggacagtaatgctgagttctgtctcacactgatcaggctcagggccagagaggcaacaagagagcaagacccagggaatgggcccagggcaggaccctattcccttggggtcaagtgaaagggtagggggatagtcctgatcaagtgtgataaatttttatagacatatataaatatatatatattatatatatatttctaagtgtaactgtccttcctctgtgccaggaaacgggagggggctgatcctctgatcctcactccactgtcatgtttgaaagaggtattggtgttctggagtgggggtcaacccctccccagtctctgtgctaagttcacttgggaggatggcagtaggagccagggctggccatgggtcccctacccttccccgtaggatataccctggagaatggcaaaatgatttaaagagaaaaaaaaagatattttaaatttgatgctcaaatttgt

SEQ ID NO: 351015 - DNA, 7133 bp, Homo sapiens
  misc_feature (24)..(24): n is a, c, g, or t
  misc_feature (7109)..(7109): n is a, c, g, or t
ggctggcgtctagaggatccctcnaaacgtatcagaacggacctacagaaagtttctgacctgtctgccccattctcccagagcgctggggtggatcaaaaggaactgtccttcagcccatccttattgaagatcttctgccaactattctccattcatgtagatgctataaacatcatggttctcaaggtggatacctctgagtccttatggcatattcagatcagtagaagcagatttcttttggatagtgatgggaaaaggctaatctgtgaggtgagcttatgtaagatcaacagcaaagttctaaagagtggtcagctggaggacacctgcctagtggagctttcactggccctggacctgtgtctaaaggtgggcattagcagtcggcatctcactgctatcactgtggatgtgtggacactccatgctgaactgcatgagggcctcttccagagccaactgctgtgccagggcccaagcctagcatctaagcctgttccctgttcagaggtgacagaaaacttagttgagccaactctgcctggcctattccttctccagcagctgccagaccaggtcaaggttaagatggagaacacaagcgtggtattgtccatgaatagtcaaaagaggcacctgacttggactctgaagctgctgcagttcctgtaccaccgtgatgaggatcagctgccccttcgaagcttcacagcaaactctgatatggcacagatgagcactgaactgctgctggaagatgggttgttgttgtcccagagtcgccaacgcattgtctgcctcaactccctcaaggctagtgtgcaggtgaccaccattgacctctcagcctccctagttctgaacacttgcatcattcactaccggcaccaggaattctctcactggctgcacctgctagcactggaaacccaagggtctagttcacctgttctaaagcaaaggaaaaaaagaaccttcccccaaatcctggctcccatcatctttagcacctccatctccaatgtcaacatttccattcaacttggagatacaccaccttttgccttgggattcaattctatctctctggattaccagcacctcaggccacaaagcatccatcagcggggcgtcctaactgtggaccacctctgctggcgtgtgggcagtgactcccacattcagcgggcgccacacccacccaatatgcatgtttggggtgaggcacttgttctggactccttcacactacagggtagctataaccagcctctgggcctgtccagcacccagtcagataccctttttcttgattgtaccattcgaggacttcaggtggaagcatcagatacctgtgcccaatgtctgtctcgtatcttatccctgatgggtccacaatctgggaagtcagctgtctctaggcactcttcatttggggaatctgtgtcattactgtggaaggtggacttgaaggtcgaagacatgaacttgtttaccctttctgccttggttggtgcttcagaggtacgactggacaccctaactatcctgggcagtgcagagacgtccactgtggggattcaaggacttgtgttagcgctggtgaaatcagtcacggagaagatgcaaccctgttgcaaggcccctgacatccctaccccagtgctcagcctttccatgctctccatcacctatcacagcagcatccgctctctggaggttcagtgtggtgcagggctgaccttactttggagccccccagatcacatgtacctgtaccagcatgtcctggccactctacagtgccgagacctactaagagccactgtgtttcctgagactgtaccatcccttgcactagagacttcaggaactacttctgagctagaaggccgtgcccctgagccattacccccaaagcggctgctaaacctaaccctggaggtgagcacagccaagctcacagcttttgtagctgaggacaagttcattaccctggctgcagagagtgtgtcactgagccggcatggaggttccctgcaggcatactgtccagagctggctgctggctttgatggcaatagtatcttcaacttcaaggaggtggaggtgcagctgctacctgagctggaagagatgatcctccaccggaaccccttccctgcgctgcagaccctccggaaccgtgtttggctcctctctttcggctcagtctcggtggagtttccttatcagtatgacttttctcgaactctagatgaggctgtgggagttcagaagtggctgaagggactacatcaagggactcgtgcttgggcctctccaagccctgtcccactcccacctgatctactcttaaaggttgagcacttctcatgggttttcttggatgatgtttttgaggtgaaacttcatgataactacgagctgatgaaggatgaaagtaaggagagtgccaaaagactacagctactggatgctaaagtggccgcccttcggaagcagcatggggagttgttgcctgcccgcaaaattgaggagctctatgcctctttggaacgcaaaaacattgaaatctacatccagcgttcccgtcgtctctatggcaacacacccatgcgccgggcactgcttacttggagcttagcagggctagaactggtagctctggcagatgcctccttccatggtcctgagcatgtggtagaacaggttcaagagcttgatccaggcagcccttttccccctgagggattagatcttgtcattcagtggtgtcgaatgctcaagtgcaatgtcaagagctttctggttcggatcagggactatccacggtacctgtttgagatccgtgactggcggctaatgggtcgacttgtgggcaccgagcagagtggtcagccttgctcccgtcggcgtcagatcttgcacttggggcttccgtggggtaacgtggcagtggagaggaacatgcccccactcaaattctaccatgactttcactcggaaatattccagtacacagtggtgtggggcccatgctgggatccagcctggacactaattggccagtgtgtggacctcttgaccaagccctcagctgaccccagcccacctttgccctggtgggacaagagccgtcttctgttccatggagactggcacatggacattgaacaggcgaacctgcaccagctggccactgaggatccatacaacacaactgaaaatatgcactgggagtggagccacctgtcttttcattggaaacctggtcagtttgtgttcaagggtgacttggatatcaacgtgagaacagcctctaagtatgacgactgctgcttccttcacctgcctgacctctgcatgacactggacctgcagtggctgtgccatgggaacccccatgatcaccatagtgtcactctgcgggccccagagttcctgcctgaggtgcccttgggccagcttcatgactcctaccgggcctttcgctcggagaacctcaatctctccatcaagatggatctgactcggcacagtggaacaatatcccagccccgaattctgctatatagtagtaccctgcgctggatgcaaaacttctgggcaacttggacaagtgtcacaaggcctatctgcaggggaaagctcttcaataacctgaaacccagcaagaagaaacttggtcagcactacaagcaactttcctatacagccctctttccccagctgcaggtacattattgggcctcatttgcccagcaacggggcatccagattgagtgcagtcagggccatgtcttcactcgggggactcagcggcttatacctcaagcaggcacagtgatgcggcgccttatctctgattggagtgttacccagatggtgagtgacctaagtcaggtgaccgttcacctgatggcctcacccactgaagagaatgctgatcactgtcttgatcccttggtaacaaagacccacctgctgagcttgtcctccctcacctaccaacggcatagcaatcgcacagctgaggaggagctctctgctcgtgatggggatcctacctttcatacacatcagctgcacttagtagatttacggatttcctggacaactaccaatcgagacattgcctttgggttatatgatgggtacaaaaaggcagctgtactcaaacgtaatctttctactgaggccctgaaggggttaaagattgatccacagatgccagccaaaaagccaaagcggggtgtcccaactagtgcctcagccccacctcgtgttaacactcccagcttcagtggacaacctgataaggggtcatcaggaggtgcttacatgttgcagaagctaattgaagagacagataggtttgtagtgttcacagaagaggaatcaggcatgagtgaccagttgtgtggcattgctgcctgccagacggatgacatatacaaccgaaactgccttattgaattggtcaactgtcagatggttcttcgtggagcagagacagaaggctgtgtcattgtgtcagctgccaaagcccaactgctgcagtgccagcaccatccagcctggtatggtgatacattgaagcaaaagacatcctggacttgcctcttggatggcatgcagtactttgccaccactgaaagcagccccacagagcaggatggccgacagctctggttagaggtgaagaatatcgaggagcaccggcagcgtagtctggactctgtgcaggagctgatggagagtgggcaggcagtgggcggcatggttaccacaaccacagattggaaccagccagctgaggcacagcaagcccagcaagtccagcggatcatttcgcgttgcaactgccgaatgtactatattagttacagccatgacattgatcctgaactagcaactcagattaagccacctgaagttcttgagaaccaggaaaaggaagatctcctaaagaagcaggaaggggctgtggataccttcacccttatccaccatgagctggaaatttccaccaacccagctcagtatgccatgatcctggacattgtcaacaacctgctgctccatgtagaacctaagcggaaggaacatagtgagaagaagcaacgggtcaggttccagcttgagatctctagcaatccagaggagcaacgcagcagcatactgcatttgcaggaggctgtgcggcagcatgtggcccaaatacgacagctggagaagcagatgtattctatcatgaagtctttgcaggatgacagcaagaatgagaatctgcttgacctgaaccagaagcttcagttgcagctaaaccaggagaaggccaacctgcagctggaaagtgaagaactgaatatcctcatcaggtgttttaaggatttccaactgcagcgggctaacaagatggagctgcgaaagcagcaagaagatgtgagtgtggtccgtcgcactgagttttactttgctcaggcacggtggcgcctgacagaggaagatggacagctgggaattgctgaattagaactgcagaggttcctctacagcaaggtgaataagtctgatgacacagcagaacatcttctggagttgggctggtttaccatgaacaacctcctccccaatgctgtctataaggtagtactgcggccccagagctcctgccagtctgggcgacagctagctctccgcctcttcagcaaagttcggccccctgttgggggtatctctgttaaggagcattttgaggtaaatgtggtgcctctcaccatccagctgacacaccagttcttccacagaatgatgggctttttctttcctggccgaagtgtggaagatgatgaagttggtgatgaagaggataagtccaaactggtgactactggaataccagtggtgaagcctcggcagctgattgcaacagatgatgcagtaccactgggccctgggaagggtgtggcacagggtttgactcggagttctggggtcagaaggtcatttcgcaaatcgccagagcaccctgtggatgacattgacaagatgaaagagcgagctgccatgaacaactccttcatctacataaagattccacaggttccactgtgtgtcagctacaagggtgagaagaacagtgtggactggggtgaccttaacctggtgctgccctgtctggagtaccacaacaacacatggacatggctagactttgccatggctgtcaaaagggacagccgcaaagccctggttgcccaggtaatcaaagagaagctaaggctgaagtctgcaacaggctctgaggtccggggaaagctagaaactaaatcggacctgaacatgcaacagcaggaagaggaggagaaagcccggctcctcattggtttaagtgtgggcgacaagaaccctggcaagaagtccatctttggcaggcgcaaatgatttggcgattcgagtggctgcagtacaggatctgactctggctcaggctccagggacttgtggggtgggaggggcttcccgttatccacgaggatttgtgggtgtcagagcccataggcatcactcttcagcacctggtctgttcgctgcagggcatggtggacagtaatgctgagttctgtctcacactgatcaggctcagggccagagaggcaacaagagagcaagacccagggaatgggcccagggcaggaccctattcccttggggtcaagtgaaagggtagggggatagtcctgatcaagtgtgataaatttttatagacatatataaatatatatatattatatatatatttctaagtgtaactgtccttcctctgtgccaggaaacgggagggggctgatcctctgatcctcactccactgtcatgtttgaaagaggtattggtgttctggagtgggggtcaacccctccccagtctctgtgctaagttcacttgggaggatggcagtaggagccagggctggccatgggtcccctacccttccccgtaggatataccctggagaatggcaaaatgatttaaagagaaaaaataggattaaaaaaataaaaaattcttccggtatgggctcgaaggaactttggcntctcttatctacttctttccttaa

SEQ ID NO: 351016 - DNA, 7064 bp, Homo sapiens
  misc_feature (24)..(24): n is a, c, g, or t
ggctggcgtctagaggatccctcnaaacgtatcagaacggacctacagaaagtttctgacctgtctgccccattctcccagagcgctggggtggatcaaaaggaactgtccttcagcccatccttattgaagatcttctgccaactattctccattcatgtagatgctataaacatcatggttctcaaggtggatacctctgagtccttatggcatattcagatcagtagaagcagatttcttttggatagtgatgggaaaaggctaatctgtgaggtgagcttatgtaagatcaacagcaaagttctaaagagtggtcagctggaggacacctgcctagtggagctttcactggccctggacctgtgtctaaaggtgggcattagcagtcggcatctcactgctatcactgtggatgtgtggacactccatgctgaactgcatgagggcctcttccagagccaactgctgtgccagggcccaagcctagcatctaagcctgttccctgttcagaggtgacagaaaacttagttgagccaactctgcctggcctattccttctccagcagctgccagaccaggtcaaggttaagatggagaacacaagcgtggtattgtccatgaatagtcaaaagaggcacctgacttggactctgaagctgctgcagttcctgtaccaccgtgatgaggatcagctgccccttcgaagcttcacagcaaactctgatatggcacagatgagcactgaactgctgctggaagatgggttgttgttgtcccagagtcgccaacgcattgtctgcctcaactccctcaaggctagtgtgcaggtgaccaccattgacctctcagcctccctagttctgaacacttgcatcattcactaccggcaccaggaattctctcactggctgcacctgctagcactggaaacccaagggtctagttcacctgttctaaagcaaaggaaaaaaagaaccttcccccaaatcctggctcccatcatctttagcacctccatctccaatgtcaacatttccattcaacttggagatacaccaccttttgccttgggattcaattctatctctctggattaccagcacctcaggccacaaagcatccatcagcggggcgtcctaactgtggaccacctctgctggcgtgtgggcagtgactcccacattcagcgggcgccacacccacccaatatgcatgtttggggtgaggcacttgttctggactccttcacactacagggtagctataaccagcctctgggcctgtccagcacccagtcagataccctttttcttgattgtaccattcgaggacttcaggtggaagcatcagatacctgtgcccaatgtctgtctcgtatcttatccctgatgggtccacaatctgggaagtcagctgtctctaggcactcttcatttggggaatctgtgtcattactgtggaaggtggacttgaaggtcgaagacatgaacttgtttaccctttctgccttggttggtgcttcagaggtacgactggacaccctaactatcctgggcagtgcagagacgtccactgtggggattcaaggacttgtgttagcgctggtgaaatcagtcacggagaagatgcaaccctgttgcaaggcccctgacatccctaccccagtgctcagcctttccatgctctccatcacctatcacagcagcatccgctctctggaggttcagtgtggtgcagggctgaccttactttggagccccccagatcacatgtacctgtaccagcatgtcctggccactctacagtgccgagacctactaagagccactgtgtttcctgagactgtaccatcccttgcactagagacttcaggaactacttctgagctagaaggccgtgcccctgagccattacccccaaagcggctgctaaacctaaccctggaggtgagcacagccaagctcacagcttttgtagctgaggacaagttcattaccctggctgcagagagtgtgtcactgagccggcatggaggttccctgcaggcatactgtccagagctggctgctggctttgatggcaatagtatcttcaacttcaaggaggtggaggtgcagctgctacctgagctggaagagatgatcctccaccggaaccccttccctgcgctgcagaccctccggaaccgtgtttggctcctctctttcggctcagtctcggtggagtttccttatcagtatgacttttctcgaactctagatgaggctgtgggagttcagaagtggctgaagggactacatcaagggactcgtgcttgggcctctccaagccctgtcccactcccacctgatctactcttaaaggttgagcacttctcatgggttttcttggatgatgtttttgaggtgaaacttcatgataactacgagctgatgaaggatgaaagtaaggagagtgccaaaagactacagctactggatgctaaagtggccgcccttcggaagcagcatggggagttgttgcctgcccgcaaaattgaggagctctatgcctctttggaacgcaaaaacattgaaatctacatccagcgttcccgtcgtctctatggcaacacacccatgcgccgggcactgcttacttggagcttagcagggctagaactggtagctctggcagatgcctccttccatggtcctgagcatgtggtagaacaggttcaagagcttgatccaggcagcccttttccccctgagggattagatcttgtcattcagtggtgtcgaatgctcaagtgcaatgtcaagagctttctggttcggatcagggactatccacggtacctgtttgagatccgtgactggcggctaatgggtcgacttgtgggcaccgagcagagtggtcagccttgctcccgtcggcgtcagatcttgcacttggggcttccgtggggtaacgtggcagtggagaggaacatgcccccactcaaattctaccatgactttcactcggaaatattccagtacacagtggtgtggggcccatgctgggatccagcctggacactaattggccagtgtgtggacctcttgaccaagccctcagctgaccccagcccacctttgccctggtgggacaagagccgtcttctgttccatggagactggcacatggacattgaacaggcgaacctgcaccagctggccactgaggatccatacaacacaactgaaaatatgcactgggagtggagccacctgtcttttcattggaaacctggtcagtttgtgttcaagggtgacttggatatcaacgtgagaacagcctctaagtatgacgactgctgcttccttcacctgcctgacctctgcatgacactggacctgcagtggctgtgccatgggaacccccatgatcaccatagtgtcactctgcgggccccagagttcctgcctgaggtgcccttgggccagcttcatgactcctaccgggcctttcgctcggagaacctcaatctctccatcaagatggatctgactcggcacagtggaacaatatcccagccccgaattctgctatatagtagtaccctgcgctggatgcaaaacttctgggcaacttggacaagtgtcacaaggcctatctgcaggggaaagctcttcaataacctgaaacccagcaagaagaaacttggtcagcactacaagcaactttcctatacagccctctttccccagctgcaggtacattattgggcctcatttgcccagcaacggggcatccagattgagtgcagtcagggccatgtcttcactcgggggactcagcggcttatacctcaagcaggcacagtgatgcggcgccttatctctgattggagtgttacccagatggtgagtgacctaagtcaggtgaccgttcacctgatggcctcacccactgaagagaatgctgatcactgtcttgatcccttggtaacaaagacccacctgctgagcttgtcctccctcacctaccaacggcatagcaatcgcacagctgaggaggagctctctgctcgtgatggggatcctacctttcatacacatcagctgcacttagtagatttacggatttcctggacaactaccaatcgagacattgcctttgggttatatgatgggtacaaaaaggcagctgtactcaaacgtaatctttctactgaggccctgaaggggttaaagattgatccacagatgccagccaaaaagccaaagcggggtgtcccaactagtgcctcagccccacctcgtgttaacactcccagcttcagtggacaacctgataaggggtcatcaggaggtgcttacatgttgcagaagctaattgaagagacagataggtttgtagtgttcacagaagaggaatcaggcatgagtgaccagttgtgtggcattgctgcctgccagacggatgacatatacaaccgaaactgccttattgaattggtcaactgtcagatggttcttcgtggagcagagacagaaggctgtgtcattgtgtcagctgccaaagcccaactgctgcagtgccagcaccatccagcctggtatggtgatacattgaagcaaaagacatcctggacttgcctcttggatggcatgcagtactttgccaccactgaaagcagccccacagagcaggatggccgacagctctggttagaggtgaagaatatcgaggagcaccggcagcgtagtctggactctgtgcaggagctgatggagagtgggcaggcagtgggcggcatggttaccacaaccacagattggaaccagccagctgaggcacagcaagcccagcaagtccagcggatcatttcgcgttgcaactgccgaatgtactatattagttacagccatgacattgatcctgaactagcaactcagattaagccacctgaagttcttgagaaccaggaaaaggaagatctcctaaagaagcaggaaggggctgtggataccttcacccttatccaccatgagctggaaatttccaccaacccagctcagtatgccatgatcctggacattgtcaacaacctgctgctccatgtagaacctaagcggaaggaacatagtgagaagaagcaacgggtcaggttccagcttgagatctctagcaatccagaggagcaacgcagcagcatactgcatttgcaggaggctgtgcggcagcatgtggcccaaatacgacagctggagaagcagatgtattctatcatgaagtctttgcaggatgacagcaagaatgagaatctgcttgacctgaaccagaagcttcagttgcagctaaaccaggagaaggccaacctgcagctggaaagtgaagaactgaatatcctcatcaggtgttttaaggatttccaactgcagcgggctaacaagatggagctgcgaaagcagcaagaagatgtgagtgtggtccgtcgcactgagttttactttgctcaggcacggtggcgcctgacagaggaagatggacagctgggaattgctgaattagaactgcagaggttcctctacagcaaggtgaataagtctgatgacacagcagaacatcttctggagttgggctggtttaccatgaacaacctcctccccaatgctgtctataaggtagtactgcggccccagagctcctgccagtctgggcgacagctagctctccgcctcttcagcaaagttcggccccctgttgggggtatctctgttaaggagcattttgaggtaaatgtggtgcctctcaccatccagctgacacaccagttcttccacagaatgatgggctttttctttcctggccgaagtgtggaagatgatgaagttggtgatgaagaggataagtccaaactggtgactactggaataccagtggtgaagcctcggcagctgattgcaacagatgatgcagtaccactgggccctgggaagggtgtggcacagggtttgactcggagttctggggtcagaaggtcatttcgcaaatcgccagagcaccctgtggatgacattgacaagatgaaagagcgagctgccatgaacaactccttcatctacataaagattccacaggttccactgtgtgtcagctacaagggtgagaagaacagtgtggactggggtgaccttaacctggtgctgccctgtctggagtaccacaacaacacatggacatggctagactttgccatggctgtcaaaagggacagccgcaaagccctggttgcccaggtaatcaaagagaagctaaggctgaagtctgcaacaggctctgaggtccggggaaagctagaaactaaatcggacctgaacatgcaacagcaggaagaggaggagaaagcccggctcctcattggtttaagtgtgggcgacaagaaccctggcaagaagtccatctttggcaggcgcaaatgatttggcgattcgagtggctgcagtacaggatctgactctggctcaggctccagggacttgtggggtgggaggggcttcccgttatccacgaggatttgtgggtgtcagagcccataggcatcactcttcagcacctggtctgttcgctgcagggcatggtggacagtaatgctgagttctgtctcacactgatcaggctcagggccagagaggcaacaagagagcaagagaccctattcccttggggtcaagtgaaagggtagggggatagtcctgatcaagtgtgataaatttttatagacatatataaatatatatatattatatatatatttctaagtgtaactgtccttcctctgtgccaggaaacgggagggggctgatcctctgatcctcactccactgtcatgtttgaaagaggtattggtgttctggagtgggggtcaacccctccccagtctctgtgctaagttcacttgggaggatggcagtaggagccagggctggccatgggtcccctacccttccccgtaggatataccctggagaatggcaaaatgatttaaagagaaaaaaaaagatattttaaatttgatgctcaaatttgt

SEQ ID NO: 351017 - DNA, 7028 bp, Homo sapiens
  misc_feature (24)..(24): n is a, c, g, or t
ggctggcgtctagaggatccctcnaaacgtatcagaacggacctacagaaagtttctgacctgtctgccccattctcccagagcgctggggtggatcaaaaggaactgtccttcagcccatccttattgaagatcttctgccaactattctccattcatgtagatgctataaacatcatggttctcaaggtggatacctctgagtccttatggcatattcagatcagtagaagcagatttcttttggatagtgatgggaaaaggctaatctgtgaggtgagcttatgtaagatcaacagcaaagttctaaagagtggtcagctggaggacacctgcctagtggagctttcactggccctggacctgtgtctaaaggtgggcattagcagtcggcatctcactgctatcactgtggatgtgtggacactccatgctgaactgcatgagggcctcttccagagccaactgctgtgccagggcccaagcctagcatctaagcctgttccctgttcagaggtgacagaaaacttagttgagccaactctgcctggcctattccttctccagcagctgccagaccaggtcaaggttaagatggagaacacaagcgtggtattgtccatgaatagtcaaaagaggcacctgacttggactctgaagctgctgcagttcctgtaccaccgtgatgaggatcagctgccccttcgaagcttcacagcaaactctgatatggcacagatgagcactgaactgctgctggaagatgggttgttgttgtcccagagtcgccaacgcattgtctgcctcaactccctcaaggctagtgtgcaggtgaccaccattgacctctcagcctccctagttctgaacacttgcatcattcactaccggcaccaggaattctctcactggctgcacctgctagcactggaaacccaagggtctagttcacctgttctaaagcaaaggaaaaaaagaaccttcccccaaatcctggctcccatcatctttagcacctccatctccaatgtcaacatttccattcaacttggagatacaccaccttttgccttgggattcaattctatctctctggattaccagcacctcaggccacaaagcatccatcagcggggcgtcctaactgtggaccacctctgctggcgtgtgggcagtgactcccacattcagcgggcgccacacccacccaatatgcatgtttggggtgaggcacttgttctggactccttcacactacagggtagctataaccagcctctgggcctgtccagcacccagtcagataccctttttcttgattgtaccattcgaggacttcaggtggaagcatcagatacctgtgcccaatgtctgtctcgtatcttatccctgatgggtccacaatctgggaagtcagctgtctctaggcactcttcatttggggaatctgtgtcattactgtggaaggtggacttgaaggtcgaagacatgaacttgtttaccctttctgccttggttggtgcttcagaggtacgactggacaccctaactatcctgggcagtgcagagacgtccactgtggggattcaaggacttgtgttagcgctggtgaaatcagtcacggagaagatgcaaccctgttgcaaggcccctgacatccctaccccagtgctcagcctttccatgctctccatcacctatcacagcagcatccgctctctggaggttcagtgtggtgcagggctgaccttactttggagccccccagatcacatgtacctgtaccagcatgtcctggccactctacagtgccgagacctactaagagccactgtgtttcctgagactgtaccatcccttgcactagagacttcaggaactacttctgagctagaaggccgtgcccctgagccattacccccaaagcggctgctaaacctaaccctggaggtgagcacagccaagctcacagcttttgtagctgaggacaagttcattaccctggctgcagagagtgtgtcactgagccggcatggaggttccctgcaggcatactgtccagagctggctgctggctttgatggcaatagtatcttcaacttcaaggaggtggaggtgcagctgctacctgagctggaagagatgatcctccaccggaaccccttccctgcgctgcagaccctccggaaccgtgtttggctcctctctttcggctcagtctcggtggagtttccttatcagtatgacttttctcgaactctagatgaggctgtgggagttcagaagtggctgaagggactacatcaagggactcgtgcttgggcctctccaagccctgtcccactcccacctgatctactcttaaaggttgagcacttctcatgggttttcttggatgatgtttttgaggtgaaacttcatgataactacgagctgatgaaggatgaaagtaaggagagtgccaaaagactacagctactggatgctaaagtggccgcccttcggaagcagcatggggagttgttgcctgcccgcaaaattgaggagctctatgcctctttggaacgcaaaaacattgaaatctacatccagcgttcccgtcgtctctatggcaacacacccatgcgccgggcactgcttacttggagcttagcagggctagaactggtagctctggcagatgcctccttccatggtcctgagcatgtggtagaacaggttcaagagcttgatccaggcagcccttttccccctgagggattagatcttgtcattcagtggtgtcgaatgctcaagtgcaatgtcaagagctttctggttcggatcagggactatccacggtacctgtttgagatccgtgactggcggctaatgggtcgacttgtgggcaccgagcagagtggtcagccttgctcccgtcggcgtcagatcttgcacttggggcttccgtggggtaacgtggcagtggagaggaacatgcccccactcaaattctaccatgactttcactcggaaatattccagtacacagtggtgtggggcccatgctgggatccagcctggacactaattggccagtgtgtggacctcttgaccaagccctcagctgaccccagcccacctttgccctggtgggacaagagccgtcttctgttccatggagactggcacatggacattgaacaggcgaacctgcaccagctggccactgaggatccatacaacacaactgaaaatatgcactgggagtggagccacctgtcttttcattggaaacctggtcagtttgtgttcaagggtgacttggatatcaacgtgagaacagcctctaagtatgacgactgctgcttccttcacctgcctgacctctgcatgacactggacctgcagtggctgtgccatgggaacccccatgatcaccatagtgtcactctgcgggccccagagttcctgcctgaggtgcccttgggccagcttcatgactcctaccgggcctttcgctcggagaacctcaatctctccatcaagatggatctgactcggcacagtggaacaatatcccagccccgaattctgctatatagtagtaccctgcgctggatgcaaaacttctgggcaacttggacaagtgtcacaaggcctatctgcaggggaaagctcttcaataacctgaaacccagcaagaagaaacttggtcagcactacaagcaactttcctatacagccctctttccccagctgcaggtacattattgggcctcatttgcccagcaacggggcatccagattgagtgcagtcagggccatgtcttcactcgggggactcagcggcttatacctcaagcaggcacagtgatgcggcgccttatctctgattggagtgttacccagatggtgagtgacctaagtcaggtgaccgttcacctgatggcctcacccactgaagagaatgctgatcactgtcttgatcccttggtaacaaagacccacctgctgagcttgtcctccctcacctaccaacggcatagcaatcgcacagctgaggaggagctctctgctcgtgatggggatcctacctttcatacacatcagctgcacttagtagatttacggatttcctggacaactaccaatcgagacattgcctttgggttatatgatgggtacaaaaaggcagctgtactcaaacgtaatctttctactgaggccctgaaggggttaaagattgatccacagatgccagccaaaaagccaaagcggggtgtcccaactagtgcctcagccccacctcgtgttaacactcccagcttcagtggacaacctgataaggggtcatcaggaggtgcttacatgttgcagaagctaattgaagagacagataggtttgtagtgttcacagaagaggaatcaggcatgagtgaccagttgtgtggcattgctgcctgccagacggatgacatatacaaccgaaactgccttattgaattggtcaactgtcagatggttcttcgtggagcagagacagaaggctgtgtcattgtgtcagctgccaaagcccaactgctgcagtgccagcaccatccagcctggtatggtgatacattgaagcaaaagacatcctggacttgcctcttggatggcatgcagtactttgccaccactgaaagcagccccacagagcaggatggccgacagctctggttagaggtgaagaatatcgaggagcaccggcagcgtagtctggactctgtgcaggagctgatggagagtgggcaggcagtgggcggcatggttaccacaaccacagattggaaccagccagctgaggcacagcaagcccagcaagtccagcggatcatttcgcgttgcaactgccgaatgtactatattagttacagccatgacattgatcctgaactagcaactcagattaagccacctgaagttcttgagaaccaggaaaaggaagatctcctaaagaagcaggaaggggctgtggataccttcacccttatccaccatgagctggaaatttccaccaacccagctcagtatgccatgatcctggacattgtcaacaacctgctgctccatgtagaacctaagcggaaggaacatagtgagaagaagcaacgggtcaggttccagcttgagatctctagcaatccagaggagcaacgcagcagcatactgcatttgcaggaggctgtgcggcagcatgtggcccaaatacgacagctggagaagcagatgtattctatcatgaagtctttgcaggatgacagcaagaatgagaatctgcttgacctgaaccagaagcttcagttgcagctaaaccaggagaaggccaacctgcagctggaaagtgaagaactgaatatcctcatcaggtgttttaaggatttccaactgcagcgggctaacaagatggagctgcgaaagcagcaagaagatgtgagtgtggtccgtcgcactgagttttactttgctcaggcacggtggcgcctgacagaggaagatggacagctgggaattgctgaattagaactgcagaggttcctctacagcaaggtgaataagtctgatgacacagcagaacatcttctggagttgggctggtttaccatgaacaacctcctccccaatgctgtctataaggtagtactgcggccccagagctcctgccagtctgggcgacagctagctctccgcctcttcagcaaagttcggccccctgttgggggtatctctgttaaggagcattttgaggtaaatgtggtgcctctcaccatccagctgacacaccagttcttccacagaatgatgggctttttctttcctggccgaagtgtggaagatgatgaagttggtgatgaagaggataagtccaaactggtgactactggaataccagtggtgaagcctcggcagctgattgcaacagatgatgcagtaccactgggccctgggaagggtgtggcacagggtttgactcggagttctggggtcagaaggtcatttcgcaaatcgccagagcaccctgtggatgacattgacaagatgaaagagcgagctgccatgaacaactccttcatctacataaagattccacaggttccactgtgtgtcagctacaagggtgagaagaacagtgtggactggggtgaccttaacctggtgctgccctgtctggagtaccacaacaacacatggacatggctagactttgccatggctgtcaaaagggacagccgcaaagccctggttgcccaggtaatcaaagagaagctaaggctgaagtctgcaacaggctctgaggtccggggaaagctagaaactaaatcggacctgaacatgcaacagcaggaagaggaggagaaagcccggctcctcattggtttaagtgtgggcgacaagaaccctggcaagaagtccatctttggcaggcgcaaatgatttggcgattcgagtggctgcagtacaggatctgactctggctcaggctccagggacttgtggggtgggaggggcttcccgttatccacgaggatttgtgggtgtcagagcccataggcatcactcttcagcacctggtctgttcgctgcagggcatggtggacagtaatgctgagttctgtctcacactgatcaggctcagggccagagaggcaacaagagagcaagaggatagtcctgatcaagtgtgataaatttttatagacatatataaatatatatatattatatatatatttctaagtgtaactgtccttcctctgtgccaggaaacgggagggggctgatcctctgatcctcactccactgtcatgtttgaaagaggtattggtgttctggagtgggggtcaacccctccccagtctctgtgctaagttcacttgggaggatggcagtaggagccagggctggccatgggtcccctacccttccccgtaggatataccctggagaatggcaaaatgatttaaagagaaaaaaaaagatattttaaatttgatgctcaaatttgt

SEQ ID NO: 351018 - DNA, 5628 bp, Homo sapiens
  misc_feature (24)..(24): n is a, c, g, or t
ggctggcgtctagaggatccctcnaaacgtatcagaacggacctacagaaagtttctgacctgtctgccccattctcccagagcgctggggtggatcaaaaggaactgtccttcagcccatccttattgaagatcttctgccaactattctccattcatgtagatgctataaacatcatggttctcaaggtggatacctctgagtccttatggcatattcagatcagtagaagcagatttcttttggatagtgatgggaaaaggctaatctgtgaggtgagcttatgtaagatcaacagcaaagttctaaagagtggtcagctggaggacacctgcctagtggagctttcactggccctggacctgtgtctaaaggtgggcattagcagtcggcatctcactgctatcactgtggatgtgtggacactccatgctgaactgcatgagggcctcttccagagccaactgctgtgccagggcccaagcctagcatctaagcctgttccctgttcagaggtgacagaaaacttagttgagccaactctgcctggcctattccttctccagcagctgccagaccaggtcaaggttaagatggagaacacaagcgtggtattgtccatgaatagtcaaaagaggcacctgacttggactctgaagctgctgcagttcctgtaccaccgtgatgaggatcagctgccccttcgaagcttcacagcaaactctgatatggcacagatgagcactgaactgctgctggaagatgggttgttgttgtcccagagtcgccaacgcattgtctgcctcaactccctcaaggctagtgtgcaggtgaccaccattgacctctcagcctccctagttctgaacacttgcatcattcactaccggcaccaggaattctctcactggctgcacctgctagcactggaaacccaagggtctagttcacctgttctaaagcaaaggaaaaaaagaaccttcccccaaatcctggctcccatcatctttagcacctccatctccaatgtcaacatttccattcaacttggagatacaccaccttttgccttgggattcaattctatctctctggattaccagcacctcaggccacaaagcatccatcagcggggcgtcctaactgtggaccacctctgctggcgtgtgggcagtgactcccacattcagcgggcgccacacccacccaatatgcatgtttggggtgaggcacttgttctggactccttcacactacagggtagctataaccagcctctgggcctgtccagcacccagtcagataccctttttcttgattgtaccattcgaggacttcaggtggaagcatcagatacctgtgcccaatgtctgtctcgtatcttatccctgatgggtccacaatctgggaagtcagctgtctctaggcactcttcatttggggaatctgtgtcattactgtggaaggtggacttgaaggtcgaagacatgaacttgtttaccctttctgccttggttggtgcttcagaggtacgactggacaccctaactatcctgggcagtgcagagacgtccactgtggggattcaaggacttgtgttagcgctggtgaaatcagtcacggagaagatgcaaccctgttgcaaggcccctgacatccctaccccagtgctcagcctttccatgctctccatcacctatcacagcagcatccgctctctggaggttcagtgtggtgcagggctgaccttactttggagccccccagatcacatgtacctgtaccagcatgtcctggccactctacagtgccgagacctactaagagccactgtgtttcctgagactgtaccatcccttgcactagagacttcaggaactacttctgagctagaaggccgtgcccctgagccattacccccaaagcggctgctaaacctaaccctggaggtgagcacagccaagctcacagcttttgtagctgaggacaagttcattaccctggctgcagagagtgtgtcactgagccggcatggaggttccctgcaggcatactgtccagagctggctgctggctttgatggcaatagtatcttcaacttcaaggaggtggaggtgcagctgctacctgagctggaagagatgatcctccaccggaaccccttccctgcgctgcagaccctccggaaccgtgtttggctcctctctttcggctcagtctcggtggagtttccttatcagtatgacttttctcgaactctagatgaggctgtgggagttcagaagtggctgaagggactacatcaagggactcgtgcttgggcctctccaagccctgtcccactcccacctgatctactcttaaaggttgagcacttctcatgggttttcttggatgatgtttttgaggtgaaacttcatgataactacgagctgatgaaggatgaaagtaaggagagtgccaaaagactacagctactggatgctaaagtggccgcccttcggaagcagcatggggagttgttgcctgcccgcaaaattgaggagctctatgcctctttggaacgcaaaaacattgaaatctacatccagcgttcccgtcgtctctatggcaacacacccatgcgccgggcactgcttacttggagcttagcagggctagaactggtagctctggcagatgcctccttccatggtcctgagcatgtggtagaacaggttcaagagcttgatccaggcagcccttttccccctgagggattagatcttgtcattcagtggtgtcgaatgctcaagtgcaatgtcaagagctttctggttcggatcagggactatccacggtacctgtttgagatccgtgactggcggctaatgggtcgacttgtgggcaccgagcagagtggtcagccttgctcccgtcggcgtcagatcttgcacttggggcttccgtggggtaacgtggcagtggagaggaacatgcccccactcaaattctaccatgactttcactcggaaatattccagtacacagtggtgtggggcccatgctgggatccagcctggacactaattggccagtgtgtggacctcttgaccaagccctcagctgaccccagcccacctttgccctggtgggacaagagccgtcttctgttccatggagactggcacatggacattgaacaggcgaacctgcaccagctggccactgaggatccatacaacacaactgaaaatatgcactgggagtggagccacctgtcttttcattggaaacctggtcagtttgtgttcaagggtgacttggatatcaacgtgagaacagcctctaagtatgacgactgctgcttccttcacctgcctgacctctgcatgacactggacctgcagtggctgtgccatgggaacccccatgatcaccatagtgtcactctgcgggccccagagttcctgcctgaggtgcccttgggccagcttcatgactcctaccgggcctttcgctcggagaacctcaatctctccatcaagatggatctgactcggcacagtggaacaatatcccagccccgaattctgctatatagtagtaccctgcgctggatgcaaaacttctgggcaacttggacaagtgtcacaaggcctatctgcaggggaaagctcttcaataacctgaaacccagcaagaagaaacttggtcagcactacaagcaactttcctatacagccctctttccccagctgcaggtacattattgggcctcatttgcccagcaacggggcatccagattgagtgcagtcagggccatgtcttcactcgggggactcagcggcttatacctcaagcaggcacagtgatgcggcgccttatctctgattggagtgttacccagatggtgagtgacctaagtcaggtgaccgttcacctgatggcctcacccactgaagagaatgctgatcactgtcttgatcccttggtaacaaagacccacctgctgagcttgtcctccctcacctaccaacggcatagcaatcgcacagctgaggaggagctctctgctcgtgatggggatcctacctttcatacacatcagctgcacttagtagatttacggatttcctggacaactaccaatcgagacattgcctttgggttatatgatgggtacaaaaaggcagctgtactcaaacgtaatctttctactgaggccctgaaggggttaaagattgatccacagatgccagccaaaaagccaaagcggggtgtcccaactagtgcctcagccccacctcgtgttaacactcccagcttcagtggacaacctgataaggggtcatcaggaggtgcttacatgttgcagaagctaattgaagagacagataggtttgtagtgttcacagaagaggaatcaggcatgagtgaccagttgtgtggcattgctgcctgccagacggatgacatatacaaccgaaactgccttattgaattggtcaactgtcagatggttcttcgtggagcagagacagaaggctgtgtcattgtgtcagctgccaaagcccaactgctgcagtgccagcaccatccagcctggtatggtgatacattgaagcaaaagacatcctggacttgcctcttggatggcatgcagtactttgccaccactgaaagcagccccacagagcaggatggccgacagctctggttagaggtgaagaatatcgaggagcaccggcagcgtagtctggactctgtgcaggagctgatggagagtgggcaggcagtgggcggcatggttaccacaaccacagattggaaccagccagctgaggcacagcaagcccagcaagtccagcggatcatttcgcgttgcaactgccgaatgtactatattagttacagccatgacattgatcctgaactagcaactcagattaagccacctgaagttcttgagaaccaggaaaaggaagatctcctaaagaagcaggaaggggctgtggataccttcacccttatccaccatgagctggaaatttccaccaacccagctcagtatgccatgatcctggacattgtcaacaacctgctgctccatgtagaacctaagcggaaggaacatagtgagaagaagcaacgggtcaggttccagcttgagatctctagcaatccagaggagcaacgcagcagcatactgcatttgcaggaggctgtgcggcagcatgtggcccaaatacgacagctggagaagcagatgtattctatcatgaagtctttgcaggatgacagcaagaatgagaatctgcttgacctgaaccagaagcttcagttgcagctaaaccaggagaaggccaacctgcagctggaaagtgaagaactgaatatcctcatcaggtgttttaaggatttccaactgcagcgggctaacaagatggagctgcgaaagcagcaagaagatgtgagtgtggtccgtcgcactgagttttactttgctcaggcacggtggcgcctgacagaggaagatggacagctgggaattgctgaattagaactgcagaggttcctctacagcaaggtatctggggtatatggtcacacaaaggcagctgtattgagagacattgacctagct

SEQ ID NO: 351019 - DNA, 5564 bp, Homo sapiens
  misc_feature (24)..(24): n is a, c, g, or t
ggctggcgtctagaggatccctcnaaacgtatcagaacggacctacagaaagtttctgacctgtctgccccattctcccagagcgctggggtggatcaaaaggaactgtccttcagcccatccttattgaagatcttctgccaactattctccattcatgtagatgctataaacatcatggttctcaaggtggatacctctgagtccttatggcatattcagatcagtagaagcagatttcttttggatagtgatgggaaaaggctaatctgtgaggtgagcttatgtaagatcaacagcaaagttctaaagagtggtcagctggaggacacctgcctagtggagctttcactggccctggacctgtgtctaaaggtgggcattagcagtcggcatctcactgctatcactgtggatgtgtggacactccatgctgaactgcatgagggcctcttccagagccaactgctgtgccagggcccaagcctagcatctaagcctgttccctgttcagaggtgacagaaaacttagttgagccaactctgcctggcctattccttctccagcagctgccagaccaggtcaaggttaagatggagaacacaagcgtggtattgtccatgaatagtcaaaagaggcacctgacttggactctgaagctgctgcagttcctgtaccaccgtgatgaggatcagctgccccttcgaagcttcacagcaaactctgatatggcacagatgagcactgaactgctgctggaagatgggttgttgttgtcccagagtcgccaacgcattgtctgcctcaactccctcaaggctagtgtgcaggtgaccaccattgacctctcagcctccctagttctgaacacttgcatcattcactaccggcaccaggaattctctcactggctgcacctgctagcactggaaacccaagggtctagttcacctgttctaaagcaaaggaaaaaaagaaccttcccccaaatcctggctcccatcatctttagcacctccatctccaatgtcaacatttccattcaacttggagatacaccaccttttgccttgggattcaattctatctctctggattaccagcacctcaggccacaaagcatccatcagcggggcgtcctaactgtggaccacctctgctggcgtgtgggcagtgactcccacattcagcgggcgccacacccacccaatatgcatgtttggggtgaggcacttgttctggactccttcacactacagggtagctataaccagcctctgggcctgtccagcacccagtcagataccctttttcttgattgtaccattcgaggacttcaggtggaagcatcagatacctgtgcccaatgtctgtctcgtatcttatccctgatgggtccacaatctgggaagtcagctgtctctaggcactcttcatttggggaatctgtgtcattactgtggaaggtggacttgaaggtcgaagacatgaacttgtttaccctttctgccttggttggtgcttcagaggtacgactggacaccctaactatcctgggcagtgcagagacgtccactgtggggattcaaggacttgtgttagcgctggtgaaatcagtcacggagaagatgcaaccctgttgcaaggcccctgacatccctaccccagtgctcagcctttccatgctctccatcacctatcacagcagcatccgctctctggaggttcagtgtggtgcagggctgaccttactttggagccccccagatcacatgtacctgtaccagcatgtcctggccactctacagtgccgagacctactaagagccactgtgtttcctgagactgtaccatcccttgcactagagacttcaggaactacttctgagctagaaggccgtgcccctgagccattacccccaaagcggctgctaaacctaaccctggaggtgagcacagccaagctcacagcttttgtagctgaggacaagttcattaccctggctgcagagagtgtgtcactgagccggcatggaggttccctgcaggcatactgtccagagctggctgctggctttgatggcaatagtatcttcaacttcaaggaggtggaggtgcagctgctacctgagctggaagagatgatcctccaccggaaccccttccctgcgctgcagaccctccggaaccgtgtttggctcctctctttcggctcagtctcggtggagtttccttatcagtatgacttttctcgaactctagatgaggctgtgggagttcagaagtggctgaagggactacatcaagggactcgtgcttgggcctctccaagccctgtcccactcccacctgatctactcttaaaggttgagcacttctcatgggttttcttggatgatgtttttgaggtgaaacttcatgataactacgagctgatgaaggatgaaagtaaggagagtgccaaaagactacagctactggatgctaaagtggccgcccttcggaagcagcatggggagttgttgcctgcccgcaaaattgaggagctctatgcctctttggaacgcaaaaacattgaaatctacatccagcgttcccgtcgtctctatggcaacacacccatgcgccgggcactgcttacttggagcttagcagggctagaactggtagctctggcagatgcctccttccatggtcctgagcatgtggtagaacaggttcaagagcttgatccaggcagcccttttccccctgagggattagatcttgtcattcagtggtgtcgaatgctcaagtgcaatgtcaagagctttctggttcggatcagggactatccacggtacctgtttgagatccgtgactggcggctaatgggtcgacttgtgggcaccgagcagagtggtcagccttgctcccgtcggcgtcagatcttgcacttggggcttccgtggggtaacgtggcagtggagaggaacatgcccccactcaaattctaccatgactttcactcggaaatattccagtacacagtggtgtggggcccatgctgggatccagcctggacactaattggccagtgtgtggacctcttgaccaagccctcagctgaccccagcccacctttgccctggtgggacaagagccgtcttctgttccatggagactggcacatggacattgaacaggcgaacctgcaccagctggccactgaggatccatacaacacaactgaaaatatgcactgggagtggagccacctgtcttttcattggaaacctggtcagtttgtgttcaagggtgacttggatatcaacgtgagaacagcctctaagtatgacgactgctgcttccttcacctgcctgacctctgcatgacactggacctgcagtggctgtgccatgggaacccccatgatcaccatagtgtcactctgcgggccccagagttcctgcctgaggtgcccttgggccagcttcatgactcctaccgggcctttcgctcggagaacctcaatctctccatcaagatggatctgactcggcacagtggaacaatatcccagccccgaattctgctatatagtagtaccctgcgctggatgcaaaacttctgggcaacttggacaagtgtcacaaggcctatctgcaggggaaagctcttcaataacctgaaacccagcaagaagaaacttggtcagcactacaagcaactttcctatacagccctctttccccagctgcaggtacattattgggcctcatttgcccagcaacggggcatccagattgagtgcagtcagggccatgtcttcactcgggggactcagcggcttatacctcaagcaggcacagtgatgcggcgccttatctctgattggagtgttacccagatggtgagtgacctaagtcaggtgaccgttcacctgatggcctcacccactgaagagaatgctgatcactgtcttgatcccttggtaacaaagacccacctgctgagcttgtcctccctcacctaccaacggcatagcaatcgcacagctgaggaggagctctctgctcgtgatggggatcctacctttcatacacatcagctgcacttagtagatttacggatttcctggacaactaccaatcgagacattgcctttgggttatatgatgggtacaaaaaggcagctgtactcaaacgtaatctttctactgaggccctgaaggggttaaagattgatccacagatgccagccaaaaagccaaagcggggtgtcccaactagtgcctcagccccacctcgtgttaacactcccagcttcagtggacaacctgataaggggtcatcaggaggtgcttacatgttgcagaagctaattgaagagacagataggtttgtagtgttcacagaagaggaatcaggcatgagtgaccagttgtgtggcattgctgcctgccagacggatgacatatacaaccgaaactgccttattgaattggtcaactgtcagatggttcttcgtggagcagagacagaaggctgtgtcattgtgtcagctgccaaagcccaactgctgcagtgccagcaccatccagcctggtatggtgatacattgaagcaaaagacatcctggacttgcctcttggatggcatgcagtactttgccaccactgaaagcagccccacagagcaggatggccgacagctctggttagaggtgaagaatatcgaggagcaccggcagcgtagtctggactctgtgcaggagctgatggagagtgggcaggcagtgggcggcatggttaccacaaccacagattggaaccagccagctgaggcacagcaagcccagcaagtccagcggatcatttcgcgttgcaactgccgaatgtactatattagttacagccatgacattgatcctgaactagcaactcagattaagccacctgaagttcttgagaaccaggaaaaggaagatctcctaaagaagcaggaaggggctgtggataccttcacccttatccaccatgagctggaaatttccaccaacccagctcagtatgccatgatcctggacattgtcaacaacctgctgctccatgtagaacctaagcggaaggaacatagtgagaagaagcaacgggtcaggttccagcttgagatctctagcaatccagaggagcaacgcagcagcatactgcatttgcaggaggctgtgcggcagcatgtggcccaaatacgacagctggagaagcagatgtattctatcatgaagtctttgcaggatgacagcaagaatgagaatctgcttgacctgaaccagaagcttcagttgcagctaaaccaggagaaggccaacctgcagctggaaagtgaagaactgaatatcctcatcaggtgttttaaggattaggcattctaaggatcaagctttctaaggatcaagctcagtggtgtagggaaggcaccatggccagagtctggctctcagtggtggcttttcaggggtagcggggctttgtcagaaggaatctctgataaacattgggctactcctgggtccaggaacat

SEQ ID NO: 351020 - DNA, 5090 bp, Homo sapiens
  misc_feature (24)..(24): n is a, c, g, or t
ggctggcgtctagaggatccctcnaaacgtatcagaacggacctacagaaagtttctgacctgtctgccccattctcccagagcgctggggtggatcaaaaggaactgtccttcagcccatccttattgaagatcttctgccaactattctccattcatgtagatgctataaacatcatggttctcaaggtggatacctctgagtccttatggcatattcagatcagtagaagcagatttcttttggatagtgatgggaaaaggctaatctgtgaggtgagcttatgtaagatcaacagcaaagttctaaagagtggtcagctggaggacacctgcctagtggagctttcactggccctggacctgtgtctaaaggtgggcattagcagtcggcatctcactgctatcactgtggatgtgtggacactccatgctgaactgcatgagggcctcttccagagccaactgctgtgccagggcccaagcctagcatctaagcctgttccctgttcagaggtgacagaaaacttagttgagccaactctgcctggcctattccttctccagcagctgccagaccaggtcaaggttaagatggagaacacaagcgtggtattgtccatgaatagtcaaaagaggcacctgacttggactctgaagctgctgcagttcctgtaccaccgtgatgaggatcagctgccccttcgaagcttcacagcaaactctgatatggcacagatgagcactgaactgctgctggaagatgggttgttgttgtcccagagtcgccaacgcattgtctgcctcaactccctcaaggctagtgtgcaggtgaccaccattgacctctcagcctccctagttctgaacacttgcatcattcactaccggcaccaggaattctctcactggctgcacctgctagcactggaaacccaagggtctagttcacctgttctaaagcaaaggaaaaaaagaaccttcccccaaatcctggctcccatcatctttagcacctccatctccaatgtcaacatttccattcaacttggagatacaccaccttttgccttgggattcaattctatctctctggattaccagcacctcaggccacaaagcatccatcagcggggcgtcctaactgtggaccacctctgctggcgtgtgggcagtgactcccacattcagcgggcgccacacccacccaatatgcatgtttggggtgaggcacttgttctggactccttcacactacagggtagctataaccagcctctgggcctgtccagcacccagtcagataccctttttcttgattgtaccattcgaggacttcaggtggaagcatcagatacctgtgcccaatgtctgtctcgtatcttatccctgatgggtccacaatctgggaagtcagctgtctctaggcactcttcatttggggaatctgtgtcattactgtggaaggtggacttgaaggtcgaagacatgaacttgtttaccctttctgccttggttggtgcttcagaggtacgactggacaccctaactatcctgggcagtgcagagacgtccactgtggggattcaaggacttgtgttagcgctggtgaaatcagtcacggagaagatgcaaccctgttgcaaggcccctgacatccctaccccagtgctcagcctttccatgctctccatcacctatcacagcagcatccgctctctggaggttcagtgtggtgcagggctgaccttactttggagccccccagatcacatgtacctgtaccagcatgtcctggccactctacagtgccgagacctactaagagccactgtgtttcctgagactgtaccatcccttgcactagagacttcaggaactacttctgagctagaaggccgtgcccctgagccattacccccaaagcggctgctaaacctaaccctggaggtgagcacagccaagctcacagcttttgtagctgaggacaagttcattaccctggctgcagagagtgtgtcactgagccggcatggaggttccctgcaggcatactgtccagagctggctgctggctttgatggcaatagtatcttcaacttcaaggaggtggaggtgcagctgctacctgagctggaagagatgatcctccaccggaaccccttccctgcgctgcagaccctccggaaccgtgtttggctcctctctttcggctcagtctcggtggagtttccttatcagtatgacttttctcgaactctagatgaggctgtgggagttcagaagtggctgaagggactacatcaagggactcgtgcttgggcctctccaagccctgtcccactcccacctgatctactcttaaaggttgagcacttctcatgggttttcttggatgatgtttttgaggtgaaacttcatgataactacgagctgatgaaggatgaaagtaaggagagtgccaaaagactacagctactggatgctaaagtggccgcccttcggaagcagcatggggagttgttgcctgcccgcaaaattgaggagctctatgcctctttggaacgcaaaaacattgaaatctacatccagcgttcccgtcgtctctatggcaacacacccatgcgccgggcactgcttacttggagcttagcagggctagaactggtagctctggcagatgcctccttccatggtcctgagcatgtggtagaacaggttcaagagcttgatccaggcagcccttttccccctgagggattagatcttgtcattcagtggtgtcgaatgctcaagtgcaatgtcaagagctttctggttcggatcagggactatccacggtacctgtttgagatccgtgactggcggctaatgggtcgacttgtgggcaccgagcagagtggtcagccttgctcccgtcggcgtcagatcttgcacttggggcttccgtggggtaacgtggcagtggagaggaacatgcccccactcaaattctaccatgactttcactcggaaatattccagtacacagtggtgtggggcccatgctgggatccagcctggacactaattggccagtgtgtggacctcttgaccaagccctcagctgaccccagcccacctttgccctggtgggacaagagccgtcttctgttccatggagactggcacatggacattgaacaggcgaacctgcaccagctggccactgaggatccatacaacacaactgaaaatatgcactgggagtggagccacctgtcttttcattggaaacctggtcagtttgtgttcaagggtgacttggatatcaacgtgagaacagcctctaagtatgacgactgctgcttccttcacctgcctgacctctgcatgacactggacctgcagtggctgtgccatgggaacccccatgatcaccatagtgtcactctgcgggccccagagttcctgcctgaggtgcccttgggccagcttcatgactcctaccgggcctttcgctcggagaacctcaatctctccatcaagatggatctgactcggcacagtggaacaatatcccagccccgaattctgctatatagtagtaccctgcgctggatgcaaaacttctgggcaacttggacaagtgtcacaaggcctatctgcaggggaaagctcttcaataacctgaaacccagcaagaagaaacttggtcagcactacaagcaactttcctatacagccctctttccccagctgcaggtacattattgggcctcatttgcccagcaacggggcatccagattgagtgcagtcagggccatgtcttcactcgggggactcagcggcttatacctcaagcaggcacagtgatgcggcgccttatctctgattggagtgttacccagatggtgagtgacctaagtcaggtgaccgttcacctgatggcctcacccactgaagagaatgctgatcactgtcttgatcccttggtaacaaagacccacctgctgagcttgtcctccctcacctaccaacggcatagcaatcgcacagctgaggaggagctctctgctcgtgatggggatcctacctttcatacacatcagctgcacttagtagatttacggatttcctggacaactaccaatcgagacattgcctttgggttatatgatgggtacaaaaaggcagctgtactcaaacgtaatctttctactgaggccctgaaggggttaaagattgatccacagatgccagccaaaaagccaaagcggggtgtcccaactagtgcctcagccccacctcgtgttaacactcccagcttcagtggacaacctgataaggggtcatcaggaggtgcttacatgttgcagaagctaattgaagagacagataggtttgtagtgttcacagaagaggaatcaggcatgagtgaccagttgtgtggcattgctgcctgccagacggatgacatatacaaccgaaactgccttattgaattggtcaactgtcagatggttcttcgtggagcagagacagaaggctgtgtcattgtgtcagctgccaaagcccaactgctgcagtgccagcaccatccagcctggtatggtgatacattgaagcaaaagacatcctggacttgcctcttggatggcatgcagtactttgccaccactgaaagcagccccacagagcaggatggccgacagctctggttagaggtgaagaatatcgaggagcaccggcagcgtagtctggactctgtgcaggagctgatggagagtgggcaggcagtgggcggcatggttaccacaaccacagattggaaccagccagctgaggcacagcaagcccagcaagtccagcggatcatttcgcgttgcaactgccgaatgtactatattagttacagccatgacattgatcctgaactagcaactcagattaagccacctgaagttcttgagaaccaggaaaaggaagatctcctaaagaagcaggaagagcggtggataccttagtcttatagagcgcatgtgaatgtgtacataaatagaaaaactatggtacagttgatggtggataagcgtgaaggatgcactac

SEQ ID NO: 351021 - DNA, 4625 bp, Homo sapiens
  misc_feature (24)..(24): n is a, c, g, or t
ggctggcgtctagaggatccctcnaaacgtatcagaacggacctacagaaagtttctgacctgtctgccccattctcccagagcgctggggtggatcaaaaggaactgtccttcagcccatccttattgaagatcttctgccaactattctccattcatgtagatgctataaacatcatggttctcaaggtggatacctctgagtccttatggcatattcagatcagtagaagcagatttcttttggatagtgatgggaaaaggctaatctgtgaggtgagcttatgtaagatcaacagcaaagttctaaagagtggtcagctggaggacacctgcctagtggagctttcactggccctggacctgtgtctaaaggtgggcattagcagtcggcatctcactgctatcactgtggatgtgtggacactccatgctgaactgcatgagggcctcttccagagccaactgctgtgccagggcccaagcctagcatctaagcctgttccctgttcagaggtgacagaaaacttagttgagccaactctgcctggcctattccttctccagcagctgccagaccaggtcaaggttaagatggagaacacaagcgtggtattgtccatgaatagtcaaaagaggcacctgacttggactctgaagctgctgcagttcctgtaccaccgtgatgaggatcagctgccccttcgaagcttcacagcaaactctgatatggcacagatgagcactgaactgctgctggaagatgggttgttgttgtcccagagtcgccaacgcattgtctgcctcaactccctcaaggctagtgtgcaggtgaccaccattgacctctcagcctccctagttctgaacacttgcatcattcactaccggcaccaggaattctctcactggctgcacctgctagcactggaaacccaagggtctagttcacctgttctaaagcaaaggaaaaaaagaaccttcccccaaatcctggctcccatcatctttagcacctccatctccaatgtcaacatttccattcaacttggagatacaccaccttttgccttgggattcaattctatctctctggattaccagcacctcaggccacaaagcatccatcagcggggcgtcctaactgtggaccacctctgctggcgtgtgggcagtgactcccacattcagcgggcgccacacccacccaatatgcatgtttggggtgaggcacttgttctggactccttcacactacagggtagctataaccagcctctgggcctgtccagcacccagtcagataccctttttcttgattgtaccattcgaggacttcaggtggaagcatcagatacctgtgcccaatgtctgtctcgtatcttatccctgatgggtccacaatctgggaagtcagctgtctctaggcactcttcatttggggaatctgtgtcattactgtggaaggtggacttgaaggtcgaagacatgaacttgtttaccctttctgccttggttggtgcttcagaggtacgactggacaccctaactatcctgggcagtgcagagacgtccactgtggggattcaaggacttgtgttagcgctggtgaaatcagtcacggagaagatgcaaccctgttgcaaggcccctgacatccctaccccagtgctcagcctttccatgctctccatcacctatcacagcagcatccgctctctggaggttcagtgtggtgcagggctgaccttactttggagccccccagatcacatgtacctgtaccagcatgtcctggccactctacagtgccgagacctactaagagccactgtgtttcctgagactgtaccatcccttgcactagagacttcaggaactacttctgagctagaaggccgtgcccctgagccattacccccaaagcggctgctaaacctaaccctggaggtgagcacagccaagctcacagcttttgtagctgaggacaagttcattaccctggctgcagagagtgtgtcactgagccggcatggaggttccctgcaggcatactgtccagagctggctgctggctttgatggcaatagtatcttcaacttcaaggaggtggaggtgcagctgctacctgagctggaagagatgatcctccaccggaaccccttccctgcgctgcagaccctccggaaccgtgtttggctcctctctttcggctcagtctcggtggagtttccttatcagtatgacttttctcgaactctagatgaggctgtgggagttcagaagtggctgaagggactacatcaagggactcgtgcttgggcctctccaagccctgtcccactcccacctgatctactcttaaaggttgagcacttctcatgggttttcttggatgatgtttttgaggtgaaacttcatgataactacgagctgatgaaggatgaaagtaaggagagtgccaaaagactacagctactggatgctaaagtggccgcccttcggaagcagcatggggagttgttgcctgcccgcaaaattgaggagctctatgcctctttggaacgcaaaaacattgaaatctacatccagcgttcccgtcgtctctatggcaacacacccatgcgccgggcactgcttacttggagcttagcagggctagaactggtagctctggcagatgcctccttccatggtcctgagcatgtggtagaacaggttcaagagcttgatccaggcagcccttttccccctgagggattagatcttgtcattcagtggtgtcgaatgctcaagtgcaatgtcaagagctttctggttcggatcagggactatccacggtacctgtttgagatccgtgactggcggctaatgggtcgacttgtgggcaccgagcagagtggtcagccttgctcccgtcggcgtcagatcttgcacttggggcttccgtggggtaacgtggcagtggagaggaacatgcccccactcaaattctaccatgactttcactcggaaatattccagtacacagtggtgtggggcccatgctgggatccagcctggacactaattggccagtgtgtggacctcttgaccaagccctcagctgaccccagcccacctttgccctggtgggacaagagccgtcttctgttccatggagactggcacatggacattgaacaggcgaacctgcaccagctggccactgaggatccatacaacacaactgaaaatatgcactgggagtggagccacctgtcttttcattggaaacctggtcagtttgtgttcaagggtgacttggatatcaacgtgagaacagcctctaagtatgacgactgctgcttccttcacctgcctgacctctgcatgacactggacctgcagtggctgtgccatgggaacccccatgatcaccatagtgtcactctgcgggccccagagttcctgcctgaggtgcccttgggccagcttcatgactcctaccgggcctttcgctcggagaacctcaatctctccatcaagatggatctgactcggcacagtggaacaatatcccagccccgaattctgctatatagtagtaccctgcgctggatgcaaaacttctgggcaacttggacaagtgtcacaaggcctatctgcaggggaaagctcttcaataacctgaaacccagcaagaagaaacttggtcagcactacaagcaactttcctatacagccctctttccccagctgcaggtacattattgggcctcatttgcccagcaacggggcatccagattgagtgcagtcagggccatgtcttcactcgggggactcagcggcttatacctcaagcaggcacagtgatgcggcgccttatctctgattggagtgttacccagatggtgagtgacctaagtcaggtgaccgttcacctgatggcctcacccactgaagagaatgctgatcactgtcttgatcccttggtaacaaagacccacctgctgagcttgtcctccctcacctaccaacggcatagcaatcgcacagctgaggaggagctctctgctcgtgatggggatcctacctttcatacacatcagctgcacttagtagatttacggatttcctggacaactaccaatcgagacattgcctttgggttatatgatgggtacaaaaaggcagctgtactcaaacgtaatctttctactgaggccctgaaggggttaaagattgatccacagatgccagccaaaaagccaaagcggggtgtcccaactagtgcctcagccccacctcgtgttaacactcccagcttcagtggacaacctgataaggggtcatcaggaggtaagctcggggagatgagactttttgggtttgggtttagaacatggatatgggcttggacaggagttttaaaaggactgagtcatggtgcttctatctaggtaaagaagtgaaactattatttttccttcttaggccacctaagtcttacatattaagtaacagtgatgttggggcattaaatggtctggtcctatggccagaagagaatcagaaggggagtgttggagccaaaacaagatgagtaagggaaagaagcaaagtggtaaatgccataagagag

SEQ ID NO: 351022 - DNA, 848 bp, Homo sapiens
gcgggctgttcagaggtcccctctggatgcaagtgtcagtcttaagtttcagcaacaccagggaaacagtggaaattgataacctgtggatttccagcaaactccttagccatgatcttccacactatgtggcattgtgctttggagaagtgcgtatcagaacggacctacagaaagtttctgacctgtctgccccattctcccagagcgctggggtggatcaaaaggaactgtccttcagcccatccttattgaagatcttctgccaactattctccattcatgtagatgctataaacatcatggttctcaaggtggatacctctgagtccttatggcatattcagatcagtagaagcagatttcttttggatagtgatgggaaaaggtaagcactggggagcagaggatctagccgtcctattcttgcctcagagttgcttcagggcctccttatcaaggtgttaagttctcattctgtgcagttggaggagatgctaagattagacatttccaattgccttgtcccttctagccaccagagcttgactggaggtaagtggtgaggaaagggaccaagttctcttttttttaaattttttttttgagacagagtcttgctctgttgcctaggctggagtgcagtggtgcggtcttggctcactgcaagctccgcctcctgggttcagaccattctcctgcctcagctacttgggaggctgaggcaggaggattgcttgagccctggagttcgagcctgcagtgagctgtgatcacaccactgcactccagcctgggcaacagagtgagaccctgtctctaaaaaagaaaataaataattaaaaaca

SEQ ID NO: 351023 - DNA, 632 bp, Homo sapiens
ctgaagttcttgagaaccaggaaaaggaagatctcctaaagaagcaggaaggtattcagggcttgaaaggcttttaggaagggactagagaaattgtgaaagtagttatttccttggtggttttgagacagtagagttattaaaaatccactgtgcactggcattaacatttcactttgctctactttttgtaagttctgctatgagaaaataacctctattcttggagggagctgggatgaatgggcattgtttatgattctgaagtaaacatgtttctgcccatgagcaactctcaccctttctgtggggttgactagtggggtggttccaaatgtgggttaagagatggagtagatatttaggtagaaacttgagccttttatttagctgctaacaattatctaggggctgtggataccttcacccttatccaccatgagctggaaatttccaccaacccagctcagtatgccatgatcctggacattgtcaacaacctgctgctccatgtagaacctaagcggaaggtgagcatgggcccttgtagaatgctggttagcctcacaggaacacccagactttgtgctttatttgggcttctgtaacaaaagccatgcttcacactgaaa

SEQ ID NO: 351024 - DNA, 7087 bp, Homo sapiens
  misc_feature (24)..(24): n is a, c, g, or t
ggctggcgtctagaggatccctcnaaacgtatcagaacggacctacagaaagtttctgacctgtctgccccattctcccagagcgctggggtggatcaaaaggaactgtccttcagcccatccttattgaagatcttctgccaactattctccattcatgtagatgctataaacatcatggttctcaaggtggatacctctgagtccttatggcatattcagatcagtagaagcagatttcttttggatagtgatgggaaaaggctaatctgtgaggtgagcttatgtaagatcaacagcaaagttctaaagagtggtcagctggaggacacctgcctagtggagctttcactggccctggacctgtgtctaaaggtgggcattagcagtcggcatctcactgctatcactgtggatgtgtggacactccatgctgaactgcatgagggcctcttccagagccaactgctgtgccagggcccaagcctagcatctaagcctgttccctgttcagaggtgacagaaaacttagttgagccaactctgcctggcctattccttctccagcagctgccagaccaggtcaaggttaagatggagaacacaagcgtggtattgtccatgaatagtcaaaagaggcacctgacttggactctgaagctgctgcagttcctgtaccaccgtgatgaggatcagctgccccttcgaagcttcacagcaaactctgatatggcacagatgagcactgaactgctgctggaagatgggttgttgttgtcccagagtcgccaacgcattgtctgcctcaactccctcaaggctagtgtgcaggtgaccaccattgacctctcagcctccctagttctgaacacttgcatcattcactaccggcaccaggaattctctcactggctgcacctgctagcactggaaacccaagggtctagttcacctgttctaaagcaaaggaaaaaaagaaccttcccccaaatcctggctcccatcatctttagcacctccatctccaatgtcaacatttccattcaacttggagatacaccaccttttgccttgggattcaattctatctctctggattaccagcacctcaggccacaaagcatccatcagcggggcgtcctaactgtggaccacctctgctggcgtgtgggcagtgactcccacattcagcgggcgccacacccacccaatatgcatgtttggggtgaggcacttgttctggactccttcacactacagggtagctataaccagcctctgggcctgtccagcacccagtcagataccctttttcttgattgtaccattcgaggacttcaggtggaagcatcagatacctgtgcccaatgtctgtctcgtatcttatccctgatgggtccacaatctgggaagtcagctgtctctaggcactcttcatttggggaatctgtgtcattactgtggaaggtggacttgaaggtcgaagacatgaacttgtttaccctttctgccttggttggtgcttcagaggtacgactggacaccctaactatcctgggcagtgcagagacgtccactgtggggattcaaggacttgtgttagcgctggtgaaatcagtcacggagaagatgcaaccctgttgcaaggcccctgacatccctaccccagtgctcagcctttccatgctctccatcacctatcacagcagcatccgctctctggaggttcagtgtggtgcagggctgaccttactttggagccccccagatcacatgtacctgtaccagcatgtcctggccactctacagtgccgagacctactaagagccactgtgtttcctgagactgtaccatcccttgcactagagacttcaggaactacttctgagctagaaggccgtgcccctgagccattacccccaaagcggctgctaaacctaaccctggaggtgagcacagccaagctcacagcttttgtagctgaggacaagttcattaccctggctgcagagagtgtgtcactgagccggcatggaggttccctgcaggcatactgtccagagctggctgctggctttgatggcaatagtatcttcaacttcaaggaggtggaggtgcagctgctacctgagctggaagagatgatcctccaccggaaccccttccctgcgctgcagaccctccggaaccgtgtttggctcctctctttcggctcagtctcggtggagtttccttatcagtatgacttttctcgaactctagatgaggctgtgggagttcagaagtggctgaagggactacatcaagggactcgtgcttgggcctctccaagccctgtcccactcccacctgatctactcttaaaggttgagcacttctcatgggttttcttggatgatgtttttgaggtgaaacttcatgataactacgagctgatgaaggatgaaagtaaggagagtgccaaaagactacagctactggatgctaaagtggccgcccttcggaagcagcatggggagttgttgcctgcccgcaaaattgaggagctctatgcctctttggaacgcaaaaacattgaaatctacatccagcgttcccgtcgtctctatggcaacacacccatgcgccgggcactgcttacttggagcttagcagggctagaactggtagctctggcagatgcctccttccatggtcctgagcatgtggtagaacaggttcaagagcttgatccaggcagcccttttccccctgagggattagatcttgtcattcagtggtgtcgaatgctcaagtgcaatgtcaagagctttctggttcggatcagggactatccacggtacctgtttgagatccgtgactggcggctaatgggtcgacttgtgggcaccgagcagagtggtcagccttgctcccgtcggcgtcagatcttgcacttggggcttccgtggggtaacgtggcagtggagaggaacatgcccccactcaaattctaccatgactttcactcggaaatattccagtacacagtggtgtggggcccatgctgggatccagcctggacactaattggccagtgtgtggacctcttgaccaagccctcagctgaccccagcccacctttgccctggtgggacaagagccgtcttctgttccatggagactggcacatggacattgaacaggcgaacctgcaccagctggccactgaggatccatacaacacaactgaaaatatgcactgggagtggagccacctgtcttttcattggaaacctggtcagtttgtgttcaagggtgacttggatatcaacgtgagaacagcctctaagtatgacgactgctgcttccttcacctgcctgacctctgcatgacactggacctgcagtggctgtgccatgggaacccccatgatcaccatagtgtcactctgcgggccccagagttcctgcctgaggtgcccttgggccagcttcatgactcctaccgggcctttcgctcggagaacctcaatctctccatcaagatggatctgactcggcacagtggaacaatatcccagccccgaattctgctatatagtagtaccctgcgctggatgcaaaacttctgggcaacttggacaagtgtcacaaggcctatctgcaggggaaagctcttcaataacctgaaacccagcaagaagaaacttggtcagcactacaagcaactttcctatacagccctctttccccagctgcaggtacattattgggcctcatttgcccagcaacggggcatccagattgagtgcagtcagggccatgtcttcactcgggggactcagcggcttatacctcaagcaggcacagtgatgcggcgccttatctctgattggagtgttacccagatggtgagtgacctaagtcaggtgaccgttcacctgatggcctcacccactgaagagaatgctgatcactgtcttgatcccttggtaacaaagacccacctgctgagcttgtcctccctcacctaccaacggcatagcaatcgcacagctgaggaggagctctctgctcgtgatggggatcctacctttcatacacatcagctgcacttagtagatttacggatttcctggacaactaccaatcgagacattgcctttgggttatatgatgggtacaaaaaggcagctgtactcaaacgtaatctttctactgaggccctgaaggggttaaagattgatccacagatgccagccaaaaagccaaagcggggtgtcccaactagtgcctcagccccacctcgtgttaacactcccagcttcagtggacaacctgataaggggtcatcaggaggtgcttacatgttgcagaagctaattgaagagacagataggtttgtagtgttcacagaagaggaatcaggcatgagtgaccagttgtgtggcattgctgcctgccagacggatgacatatacaaccgaaactgccttattgaattggtcaactgtcagatggttcttcgtggagcagagacagaaggctgtgtcattgtgtcagctgccaaagcccaactgctgcagtgccagcaccatccagcctggtatggtgatacattgaagcaaaagacatcctggacttgcctcttggatggcatgcagtactttgccaccactgaaagcagccccacagagcaggatggccgacagctctggttagaggtgaagaatatcgaggagcaccggcagcgtagtctggactctgtgcaggagctgatggagagtgggcaggcagtgggcggcatggttaccacaaccacagattggaaccagccagctgaggcacagcaagcccagcaagtccagcggatcatttcgcgttgcaactgccgaatgtactatattagttacagccatgacattgatcctgaactagcaactcagattaagccacctgaagttcttgagaaccaggaaaaggaagatctcctaaagaagcaggaaggggctgtggataccttcacccttatccaccatgagctggaaatttccaccaacccagctcagtatgccatgatcctggacattgtcaacaacctgctgctccatgtagaacctaagcggaaggaacatagtgagaagaagcaacgggtcaggttccagcttgagatctctagcaatccagaggagcaacgcagcagcatactgcatttgcaggaggctgtgcggcagcatgtggcccaaatacgacagctggagaagcagatgtattctatcatgaagtctttgcaggatgacagcaagaatgagaatctgcttgacctgaaccagaagcttcagttgcagctaaaccaggagaaggccaacctgcagctggaaagtgaagaactgaatatcctcatcaggtgttttaaggatttccaactgcagcgggctaacaagatggagctgcgaaagcagcaagaagatgtgagtgtggtccgtcgcactgagttttactttgctcaggcacggtggcgcctgacagaggaagatggacagctgggaattgctgaattagaactgcagaggttcctctacagcaaggtgaataagtctgatgacacagcagaacatcttctggagttgggctggtttaccatgaacaacctcctccccaatgctgtctataaggtagtactgcggccccagagctcctgccagtctgggcgacagctagctctccgcctcttcagcaaagttcggccccctgttgggggtatctctgttaaggagcattttgaggtaaatgtggtgcctctcaccatccagctgacacaccagttcttccacagaatgatgggctttttctttcctggccgaagtgtggaagatgatgaagttggtgatgaagaggataagtccaaactggtgactactggaataccagtggtgaagcctcggcagctgattgcaacagatgatgcagtaccactgggccctgggaagggtgtggcacagggtttgactcggagttctggggtcagaaggtcatttcgcaaatcgccagagcaccctgtggatgacattgacaagatgaaagagcgagctgccatgaacaactccttcatctacataaagattccacaggttccactgtgtgtcagctacaagggtgagaagaacagtgtggactggggtgaccttaacctggtgctgccctgtctggagtaccacaacaacacatggacatggctagactttgccatggctgtcaaaagggacagccgcaaagccctggttgcccaggtaatcaaagagaagctaaggctgaagtctgcaacaggctctgaggtccggggaaagctagaaactaaatcggacctgaacatgcaacagcaggaagaggaggagaaagcccggctcctcattggtttaagtgtgggcgacaagaaccctggcaagaagtccatctttggcaggcgcaaatgatttggcgattcgagtggctgcagtacaggatctgactctggctcaggctccagggacttgtggggtgggaggggcttcccgttatccacgaggatttgtgggtgtcagagcccataggcatcactcttcagcacctggtctgttcgctgcagggcatggtggacagtaatgctgagttctgtctcacactgatcaggctcagggccagagaggcaacaagagagcaagacccagggaatgggcccagggcaggaccctattcccttggggtcaagtgaaagggtagggggatagtcctgatcaagtgtgataaatttttatagacatatataaatatatatatattatatatatatttctaagtgtaactgtccttcctctgtgccaggaaacgggagggggctgatcctctgatcctcactccactgtcatgtttgaaagaggtattggtgttctggagtgggggtcaacccctccccagtctctgtgctaagttcacttgggaggatggcagtaggagccagggctggccatgggtcccctacccttccccgtaggatataccctggagaatggcaaaatgatttaaagagaaaaaaaaagatattttaaatttgatgctcaaatttgt

SEQ ID NO: 351025 - DNA, 7503 bp, Homo sapiens
  misc_feature (24)..(24): n is a, c, g, or t
ggctggcgtctagaggatccctcnaaacgtatcagaacggacctacagaaagtttctgacctgtctgccccattctcccagagcgctggggtggatcaaaaggaactgtccttcagcccatccttattgaagatcttctgccaactattctccattcatgtagatgctataaacatcatggttctcaaggtggatacctctgagtccttatggcatattcagatcagtagaagcagatttcttttggatagtgatgggaaaaggctaatctgtgaggtgagcttatgtaagatcaacagcaaagttctaaagagtggtcagctggaggacacctgcctagtggagctttcactggccctggacctgtgtctaaaggtgggcattagcagtcggcatctcactgctatcactgtggatgtgtggacactccatgctgaactgcatgagggcctcttccagagccaactgctgtgccagggcccaagcctagcatctaagcctgttccctgttcagaggtgacagaaaacttagttgagccaactctgcctggcctattccttctccagcagctgccagaccaggtcaaggttaagatggagaacacaagcgtggtattgtccatgaatagtcaaaagaggcacctgacttggactctgaagctgctgcagttcctgtaccaccgtgatgaggatcagctgccccttcgaagcttcacagcaaactctgatatggcacagatgagcactgaactgctgctggaagatgggttgttgttgtcccagagtcgccaacgcattgtctgcctcaactccctcaaggctagtgtgcaggtgaccaccattgacctctcagcctccctagttctgaacacttgcatcattcactaccggcaccaggaattctctcactggctgcacctgctagcactggaaacccaagggtctagttcacctgttctaaagcaaaggaaaaaaagaaccttcccccaaatcctggctcccatcatctttagcacctccatctccaatgtcaacatttccattcaacttggagatacaccaccttttgccttgggattcaattctatctctctggattaccagcacctcaggccacaaagcatccatcagcggggcgtcctaactgtggaccacctctgctggcgtgtgggcagtgactcccacattcagcgggcgccacacccacccaatatgcatgtttggggtgaggcacttgttctggactccttcacactacagggtagctataaccagcctctgggcctgtccagcacccagtcagataccctttttcttgattgtaccattcgaggacttcaggtggaagcatcagatacctgtgcccaatgtctgtctcgtatcttatccctgatgggtccacaatctgggaagtcagctgtctctaggcactcttcatttggggaatctgtgtcattactgtggaaggtggacttgaaggtcgaagacatgaacttgtttaccctttctgccttggttggtgcttcagaggtacgactggacaccctaactatcctgggcagtgcagagacgtccactgtggggattcaaggacttgtgttagcgctggtgaaatcagtcacggagaagatgcaaccctgttgcaaggcccctgacatccctaccccagtgctcagcctttccatgctctccatcacctatcacagcagcatccgctctctggaggttcagtgtggtgcagggctgaccttactttggagccccccagatcacatgtacctgtaccagcatgtcctggccactctacagtgccgagacctactaagagccactgtgtttcctgagactgtaccatcccttgcactagagacttcaggaactacttctgagctagaaggccgtgcccctgagccattacccccaaagcggctgctaaacctaaccctggaggtgagcacagccaagctcacagcttttgtagctgaggacaagttcattaccctggctgcagagagtgtgtcactgagccggcatggaggttccctgcaggcatactgtccagagctggctgctggctttgatggcaatagtatcttcaacttcaaggaggtggaggtgcagctgctacctgagctggaagagatgatcctccaccggaaccccttccctgcgctgcagaccctccggaaccgtgtttggctcctctctttcggctcagtctcggtggagtttccttatcagtatgacttttctcgaactctagatgaggctgtgggagttcagaagtggctgaagggactacatcaagggactcgtgcttgggcctctccaagccctgtcccactcccacctgatctactcttaaaggttgagcacttctcatgggttttcttggatgatgtttttgaggtgaaacttcatgataactacgagctgatgaaggatgaaagtaaggagagtgccaaaagactacagctactggatgctaaagtggccgcccttcggaagcagcatggggagttgttgcctgcccgcaaaattgaggagctctatgcctctttggaacgcaaaaacattgaaatctacatccagcgttcccgtcgtctctatggcaacacacccatgcgccgggcactgcttacttggagcttagcagggctagaactggtagctctggcagatgcctccttccatggtcctgagcatgtggtagaacaggttcaagagcttgatccaggcagcccttttccccctgagggattagatcttgtcattcagtggtgtcgaatgctcaagtgcaatgtcaagagctttctggttcggatcagggactatccacggtacctgtttgagatccgtgactggcggctaatgggtcgacttgtgggcaccgagcagagtggtcagccttgctcccgtcggcgtcagatcttgcacttggggcttccgtggggtaacgtggcagtggagaggaacatgcccccactcaaattctaccatgactttcactcggaaatattccagtacacagtggtgtggggcccatgctgggatccagcctggacactaattggccagtgtgtggacctcttgaccaagccctcagctgaccccagcccacctttgccctggtgggacaagagccgtcttctgttccatggagactggcacatggacattgaacaggcgaacctgcaccagctggccactgaggatccatacaacacaactgaaaatatgcactgggagtggagccacctgtcttttcattggaaacctggtcagtttgtgttcaagggtgacttggatatcaacgtgagaacagcctctaagtatgacgactgctgcttccttcacctgcctgacctctgcatgacactggacctgcagtggctgtgccatgggaacccccatgatcaccatagtgtcactctgcgggccccagagttcctgcctgaggtgcccttgggccagcttcatgactcctaccgggcctttcgctcggagaacctcaatctctccatcaagatggatctgactcggcacagtggaacaatatcccagccccgaattctgctatatagtagtaccctgcgctggatgcaaaacttctgggcaacttggacaagtgtcacaaggcctatctgcaggggaaagctcttcaataacctgaaacccagcaagaagaaacttggtcagcactacaagcaactttcctatacagccctctttccccagctgcaggtacattattgggcctcatttgcccagcaacggggcatccagattgagtgcagtcagggccatgtcttcactcgggggactcagcggcttatacctcaagcaggcacagtgatgcggcgccttatctctgattggagtgttacccagatggtgagtgacctaagtcaggtgaccgttcacctgatggcctcacccactgaagagaatgctgatcactgtcttgatcccttggtaacaaagacccacctgctgagcttgtcctccctcacctaccaacggcatagcaatcgcacagctgaggaggagctctctgctcgtgatggggatcctacctttcatacacatcagctgcacttagtagatttacggatttcctggacaactaccaatcgagacattgcctttgggttatatgatgggtacaaaaaggcagctgtactcaaacgtaatctttctactgaggccctgaaggggttaaagattgatccacagatgccagccaaaaagccaaagcggggtgtcccaactagtgcctcagccccacctcgtgttaacactcccagcttcagtggacaacctgataaggggtcatcaggaggtgcttacatgttgcagaagctaattgaagagacagataggtttgtagtgttcacagaagaggaatcaggcatgagtgaccagttgtgtggcattgctgcctgccagacggatgacatatacaaccgaaactgccttattgaattggtcaactgtcagatggttcttcgtggagcagagacagaaggctgtgtcattgtgtcagctgccaaagcccaactgctgcagtgccagcaccatccagcctggtatggtgatacattgaagcaaaagacatcctggacttgcctcttggatggcatgcagtactttgccaccactgaaagcagccccacagagcaggatggccgacagctctggttagaggtgaagaatatcgaggagcaccggcagcgtagtctggactctgtgcaggagctgatggagagtgggcaggcagtgggcggcatggttaccacaaccacagattggaaccagccagctgaggcacagcaagcccagcaagtccagcggatcatttcgcgttgcaactgccgaatgtactatattagttacagccatgacattgatcctgaactagcaactcagattaagccacctgaagttcttgagaaccaggaaaaggaagatctcctaaagaagcaggaaggggctgtggataccttcacccttatccaccatgagctggaaatttccaccaacccagctcagtatgccatgatcctggacattgtcaacaacctgctgctccatgtagaacctaagcggaaggaacatagtgagaagaagcaacgggtcaggttccagcttgagatctctagcaatccagaggagcaacgcagcagcatactgcatttgcaggaggctgtgcggcagcatgtggcccaaatacgacagctggagaagcagatgtattctatcatgaagtctttgcaggatgacagcaagaatgagaatctgcttgacctgaaccagaagcttcagttgcagctaaaccaggagaaggccaacctgcagctggaaagtgaagaactgaatatcctcatcaggtgttttaaggatttccaactgcagcgggctaacaagatggagctgcgaaagcagcaagaagatgtgagtgtggtccgtcgcactgagttttactttgctcaggcacggtggcgcctgacagaggaagatggacagctgggaattgctgaattagaactgcagaggttcctctacagcaaggtgaataagtctgatgacacagcagaacatcttctggagttgggctggtttaccatgaacaacctcctccccaatgctgtctataaggtagtactgcggccccagagctcctgccagtctgggcgacagctagctctccgcctcttcagcaaagttcggccccctgttgggggtatctctgttaaggagcattttgaggtaaatgtggtgcctctcaccatccagctgacacaccagttcttccacagaatgatgggctttttctttcctggccgaagtgtggaagatgatgaagttggtgatgaagaggataagtccaaactggtgactactggaataccagtggtgaagcctcggcagctgattgcaacagatgatgcagtaccactgggccctgggaagggtgtggcacagggtttgactcggagttctggggtcagaaggtcatttcgcaaatcgccagagcaccctgtggatgacattgacaagatgaaagagcgagctgccatgaacaactccttcatctacataaagattccacaggttccactgtgtgtcagctacaagggtgagaagaacagtgtggactggggtgaccttaacctggtgctgccctgtctggagtaccacaacaacacatggacatggctagactttgccatggctgtcaaaagggacagccgcaaagccctggttgcccaggtatcccgccagggctcatggctgtttggctaatggggctggcaggcagatcctcttttcaggagcctttcattttagaatccatgaataaatatccttgggaaggggcaggtgcatgaagtgagtggcttctatgcctaccctctccatgacctcactcagattattaaattcagtgtttactgagtgtttcgtatagcaccattgattttagggaactgagagctaacacaacctaaagtttagaaggggttataattagactgtaagcttcttgaaagcagagaccattgtatgtgaattgccccattgtgccttggatgtgtttaataaatctttattgtcttggtcattttgatttattctgcctgcccactaatatttacattttcttttactcctctccaatctgccaggtaatcaaagagaagctaaggctgaagtctgcaacaggctctgaggtccggggaaagctagaaactaaatcggacctgaacatgcaacagcaggaagaggaggagaaagcccggctcctcattggtttaagtgtgggcgacaagaaccctggcaagaagtccatctttggcaggcgcaaatgatttggcgattcgagtggctgcagtacaggatctgactctggctcaggctccagggacttgtggggtgggaggggcttcccgttatccacgaggatttgtgggtgtcagagcccataggcatcactcttcagcacctggtctgttcgctgcagggcatggtggacagtaatgctgagttctgtctcacactgatcaggctcagggccagagaggcaacaagagagcaagacccagggaatgggcccagggcaggaccctattcccttggggtcaagtgaaagggtagggggatagtcctgatcaagtgtgataaatttttatagacatatataaatatatatatattatatatatatttctaagtgtaactgtccttcctctgtgccaggaaacgggagggggctgatcctctgatcctcactccactgtcatgtttgaaagaggtattggtgttctggagtgggggtcaacccctccccagtctctgtgctaagttcacttgggaggatggcagtaggagccagggctggccatgggtcccctacccttccccgtaggatataccctggagaatggcaaaatgatttaaagagaaaaaaaaagatattttaaatttgatgctcaaatttgt

SEQ ID NO: 351026 - DNA, 7666 bp, Homo sapiens
gcgggctgttcagaggtcccctctggatgcaagtgtcagtcttaagtttcagcaacaccagggaaacagtggaaattgataacctgtggatttccagcaaactccttagccatgatcttccacactatgtggcattgtgctttggagaagtgcgtatcagaacggacctacagaaagtttctgacctgtctgccccattctcccagagcgctggggtggatcaaaaggaactgtccttcagcccatccttattgaagatcttctgccaactattctccattcatgtagatgctataaacatcatggttctcaaggtggatacctctgagtccttatggcatattcagatcagtagaagcagatttcttttggatagtgatgggaaaaggctaatctgtgaggtgagcttatgtaagatcaacagcaaagttctaaagagtggtcagctggtaagtatgccatgatcattcagatgcctcatttcctcctgggcgtaaagtgtgaaggagcttagggcttacatcctaggttctttgaccttagggggttccctcaagtcagtacccagtgttccagatcaccacattttgacctaaaacttccaaactttcttacatacaccttagaggcttatcatccccacaggaggacacctgcctagtggagctttcactggccctggacctgtgtctaaaggtgggcattagcagtcggcatctcactgctatcactgtggatgtgtggacactccatgctgaactgcatgagggcctcttccagagccaactgctgtgccagggcccaagcctagcatctaagcctgttccctgttcagaggtgacagaaaacttagttgagccaactctgcctggcctattccttctccagcagctgccagaccaggtcaaggttaagatggagaacacaagcgtggtattgtccatgaatagtcaaaagaggcacctgacttggactctgaagctgctgcagttcctgtaccaccgtgatgaggatcagctgccccttcgaagcttcacagcaaactctgatatggcacagatgagcactgaactgctgctggaaggttcatgggtcggggtactggtactgagcgagaatgggaggactagatactctctttgctcatgccccatatggtctccttaatctaatctcagtgtaactggggagtggaaggagggaacatactgagagaaaatagccccagctcacaagttttgatgacagtctgttgatccctttgccggcttctgaccctctcccagttttacctcttgcccttccagtgctctcctctgatctgtcctctggcctcttacagatgggttgttgttgtcccagagtcgccaacgcattgtctgcctcaactccctcaaggctagtgtgcaggtgaccaccattgacctctcagcctccctagttctgaacacttgcatcattcactaccggcaccaggaattctctcactggctgcacctgctagcactggaaacccaagggtctagttcacctgttctaaagcaaaggaaaaaaagaaccttcccccaaatcctggctcccatcatctttagcacctccatctccaatgtcaacatttccattcaacttggagatacaccaccttttgccttgggattcaattctatctctctggattaccagcacctcaggccacaaagcatccatcagcggggcgtcctaactgtggaccacctctgctggcgtgtgggcagtgactcccacattcagcgggcgccacacccacccaatatgcatgtttggggtgaggcacttgttctggactccttcacactacagggtagctataaccagcctctgggcctgtccagcacccagtcagataccctttttcttgattgtaccattcgaggacttcaggtggaagcatcagatacctgtgcccaatgtctgtctcgtatcttatccctgatgggtccacaatctgggaagtcagctgtctctaggcactcttcatttggggaatctgtgtcattactgtggaaggtggacttgaaggtcgaagacatgaacttgtttaccctttctgccttggttggtgcttcagaggtacgactggacaccctaactatcctgggcagtgcagagacgtccactgtggggattcaaggacttgtgttagcgctggtgaaatcagtcacggagaagatgcaaccctgttgcaaggcccctgacatccctaccccagtgctcagcctttccatgctctccatcacctatcacagcagcatccgctctctggaggttcagtgtggtgcagggctgaccttactttggagccccccagatcacatgtacctgtaccagcatgtcctggccactctacagtgccgagacctactaagagccactgtgtttcctgagactgtaccatcccttgcactagagacttcaggaactacttctgagctagaaggccgtgcccctgagccattacccccaaagcggctgctaaacctaaccctggaggtgagcacagccaagctcacagcttttgtagctgaggacaagttcattaccctggctgcagagagtgtgtcactgagccggcatggaggttccctgcaggcatactgtccagagctggctgctggctttgatggcaatagtatcttcaacttcaaggaggtggaggtgcagctgctacctgagctggaagagatgatcctccaccggaaccccttccctgcgctgcagaccctccggaaccgtgtttggctcctctctttcggctcagtctcggtggagtttccttatcagtatgacttttctcgaactctagatgaggctgtgggagttcagaagtggctgaagggactacatcaagggactcgtgcttgggcctctccaagccctgtcccactcccacctgatctactcttaaaggttgagcacttctcatgggttttcttggatgatgtttttgaggtgaaacttcatgataactacgagctgatgaaggatgaaagtaaggagagtgccaaaagactacagctactggatgctaaagtggccgcccttcggaagcagcatggggagttgttgcctgcccgcaaaattgaggagctctatgcctctttggaacgcaaaaacattgaaatctacatccagcgttcccgtcgtctctatggcaacacacccatgcgccgggcactgcttacttggagcttagcagggctagaactggtagctctggcagatgcctccttccatggtcctgagcatgtggtagaacaggttcaagagcttgatccaggcagcccttttccccctgagggattagatcttgtcattcagtggtgtcgaatgctcaagtgcaatgtcaagagctttctggttcggatcagggactatccacggtacctgtttgagatccgtgactggcggctaatgggtcgacttgtgggcaccgagcagagtggtcagccttgctcccgtcggcgtcagatcttgcacttggggcttccgtggggtaacgtggcagtggagaggaacatgcccccactcaaattctaccatgactttcactcggaaatattccagtacacagtggtgtggggcccatgctgggatccagcctggacactaattggccagtgtgtggacctcttgaccaagccctcagctgaccccagcccacctttgccctggtgggacaagagccgtcttctgttccatggagactggcacatggacattgaacaggcgaacctgcaccagctggccactgaggatccatacaacacaactgaaaatatgcactgggagtggagccacctgtcttttcattggaaacctggtcagtttgtgttcaagggtgacttggatatcaacgtgagaacagcctctaagtatgacgactgctgcttccttcacctgcctgacctctgcatgacactggacctgcagtggctgtgccatgggaacccccatgatcaccatagtgtcactctgcgggccccagagttcctgcctgaggtgcccttgggccagcttcatgactcctaccgggcctttcgctcggagaacctcaatctctccatcaagatggatctgactcggcacagtggaacaatatcccagccccgaattctgctatatagtagtaccctgcgctggatgcaaaacttctgggcaacttggacaagtgtcacaaggcctatctgcaggggaaagctcttcaataacctgaaacccagcaagaagaaacttggtcagcactacaagcaactttcctatacagccctctttccccagctgcaggtacattattgggcctcatttgcccagcaacggggcatccagattgagtgcagtcagggccatgtcttcactcgggggactcagcggcttatacctcaagcaggcacagtgatgcggcgccttatctctgattggagtgttacccagatggtgagtgacctaagtcaggtgaccgttcacctgatggcctcacccactgaagagaatgctgatcactgtcttgatcccttggtaacaaagacccacctgctgagcttgtcctccctcacctaccaacggcatagcaatcgcacagctgaggaggagctctctgctcgtgatggggatcctacctttcatacacatcagctgcacttagtagatttacggatttcctggacaactaccaatcgagacattgcctttgggttatatgatgggtacaaaaaggcagctgtactcaaacgtaatctttctactgaggccctgaaggggttaaagattgatccacagatgccagccaaaaagccaaagcggggtgtcccaactagtgcctcagccccacctcgtgttaacactcccagcttcagtggacaacctgataaggggtcatcaggaggtgcttacatgttgcagaagctaattgaagagacagataggtttgtagtgttcacagaagaggaatcaggcatgagtgaccagttgtgtggcattgctgcctgccagacggatgacatatacaaccgaaactgccttattgaattggtcaactgtcagatggttcttcgtggagcagagacagaaggctgtgtcattgtgtcagctgccaaagcccaactgctgcagtgccagcaccatccagcctggtatggtgatacattgaagcaaaagacatcctggacttgcctcttggatggcatgcagtactttgccaccactgaaagcagccccacagagcaggatggccgacagctctggttagaggtgaagaatatcgaggagcaccggcagcgtagtctggactctgtgcaggagctgatggagagtgggcaggcagtgggcggcatggttaccacaaccacagattggaaccagccagctgaggcacagcaagcccagcaagtccagcggatcatttcgcgttgcaactgccgaatgtactatattagttacagccatgacattgatcctgaactagcaactcagattaagccacctgaagttcttgagaaccaggaaaaggaagatctcctaaagaagcaggaaggggctgtggataccttcacccttatccaccatgagctggaaatttccaccaacccagctcagtatgccatgatcctggacattgtcaacaacctgctgctccatgtagaacctaagcggaaggaacatagtgagaagaagcaacgggtcaggttccagcttgagatctctagcaatccagaggagcaacgcagcagcatactgcatttgcaggaggctgtgcggcagcatgtggcccaaatacgacagctggagaagcagatgtattctatcatgaagtctttgcaggatgacagcaagaatgagaatctgcttgacctgaaccagaagcttcagttgcagctaaaccaggagaaggccaacctgcagctggaaagtgaagaactgaatatcctcatcaggtgttttaaggatttccaactgcagcgggctaacaagatggagctgcgaaagcagcaagaagatgtgagtgtggtccgtcgcactgagttttactttgctcaggcacggtggcgcctgacagaggaagatggacagctgggaattgctgaattagaactgcagaggttcctctacagcaaggtgaataagtctgatgacacagcagaacatcttctggagttgggctggtttaccatgaacaacctcctccccaatgctgtctataaggtagtactgcggccccagagctcctgccagtctgggcgacagctagctctccgcctcttcagcaaagttcggccccctgttgggggtatctctgttaaggagcattttgaggtaaatgtggtgcctctcaccatccagctgacacaccagttcttccacagaatgatgggctttttctttcctggccgaagtgtggaagatgatgaagttggtgatgaagaggataagtccaaactggtgactactggaataccagtggtgaagcctcggcagctgattgcaacagatgatgcagtaccactgggccctgggaagggtgtggcacagggtttgactcggagttctggggtcagaaggtcatttcgcaaatcgccagagcaccctgtggatgacattgacaagatgaaagagcgagctgccatgaacaactccttcatctacataaagattccacaggttccactgtgtgtcagctacaagggtgagaagaacagtgtggactggggtgaccttaacctggtgctgccctgtctggagtaccacaacaacacatggacatggctagactttgccatggctgtcaaaagggacagccgcaaagccctggttgcccaggtaatcaaagagaagctaaggctgaagtctgcaacaggctctgaggtccggggaaagctagaaactaaatcggacctgaacatgcaacagcaggaagaggaggagaaagcccggctcctcattggtttaagtgtgggcgacaagaaccctggcaagaagtccatctttggcaggcgcaaatgatttggcgattcgagtggctgcagtacaggatctgactctggctcaggctccagggacttgtggggtgggaggggcttcccgttatccacgaggatttgtgggtgtcagagcccataggcatcactcttcagcacctggtctgttcgctgcagggcatggtggacagtaatgctgagttctgtctcacactgatcaggctcagggccagagaggcaacaagagagcaagacccagggaatgggcccagggcaggaccctattcccttggggtcaagtgaaagggtagggggatagtcctgatcaagtgtgataaatttttatagacatatataaatatatatatattatatatatatttctaagtgtaactgtccttcctctgtgccaggaaacgggagggggctgatcctctgatcctcactccactgtcatgtttgaaagaggtattggtgttctggagtgggggtcaacccctccccagtctctgtgctaagttcacttgggaggatggcagtaggagccagggctggccatgggtcccctacccttccccgtaggatataccctggagaatggcaaaatgatttaaagagaaaaaaaaagatattttaaatttgatgctcaaatttgt

SEQ ID NO: 351027 - DNA, 6809 bp, Homo sapiens
  misc_feature (24)..(24): n is a, c, g, or t
ggctggcgtctagaggatccctcnaaacgtatcagaacggacctacagaaagtttctgacctgtctgccccattctcccagagcgctggggtggatcaaaaggaactgtccttcagcccatccttattgaagatcttctgccaactattctccattcatgtagatgctataaacatcatggttctcaaggtggatacctctgagtccttatggcatattcagatcagtagaagcagatttcttttggatagtgatgggaaaaggctaatctgtgaggtgagcttatgtaagatcaacagcaaagttctaaagagtggtcagctggaggacacctgcctagtggagctttcactggccctggacctgtgtctaaaggtgggcattagcagtcggcatctcactgctatcactgtggatgtgtggacactccatgctgaactgcatgagggcctcttccagagccaactgctgtgccagggcccaagcctagcatctaagcctgttccctgttcagaggtgacagaaaacttagttgagccaactctgcctggcctattccttctccagcagctgccagaccaggtcaaggttaagatggagaacacaagcgtggtattgtccatgaatagtcaaaagaggcacctgacttggactctgaagctgctgcagttcctgtaccaccgtgatgaggatcagctgccccttcgaagcttcacagcaaactctgatatggcacagatgagcactgaactgctgctggaagatgggttgttgttgtcccagagtcgccaacgcattgtctgcctcaactccctcaaggctagtgtgcaggtgaccaccattgacctctcagcctccctagttctgaacacttgcatcattcactaccggcaccaggaattctctcactggctgcacctgctagcactggaaacccaagggtctagttcacctgttctaaagcaaaggaaaaaaagaaccttcccccaaatcctggctcccatcatctttagcacctccatctccaatgtcaacatttccattcaacttggagatacaccaccttttgccttgggattcaattctatctctctggattaccagcacctcaggccacaaagcatccatcagcggggcgtcctaactgtggaccacctctgctggcgtgtgggcagtgactcccacattcagcgggcgccacacccacccaatatgcatgtttggggtgaggcacttgttctggactccttcacactacagggtagctataaccagcctctgggcctgtccagcacccagtcagataccctttttcttgattgtaccattcgaggacttcaggtggaagcatcagatacctgtgcccaatgtctgtctcgtatcttatccctgatgggtccacaatctgggaagtcagctgtctctaggcactcttcatttggggaatctgtgtcattactgtggaaggtggacttgaaggtcgaagacatgaacttgtttaccctttctgccttggttggtgcttcagaggtacgactggacaccctaactatcctgggcagtgcagagacgtccactgtggggattcaaggacttgtgttagcgctggtgaaatcagtcacggagaagatgcaaccctgttgcaaggcccctgacatccctaccccagtgctcagcctttccatgctctccatcacctatcacagcagcatccgctctctggaggttcagtgtggtgcagggctgaccttactttggagccccccagatcacatgtacctgtaccagcatgtcctggccactctacagtgccgagacctactaagagccactgtgtttcctgagactgtaccatcccttgcactagagacttcaggaactacttctgagctagaaggccgtgcccctgagccattacccccaaagcggctgctaaacctaaccctggaggtgagcacagccaagctcacagcttttgtagctgaggacaagttcattaccctggctgcagagagtgtgtcactgagccggcatggaggttccctgcaggcatactgtccagagctggctgctggctttgatggcaatagtatcttcaacttcaaggaggtggaggtgcagctgctacctgagctggaagagatgatcctccaccggaaccccttccctgcgctgcagaccctccggaaccgtgtttggctcctctctttcggctcagtctcggtggagtttccttatcagtatgacttttctcgaactctagatgaggctgtgggagttcagaagtggctgaagggactacatcaagggactcgtgcttgggcctctccaagccctgtcccactcccacctgatctactcttaaaggttgagcacttctcatgggttttcttggatgatgtttttgaggtgaaacttcatgataactacgagctgatgaaggatgaaagtaaggagagtgccaaaagactacagctactggatgctaaagtggccgcccttcggaagcagcatggggagttgttgcctgcccgcaaaattgaggagctctatgcctctttggaacgcaaaaacattgaaatctacatccagcgttcccgtcgtctctatggcaacacacccatgcgccgggcactgcttacttggagcttagcagggctagaactggtagctctggcagatgcctccttccatggtcctgagcatgtggtagaacaggttcaagagcttgatccaggcagcccttttccccctgagggattagatcttgtcattcagtggtgtcgaatgctcaagtgcaatgtcaagagctttctggttcggatcagggactatccacggtacctgtttgagatccgtgactggcggctaatgggtcgacttgtgggcaccgagcagagtggtcagccttgctcccgtcggcgtcagatcttgcacttggggcttccgtggggtaacgtggcagtggagaggaacatgcccccactcaaattctaccatgactttcactcggaaatattccagtacacagtggtgtggggcccatgctgggatccagcctggacactaattggccagtgtgtggacctcttgaccaagccctcagctgaccccagcccacctttgccctggtgggacaagagccgtcttctgttccatggagactggcacatggacattgaacaggcgaacctgcaccagctggccactgaggatccatacaacacaactgaaaatatgcactgggagtggagccacctgtcttttcattggaaacctggtcagtttgtgttcaagggtgacttggatatcaacgtgagaacagcctctaagtatgacgactgctgcttccttcacctgcctgacctctgcatgacactggacctgcagtggctgtgccatgggaacccccatgatcaccatagtgtcactctgcgggccccagagttcctgcctgaggtgcccttgggccagcttcatgactcctaccgggcctttcgctcggagaacctcaatctctccatcaagatggatctgactcggcacagtggaacaatatcccagccccgaattctgctatatagtagtaccctgcgctggatgcaaaacttctgggcaacttggacaagtgtcacaaggcctatctgcaggggaaagctcttcaataacctgaaacccagcaagaagaaacttggtcagcactacaagcaactttcctatacagccctctttccccagctgcaggtacattattgggcctcatttgcccagcaacggggcatccagattgagtgcagtcagggccatgtcttcactcgggggactcagcggcttatacctcaagcaggcacagtgatgcggcgccttatctctgattggagtgttacccagatggtgagtgacctaagtcaggtgaccgttcacctgatggcctcacccactgaagagaatgctgatcactgtcttgatcccttggtaacaaagacccacctgctgagcttgtcctccctcacctaccaacggcatagcaatcgcacagctgaggaggagctctctgctcgtgatggggatcctacctttcatacacatcagctgcacttagtagatttacggatttcctggacaactaccaatcgagacattgcctttgggttatatgatgggtacaaaaaggcagctgtactcaaacgtaatctttctactgaggccctgaaggggttaaagattgatccacagatgccagccaaaaagccaaagcggggtgtcccaactagtgcctcagccccacctcgtgttaacactcccagcttcagtggacaacctgataaggggtcatcaggaggtgcttacatgttgcagaagctaattgaagagacagataggtttgtagtgttcacagaagaggaatcaggcatgagtgaccagttgtgtggcattgctgcctgccagacggatgacatatacaaccgaaactgccttattgaattggtcaactgtcagatggttcttcgtggagcagagacagaaggctgtgtcattgtgtcagctgccaaagcccaactgctgcagtgccagcaccatccagcctggtatggtgatacattgaagcaaaagacatcctggacttgcctcttggatggcatgcagtactttgccaccactgaaagcagccccacagagcaggatggccgacagctctggttagaggtgaagaatatcgaggagcaccggcagcgtagtctggactctgtgcaggagctgatggagagtgggcaggcagtgggcggcatggttaccacaaccacagattggaaccagccagctgaggcacagcaagcccagcaagtccagcggatcatttcgcgttgcaactgccgaatgtactatattagttacagccatgacattgatcctgaactagcaactcagattaagccacctgaagttcttgagaaccaggaaaaggaagatctcctaaagaagcaggaaggggctgtggataccttcacccttatccaccatgagctggaaatttccaccaacccagctcagtatgccatgatcctggacattgtcaacaacctgctgctccatgtagaacctaagcggaaggaacatagtgagaagaagcaacgggtcaggttccagcttgagatctctagcaatccagaggagcaacgcagcagcatactgcatttgcaggaggctgtgcggcagcatgtggcccaaatacgacagctggagaagcagatgtattctatcatgaagtctttgcaggatgacagcaagaatgagaatctgcttgacctgaaccagaagcttcagttgcagctaaaccaggagaaggccaacctgcagctggaaagtgaagaactgaatatcctcatcaggtgttttaaggatttccaactgcagcgggctaacaagatggagctgcgaaagcagcaagaagatgtgagtgtggtccgtcgcactgagttttactttgctcaggcacggtggcgcctgacagaggaagatggacagctgggaattgctgaattagaactgcagaggttcctctacagcaaggtgaataagtctgatgacacagcagaacatcttctggagttgggctggtttaccatgaacaacctcctccccaatgctgtctataaggtagtactgcggccccagagctcctgccagtctgggcgacagctagctctccgcctcttcagcaaagttcggccccctgttgggggtatctctgttaaggagcattttgaggtaaatgtggtgcctctcaccatccagctgacacaccagttcttccacagaatgatgggctttttctttcctggccgaagtgtggaagatgatgaagttggtgatgaagaggataagtccaaactggtgactactggaataccagtggtgaagcctcggcagctgattgcaacagatgatgcagtaccactgggccctgggaagggtgtggcacagggtttgactcggagttctggggtcagaaggtcatttcgcaaatcgccagagcaccctgtggatgacattgacaagatgaaagagcgagctgccatgaacaactccttcatctacataaagattccacaggttccactgtgtgtcagctacaagggtgagaagaacagtgtggactggggtgaccttaacctggtgctgccctgtctggagtaccacaacaacacatggacatggctagactttgccatggctgtcaaaagggacagccgcaaagccctggttgcccaggtaatcaaagagaagctaaggctgaagtctgcaacaggctctgaggtccggggaaagctagaaactaaatcggacctgaacatgcaacagcaggaagaggaggagaaagcccggctcctcattggtttaagtgtgggcgacaagaaccctggcaagaagtccatctttggcaggcgcaaatgatttggcgattcgagtggctgcagtacaggatctgactctggctcaggctccagggacttgtggggtgggaggggcttcccgttatccacgaggatttgtgggtgtcagagcccataggcatcactcttcagcacctggtctgttcgctgcagggcatggtggacagtaatgctgagttctgtctcacactgatcaggctcagggccagagaggcaacaagagagcaagacccagggaatgggcccagggcaggaccctattcccttggggtcaagtgaaagggtagggggatagtcctgatcaagtgtgataaatttttatagacatatataaatatatatatattatatata

SEQ ID NO: 351028 - DNA, 6965 bp, Homo sapiens
  misc_feature (24)..(24): n is a, c, g, or t
ggctggcgtctagaggatccctcnaaacgtatcagaacggacctacagaaagtttctgacctgtctgccccattctcccagagcgctggggtggatcaaaaggaactgtccttcagcccatccttattgaagatcttctgccaactattctccattcatgtagatgctataaacatcatggttctcaaggtggatacctctgagtccttatggcatattcagatcagtagaagcagatttcttttggatagtgatgggaaaaggctaatctgtgaggtgagcttatgtaagatcaacagcaaagttctaaagagtggtcagctggaggacacctgcctagtggagctttcactggccctggacctgtgtctaaaggtgggcattagcagtcggcatctcactgctatcactgtggatgtgtggacactccatgctgaactgcatgagggcctcttccagagccaactgctgtgccagggcccaagcctagcatctaagcctgttccctgttcagaggtgacagaaaacttagttgagccaactctgcctggcctattccttctccagcagctgccagaccaggtcaaggttaagatggagaacacaagcgtggtattgtccatgaatagtcaaaagaggcacctgacttggactctgaagctgctgcagttcctgtaccaccgtgatgaggatcagctgccccttcgaagcttcacagcaaactctgatatggcacagatgagcactgaactgctgctggaagatgggttgttgttgtcccagagtcgccaacgcattgtctgcctcaactccctcaaggctagtgtgcaggtgaccaccattgacctctcagcctccctagttctgaacacttgcatcattcactaccggcaccaggaattctctcactggctgcacctgctagcactggaaacccaagggtctagttcacctgttctaaagcaaaggaaaaaaagaaccttcccccaaatcctggctcccatcatctttagcacctccatctccaatgtcaacatttccattcaacttggagatacaccaccttttgccttgggattcaattctatctctctggattaccagcacctcaggccacaaagcatccatcagcggggcgtcctaactgtggaccacctctgctggcgtgtgggcagtgactcccacattcagcgggcgccacacccacccaatatgcatgtttggggtgaggcacttgttctggactccttcacactacagggtagctataaccagcctctgggcctgtccagcacccagtcagataccctttttcttgattgtaccattcgaggacttcaggtggaagcatcagatacctgtgcccaatgtctgtctcgtatcttatccctgatgggtccacaatctgggaagtcagctgtctctaggcactcttcatttggggaatctgtgtcattactgtggaaggtggacttgaaggtcgaagacatgaacttgtttaccctttctgccttggttggtgcttcagaggtacgactggacaccctaactatcctgggcagtgcagagacgtccactgtggggattcaaggacttgtgttagcgctggtgaaatcagtcacggagaagatgcaaccctgttgcaaggcccctgacatccctaccccagtgctcagcctttccatgctctccatcacctatcacagcagcatccgctctctggaggttcagtgtggtgcagggctgaccttactttggagccccccagatcacatgtacctgtaccagcatgtcctggccactctacagtgccgagacctactaagagccactgtgtttcctgagactgtaccatcccttgcactagagacttcaggaactacttctgagctagaaggccgtgcccctgagccattacccccaaagcggctgctaaacctaaccctggaggtgagcacagccaagctcacagcttttgtagctgaggacaagttcattaccctggctgcagagagtgtgtcactgagccggcatggaggttccctgcaggcatactgtccagagctggctgctggctttgatggcaatagtatcttcaacttcaaggaggtggaggtgcagctgctacctgagctggaagagatgatcctccaccggaaccccttccctgcgctgcagaccctccggaaccgtgtttggctcctctctttcggctcagtctcggtggagtttccttatcagtatgacttttctcgaactctagatgaggctgtgggagttcagaagtggctgaagggactacatcaagggactcgtgcttgggcctctccaagccctgtcccactcccacctgatctactcttaaaggttgagcacttctcatgggttttcttggatgatgtttttgaggtgaaacttcatgataactacgagctgatgaaggatgaaagtaaggagagtgccaaaagactacagctactggatgctaaagtggccgcccttcggaagcagcatggggagttgttgcctgcccgcaaaattgaggagctctatgcctctttggaacgcaaaaacattgaaatctacatccagcgttcccgtcgtctctatggcaacacacccatgcgccgggcactgcttacttggagcttagcagggctagaactggtagctctggcagatgcctccttccatggtcctgagcatgtggtagaacaggttcaagagcttgatccaggcagcccttttccccctgagggattagatcttgtcattcagtggtgtcgaatgctcaagtgcaatgtcaagagctttctggttcggatcagggactatccacggtacctgtttgagatccgtgactggcggctaatgggtcgacttgtgggcaccgagcagagtggtcagccttgctcccgtcggcgtcagatcttgcacttggggcttccgtggggtaacgtggcagtggagaggaacatgcccccactcaaattctaccatgactttcactcggaaatattccagtacacagtggtgtggggcccatgctgggatccagcctggacactaattggccagtgtgtggacctcttgaccaagccctcagctgaccccagcccacctttgccctggtgggacaagagccgtcttctgttccatggagactggcacatggacattgaacaggcgaacctgcaccagctggccactgaggatccatacaacacaactgaaaatatgcactgggagtggagccacctgtcttttcattggaaacctggtcagtttgtgttcaagggtgacttggatatcaacgtgagaacagcctctaagtatgacgactgctgcttccttcacctgcctgacctctgcatgacactggacctgcagtggctgtgccatgggaacccccatgatcaccatagtgtcactctgcgggccccagagttcctgcctgaggtgcccttgggccagcttcatgactcctaccgggcctttcgctcggagaacctcaatctctccatcaagatggatctgactcggcacagtggaacaatatcccagccccgaattctgctatatagtagtaccctgcgctggatgcaaaacttctgggcaacttggacaagtgtcacaaggcctatctgcaggggaaagctcttcaataacctgaaacccagcaagaagaaacttggtcagcactacaagcaactttcctatacagccctctttccccagctgcaggtacattattgggcctcatttgcccagcaacggggcatccagattgagtgcagtcagggccatgtcttcactcgggggactcagcggcttatacctcaagcaggcacagtgatgcggcgccttatctctgattggagtgttacccagatggtgagtgacctaagtcaggtgaccgttcacctgatggcctcacccactgaagagaatgctgatcactgtcttgatcccttggtaacaaagacccacctgctgagcttgtcctccctcacctaccaacggcatagcaatcgcacagctgaggaggagctctctgctcgtgatggggatcctacctttcatacacatcagctgcacttagtagatttacggatttcctggacaactaccaatcgagacattgcctttgggttatatgatgggtacaaaaaggcagctgtactcaaacgtaatctttctactgaggccctgaaggggttaaagattgatccacagatgccagccaaaaagccaaagcggggtgtcccaactagtgcctcagccccacctcgtgttaacactcccagcttcagtggacaacctgataaggggtcatcaggaggtgcttacatgttgcagaagctaattgaagagacagataggtttgtagtgttcacagaagaggaatcaggcatgagtgaccagttgtgtggcattgctgcctgccagacggatgacatatacaaccgaaactgccttattgaattggtcaactgtcagatggttcttcgtggagcagagacagaaggctgtgtcattgtgtcagctgccaaagcccaactgctgcagtgccagcaccatccagcctggtatggtgatacattgaagcaaaagacatcctggacttgcctcttggatggcatgcagtactttgccaccactgaaagcagccccacagagcaggatggccgacagctctggttagaggtgaagaatatcgaggagcaccggcagcgtagtctggactctgtgcaggagctgatggagagtgggcaggcagtgggcggcatggttaccacaaccacagattggaaccagccagctgaggcacagcaagcccagcaagtccagcggatcatttcgcgttgcaactgccgaatgtactatattagttacagccatgacattgatcctgaactagcaactcagattaagccacctgaagttcttgagaaccaggaaaaggaagatctcctaaagaagcaggaaggggctgtggataccttcacccttatccaccatgagctggaaatttccaccaacccagctcagtatgccatgatcctggacattgtcaacaacctgctgctccatgtagaacctaagcggaaggaacatagtgagaagaagcaacgggtcaggttccagcttgagatctctagcaatccagaggagcaacgcagcagcatactgcatttgcaggaggctgtgcggcagcatgtggcccaaatacgacagctggagaagcagatgtattctatcatgaagtctttgcaggatgacagcaagaatgagaatctgcttgacctgaaccagaagcttcagttgcagctaaaccaggagaaggccaacctgcagctggaaagtgaagaactgaatatcctcatcaggtgttttaaggatttccaactgcagcgggctaacaagatggagctgcgaaagcagcaagaagatgtgagtgtggtccgtcgcactgagttttactttgctcaggcacggtggcgcctgacagaggaagatggacagctgggaattgctgaattagaactgcagaggttcctctacagcaaggtgaataagtctgatgacacagcagaacatcttctggagttgggctggtttaccatgaacaacctcctccccaatgctgtctataaggtagtactgcggccccagagctcctgccagtctgggcgacagctagctctccgcctcttcagcaaagttcggccccctgttgggggtatctctgttaaggagcattttgaggtaaatgtggtgcctctcaccatccagctgacacaccagttcttccacagaatgatgggctttttctttcctggccgaagtgtggaagatgatgaagttggtgatgaagaggataagtccaaactggtgactactggaataccagtggtgaagcctcggcagctgattgcaacagatgatgcagtaccactgggccctgggaagggtgtggcacagggtttgactcggagttctggggtcagaaggtcatttcgcaaatcgccagagcaccctgtggatgacattgacaagatgaaagagcgagctgccatgaacaactccttcatctacataaagattccacaggttccactgtgtgtcagctacaagggtgagaagaacagtgtggactggggtgaccttaacctggtgctgccctgtctggagtaccacaacaacacatggacatggctagactttgccatggctgtcaaaagggacagccgcaaagccctggttgcccaggtaatcaaagagaagctaaggctgaagtctgcaacaggctctgaggtccggggaaagctagaaactaaatcggacctgaacatgcaacagcaggaagaggaggagaaagcccggctcctcattggtttaagtgtgggcgacaagaaccctggcaagaagtccatctttggcaggcgcaaatgatttggcgattcgagtggctgcagtacaggatctgactctggctcaggctccagggacttgtggggtgggaggggcttcccgttatccacgaggatttgtgggtgtcagagcccataggcatcactcttcagcacctggtctgttcgctgcagggcatggtggacagtaatgctgagttctgtctcacactgatcaggctcagggccagagaggcaacaagagagcaagacccagggaatgggcccagggcaggaccctattcccttggggtcaagtgaaagggtagggctgatcctcactccactgtcatgtttgaaagaggtattggtgttctggagtgggggtcaacccctccccagtctctgtgctaagttcacttgggaggatggcagtaggagccagggctggccatgggtcccctacccttccccgtaggatataccctggagaatggcaaaatgatttaaagagaaaaaaaaagatattttaaatttgatgctcaaatttgt

SEQ ID NO: 351029 - DNA, 6161 bp, Homo sapiens
  misc_feature (24)..(24): n is a, c, g, or t
  misc_feature (6143)..(6143): n is a, c, g, or t
ggctggcgtctagaggatccctcnaaacgtatcagaacggacctacagaaagtttctgacctgtctgccccattctcccagagcgctggggtggatcaaaaggaactgtccttcagcccatccttattgaagatcttctgccaactattctccattcatgtagatgctataaacatcatggttctcaaggtggatacctctgagtccttatggcatattcagatcagtagaagcagatttcttttggatagtgatgggaaaaggctaatctgtgaggtgagcttatgtaagatcaacagcaaagttctaaagagtggtcagctggaggacacctgcctagtggagctttcactggccctggacctgtgtctaaaggtgggcattagcagtcggcatctcactgctatcactgtggatgtgtggacactccatgctgaactgcatgagggcctcttccagagccaactgctgtgccagggcccaagcctagcatctaagcctgttccctgttcagaggtgacagaaaacttagttgagccaactctgcctggcctattccttctccagcagctgccagaccaggtcaaggttaagatggagaacacaagcgtggtattgtccatgaatagtcaaaagaggcacctgacttggactctgaagctgctgcagttcctgtaccaccgtgatgaggatcagctgccccttcgaagcttcacagcaaactctgatatggcacagatgagcactgaactgctgctggaagatgggttgttgttgtcccagagtcgccaacgcattgtctgcctcaactccctcaaggctagtgtgcaggtgaccaccattgacctctcagcctccctagttctgaacacttgcatcattcactaccggcaccaggaattctctcactggctgcacctgctagcactggaaacccaagggtctagttcacctgttctaaagcaaaggaaaaaaagaaccttcccccaaatcctggctcccatcatctttagcacctccatctccaatgtcaacatttccattcaacttggagatacaccaccttttgccttgggattcaattctatctctctggattaccagcacctcaggccacaaagcatccatcagcggggcgtcctaactgtggaccacctctgctggcgtgtgggcagtgactcccacattcagcgggcgccacacccacccaatatgcatgtttggggtgaggcacttgttctggactccttcacactacagggtagctataaccagcctctgggcctgtccagcacccagtcagataccctttttcttgattgtaccattcgaggacttcaggtggaagcatcagatacctgtgcccaatgtctgtctcgtatcttatccctgatgggtccacaatctgggaagtcagctgtctctaggcactcttcatttggggaatctgtgtcattactgtggaaggtggacttgaaggtcgaagacatgaacttgtttaccctttctgccttggttggtgcttcagaggtacgactggacaccctaactatcctgggcagtgcagagacgtccactgtggggattcaaggacttgtgttagcgctggtgaaatcagtcacggagaagatgcaaccctgttgcaaggcccctgacatccctaccccagtgctcagcctttccatgctctccatcacctatcacagcagcatccgctctctggaggttcagtgtggtgcagggctgaccttactttggagccccccagatcacatgtacctgtaccagcatgtcctggccactctacagtgccgagacctactaagagccactgtgtttcctgagactgtaccatcccttgcactagagacttcaggaactacttctgagctagaaggccgtgcccctgagccattacccccaaagcggctgctaaacctaaccctggaggtgagcacagccaagctcacagcttttgtagctgaggacaagttcattaccctggctgcagagagtgtgtcactgagccggcatggaggttccctgcaggcatactgtccagagctggctgctggctttgatggcaatagtatcttcaacttcaaggaggtggaggtgcagctgctacctgagctggaagagatgatcctccaccggaaccccttccctgcgctgcagaccctccggaaccgtgtttggctcctctctttcggctcagtctcggtggagtttccttatcagtatgacttttctcgaactctagatgaggctgtgggagttcagaagtggctgaagggactacatcaagggactcgtgcttgggcctctccaagccctgtcccactcccacctgatctactcttaaaggttgagcacttctcatgggttttcttggatgatgtttttgaggtgaaacttcatgataactacgagctgatgaaggatgaaagtaaggagagtgccaaaagactacagctactggatgctaaagtggccgcccttcggaagcagcatggggagttgttgcctgcccgcaaaattgaggagctctatgcctctttggaacgcaaaaacattgaaatctacatccagcgttcccgtcgtctctatggcaacacacccatgcgccgggcactgcttacttggagcttagcagggctagaactggtagctctggcagatgcctccttccatggtcctgagcatgtggtagaacaggttcaagagcttgatccaggcagcccttttccccctgagggattagatcttgtcattcagtggtgtcgaatgctcaagtgcaatgtcaagagctttctggttcggatcagggactatccacggtacctgtttgagatccgtgactggcggctaatgggtcgacttgtgggcaccgagcagagtggtcagccttgctcccgtcggcgtcagatcttgcacttggggcttccgtggggtaacgtggcagtggagaggaacatgcccccactcaaattctaccatgactttcactcggaaatattccagtacacagtggtgtggggcccatgctgggatccagcctggacactaattggccagtgtgtggacctcttgaccaagccctcagctgaccccagcccacctttgccctggtgggacaagagccgtcttctgttccatggagactggcacatggacattgaacaggcgaacctgcaccagctggccactgaggatccatacaacacaactgaaaatatgcactgggagtggagccacctgtcttttcattggaaacctggtcagtttgtgttcaagggtgacttggatatcaacgtgagaacagcctctaagtatgacgactgctgcttccttcacctgcctgacctctgcatgacactggacctgcagtggctgtgccatgggaacccccatgatcaccatagtgtcactctgcgggccccagagttcctgcctgaggtgcccttgggccagcttcatgactcctaccgggcctttcgctcggagaacctcaatctctccatcaagatggatctgactcggcacagtggaacaatatcccagccccgaattctgctatatagtagtaccctgcgctggatgcaaaacttctgggcaacttggacaagtgtcacaaggcctatctgcaggggaaagctcttcaataacctgaaacccagcaagaagaaacttggtcagcactacaagcaactttcctatacagccctctttccccagctgcaggtacattattgggcctcatttgcccagcaacggggcatccagattgagtgcagtcagggccatgtcttcactcgggggactcagcggcttatacctcaagcaggcacagtgatgcggcgccttatctctgattggagtgttacccagatggtgagtgacctaagtcaggtgaccgttcacctgatggcctcacccactgaagagaatgctgatcactgtcttgatcccttggtaacaaagacccacctgctgagcttgtcctccctcacctaccaacggcatagcaatcgcacagctgaggaggagctctctgctcgtgatggggatcctacctttcatacacatcagctgcacttagtagatttacggatttcctggacaactaccaatcgagacattgcctttgggttatatgatgggtacaaaaaggcagctgtactcaaacgtaatctttctactgaggccctgaaggggttaaagattgatccacagatgccagccaaaaagccaaagcggggtgtcccaactagtgcctcagccccacctcgtgttaacactcccagcttcagtggacaacctgataaggggtcatcaggaggtgcttacatgttgcagaagctaattgaagagacagataggtttgtagtgttcacagaagaggaatcaggcatgagtgaccagttgtgtggcattgctgcctgccagacggatgacatatacaaccgaaactgccttattgaattggtcaactgtcagatggttcttcgtggagcagagacagaaggctgtgtcattgtgtcagctgccaaagcccaactgctgcagtgccagcaccatccagcctggtatggtgatacattgaagcaaaagacatcctggacttgcctcttggatggcatgcagtactttgccaccactgaaagcagccccacagagcaggatggccgacagctctggttagaggtgaagaatatcgaggagcaccggcagcgtagtctggactctgtgcaggagctgatggagagtgggcaggcagtgggcggcatggttaccacaaccacagattggaaccagccagctgaggcacagcaagcccagcaagtccagcggatcatttcgcgttgcaactgccgaatgtactatattagttacagccatgacattgatcctgaactagcaactcagattaagccacctgaagttcttgagaaccaggaaaaggaagatctcctaaagaagcaggaaggggctgtggataccttcacccttatccaccatgagctggaaatttccaccaacccagctcagtatgccatgatcctggacattgtcaacaacctgctgctccatgtagaacctaagcggaaggaacatagtgagaagaagcaacgggtcaggttccagcttgagatctctagcaatccagaggagcaacgcagcagcatactgcatttgcaggaggctgtgcggcagcatgtggcccaaatacgacagctggagaagcagatgtattctatcatgaagtctttgcaggatgacagcaagaatgagaatctgcttgacctgaaccagaagcttcagttgcagctaaaccaggagaaggccaacctgcagctggaaagtgaagaactgaatatcctcatcaggtgttttaaggatttccaactgcagcgggctaacaagatggagctgcgaaagcagcaagaagatgtgagtgtggtccgtcgcactgagttttactttgctcaggcacggtggcgcctgacagaggaagatggacagctgggaattgctgaattagaactgcagaggttcctctacagcaaggtgaataagtctgatgacacagcagaacatcttctggagttgggctggtttaccatgaacaacctcctccccaatgctgtctataaggtagtactgcggccccagagctcctgccagtctgggcgacagctagctctccgcctcttcagcaaagttcggccccctgttgggggtatctctgttaaggagcattttgaggtaaatgtggtgcctctcaccatccagctgacacaccagttcttccacagaatgatgggctttttctttcctggccgaagtgtggaagatgatgaagttggtgatgaagaggataagtccaaactggtgactactggaataccagtggtgaagcctcggcagctgattgcaacagatgatgcagtaccactgggccctgggaagggtgtggcacagggtttgactcggagttctggggtcagaaggtcatttcgcaaatcgccagagcaccctgtggatgacattgacaagatgaaagagcgagctgccatgaacaactccttcatctacataaagattccacaggttccactgtgtgtcagctacaagtcccnggcccagtgtggagagag

SEQ ID NO: 351030 - DNA, 1435 bp, Homo sapiens
gactctatgtaggatcccctgccatgtactccatggtctgggcgacagctagctctccgcctcttcagcaaagttcggccccctgttgggggtatctctgttaaggagcattttgaggtaaatgtggtgcctctcaccatccagctgacacaccagttcttccacagaatgatgggctttttctttcctggccgaagtgtggaagatgatgaagttggtgatgaagaggataagtccaaactggtgactactggaataccagtggtgaagcctcggcagctgattgcaacagatgatgcagtaccactgggccctgggaagggtgtggcacagggtttgactcggagttctggggtcagaaggtcatttcgcaaatcgccagagcaccctgtggatgacattgacaagatgaaagagcgagctgccatgaacaactccttcatctacataaagattccacaggttccactgtgtgtcagctacaagggtgagaagaacagtgtggactggggtgaccttaacctggtgctgccctgtctggagtaccacaacaacacatggacatggctagactttgccatggctgtcaaaagggacagccgcaaagccctggttgcccaggtaatcaaagagaagctaaggctgaagtctgcaacaggctctgaggtccggggaaagctagaaactaaatcggacctgaacatgcaacagcaggaagaggaggagaaagcccggctcctcattggtttaagtgtgggcgacaagaaccctggcaagaagtccatctttggcaggcgcaaatgatttggcgattcgagtggctgcagtacaggatctgactctggctcaggctccagggacttgtggggtgggaggggcttcccgttatccacgaggatttgtgggtgtcagagcccataggcatcactcttcagcacctggtctgttcgctgcagggcatggtggacagtaatgctgagttctgtctcacactgatcaggctcagggccagagaggcaacaagagagcaagacccagggaatgggcccagggcaggaccctattcccttggggtcaagtgaaagggtagggggatagtcctgatcaagtgtgataaatttttatagacatatataaatatatatatattatatatatatttctaagtgtaactgtccttcctctgtgccaggaaacgggagggggctgatcctctgatcctcactccactgtcatgtttgaaagaggtattggtgttctggagtgggggtcaacccctccccagtctctgtgctaagttcacttgggaggatggcagtaggagccagggctggccatgggtcccctacccttccccgtaggatataccctggagaatggcaaaatgatttaaagagaaaaaaaaagatattttaaatttgatgctcaaatttgt

SEQ ID NO: 351031 - DNA, 1294 bp, Homo sapiens
tctccctctttctctgctcttcttccttggagatggcagaatccagccccttagggaaatgaatcataggtgaaggagtaaggagttgagggagacagagttagtggaactactgaaacaacctgtccaattaatttggacctccagaataggctctgagaagaagccacaactatcttccaactagactgaatccctgaggtcttgtctcctcatgttatctgctcctgaaggggtttggaaatctccagggtttttcaggtttgtggagaaagactaggacaaccactgaccagcaactgccctggcacttggtagggctatgatggatttactgaacgttgaagcagaaagtgaaatgcaaaccaattttagtattgcatgccctatgttaatctctggtcagcactgagtgttcaaagacagtaggacgtcggttgctgacctgcctcttagaagctagtttaactcagcgggtaaggatctaggacttctacattagttaccactgtaatgataacaccaccagaaaagtctgtagtttaatatttcccaccttatgcctgtttcttcattcacgcaaagaaaataaaaatataatacctaagcctctttgtattacataaagcaaaatgcaaagcactgtatcttccaaatacttcctcttgatatggtggaattatagagtagtatcatttgtaactgaaatgtcttctagggttgctatgcgaaagcaagactgtggtttcattccaatttcctgtatatcggaatcatcaccatctgtgtatgtgtgattgagggtaagagcttaaccacagggttattgtgaggattacatgagttaagtcaggtaagatttcagaataataccaggtacacagtatttacacaataaatgttagctatttttactaatatatgaattcccccagccaagtagcaaataatgtaattaacaatttgctttaaggtatatagaaaatgtgctataagaacatctcttggccgggcgtggtggctcacgcctgtaatcccagcactttgggaggctgaggcaggcagatcacgaggtcaggagatcaagaccatcctggctaacatggtgaaaccccgtctctactaaaaatacaaaaaattaaccagacgtagtggcaggtgcctgtagtcccagctacttgggaggctaaggtaggagaatggcgtgaacctgggaggcggagcttgtagtgagtcaagatcgtgccactgcactcctgcctgggcgacagagcgagactctgtctccagaaaa

SEQ ID NO: 351032 - DNA, 1555 bp, Homo sapiens
tgtcgtcacagcatgatcatattttttcacccttcacttctccttttacacaaatagccccggatatctgtgttaccagccttgtctcggccacctcaaggataatcactaaattctgccgaaaggactgaggaacggtgcctggaaaagggcaagaatatcacggcatgggcatgagtagcttgaaactgctgaagtatgtcctgtttttcttcaacttgctcttttggatctgtggctgctgcattttgggctttgggatctacctgctgatccacaacaacttcggagtgctcttccataacctcccctccctcacgctgggcaatgtgtttgtcatcgtgggctctattatcatggtagttgccttcctgggctgcatgggctctatcaaggaaaacaagtgtctgcttatgtcgttcttcatcctgctgctgattatcctccttgctgaggtgaccttggccatcctgctctttgtatatgaacagaagctgaatgagtatgtggctaagggtctgaccgacagcatccaccgttaccactcagacaatagcaccaaggcagcgtgggactccatccagtcatttctgcagtgttgtggtataaatggcacgagtgattggaccagtggcccaccagcatcttgcccctcagatcgaaaagtggagggttgctatgcgaaagcaagactgtggtttcattccaatttcctgtatatcggaatcatcaccatctgtgtatgtgtgattgaggtgttggggatgtcctttgcactgaccctgaactgccagattgacaaaaccagccagaccatagggctatgatctgcagtagttctgtggtgaagagacttgtttcatctccggaaatgcaaaaccatttatagcatgaagccctacatgatcactgcaggatgatcctcctcccatcctttccctttttaggtccctgtcttatacaaccagagaagtgggtgttggccaggcacatcccatctcaggcagcaagacaatctttcactcactgacggcagcagccatgtctctcaaagtggtgaaactaatatctgagcatcttttagacaagagaggcaaagacaaactggatttaatggcccaacatcaaagggtgaacccaggatatgaatttttgcatcttcccattgtcgaattagtctccagcctctaaataatgcccagtcttctccccaaagtcaagcaagagactagttgaagggagttctggggccaggctcactggaccattgtcacaaccctctgtttctctttgactaagtgccctggctacaggaattacacagttctctttctccaaagggcaagatctcatttcaatttctttattagagggccttattgatgtgttctaagtctttccagaaaaaaactatccagtgatttatatcctgatttcaaccagtcacttagctgataatcacagtaagaagacttctggtattatctctctatcagataagattttgttaatgtactattttactcttcaataaataaaacagtttattatctca

SEQ ID NO: 351033 - DNA, 1386 bp, Homo sapiens
actgaagaaacatccaaggtggtcttgaaggacactgggatcctgtaacacagccccggatatctgtgttaccagccttgtctcggccacctcaaggataatcactaaattctgccgaaaggactgaggaacggtgcctggaaaagggcaagaatatcacggcatgggcatgagtagcttgaaactgctgaagtatgtcctgtttttcttcaacttgctcttttggatctgtggctgctgcattttgggctttgggatctacctgctgatccacaacaacttcggagtgctcttccataacctcccctccctcacgctgggcaatgtgtttgtcatcgtgggctctattatcatggtagttgccttcctgggctgcatgggctctatcaaggaaaacaagtgtctgcttatgtcgttcttcatcctgctgctgattatcctccttgctgaggtgaccttggccatcctgctctttgtatatgaacagaagctgaatgagtatgtggctaagggtctgaccgacagcatccaccgttaccactcagacaatagcaccaaggcagcgtgggactccatccagtcatttgtgttggggatgtcctttgcactgaccctgaactgccagattgacaaaaccagccagaccatagggctatgatctgcagtagttctgtggtgaagagacttgtttcatctccggaaatgcaaaaccatttatagcatgaagccctacatgatcactgcaggatgatcctcctcccatcctttccctttttaggtccctgtcttatacaaccagagaagtgggtgttggccaggcacatcccatctcaggcagcaagacaatctttcactcactgacggcagcagccatgtctctcaaagtggtgaaactaatatctgagcatcttttagacaagagaggcaaagacaaactggatttaatggcccaacatcaaagggtgaacccaggatatgaatttttgcatcttcccattgtcgaattagtctccagcctctaaataatgcccagtcttctccccaaagtcaagcaagagactagttgaagggagttctggggccaggctcactggaccattgtcacaaccctctgtttctctttgactaagtgccctggctacaggaattacacagttctctttctccaaagggcaagatctcatttcaatttctttattagagggccttattgatgtgttctaagtctttccagaaaaaaactatccagtgatttatatcctgatttcaaccagtcacttagctgataatcacagtaagaagacttctggtattatctctctatcagataagattttgttaatgtactattttactcttcaataaataaaacagtttattatctca

SEQ ID NO: 351034 - DNA, 1602 bp, Homo sapiens
tctccctctttctctgctcttcttccttggagatggcagaatccagccccttagggaaatgaatcataggtgaaggagtaaggagttgagggagacagagttagtggaactactgaaacaacctgtccaattaatttggacctccagaataggctctgagaagaagccacaactatcttccaactagactgaatccctgaggtcttgtctcctcatgttatctgctcctgaaggggtttggaaatctccagggtttttcaggtttgtggagaaagactaggacaaccactgaccagcaactgccctggcacttggtagggctatgatggatttactgaacgttgaagcagaaagtgaaatgcaaaccaattttagtattgcatgccctatgttaatctctggtcagcactgagtgttcaaagacagtaggacgtcggttgctgacctgcctcttagaagctagtttaactcagcgggtaaggatctaggacttctacattagttaccactgtaatgataacaccaccagaaaagtctgtagtttaatatttcccaccttatgcctgtttcttcattcacgcaaagaaaataaaaatataatacctaagcctctttgtattacataaagcaaaatgcaaagcactgtatcttccaaatacttcctcttgatatggtggaattatagagtagtatcatttgtaactgaaatgtcttctagggttgctatgcgaaagcaagactgtggtttcattccaatttcctgtatatcggaatcatcaccatctgtgtatgtgtgattgaggtgttggggatgtcctttgcactgaccctgaactgccagattgacaaaaccagccagaccatagggctatgatctgcagtagttctgtggtgaagagacttgtttcatctccggaaatgcaaaaccatttatagcatgaagccctacatgatcactgcaggatgatcctcctcccatcctttccctttttaggtccctgtcttatacaaccagagaagtgggtgttggccaggcacatcccatctcaggcagcaagacaatctttcactcactgacggcagcagccatgtctctcaaagtggtgaaactaatatctgagcatcttttagacaagagaggcaaagacaaactggatttaatggcccaacatcaaagggtgaacccaggatatgaatttttgcatcttcccattgtcgaattagtctccagcctctaaataatgcccagtcttctccccaaagtcaagcaagagactagttgaagggagttctggggccaggctcactggaccattgtcacaaccctctgtttctctttgactaagtgccctggctacaggaattacacagttctctttctccaaagggcaagatctcatttcaatttctttattagagggccttattgatgtgttctaagtctttccagaaaaaaactatccagtgatttatatcctgatttcaaccagtcacttagctgataatcacagtaagaagacttctggtattatctctctatcagataagattttgttaatgtactattttactcttcaataaataaaacagtttattatctca

SEQ ID NO: 351035 - DNA, 1478 bp, Homo sapiens
actgaagaaacatccaaggtggtcttgaaggacactgggatcctgtaacacagccccggatatctgtgttaccagccttgtctcggccacctcaaggataatcactaaattctgccgaaaggactgaggaacggtgcctggaaaagggcaagaatatcacggcatgggcatgagtagcttgaaactgctgaagtatgtcctgtttttcttcaacttgctcttttggatctgtggctgctgcattttgggctttgggatctacctgctgatccacaacaacttcggagtgctcttccataacctcccctccctcacgctgggcaatgtgtttgtcatcgtgggctctattatcatggtagttgccttcctgggctgcatgggctctatcaaggaaaacaagtgtctgcttatgtcgttcttcatcctgctgctgattatcctccttgctgaggtgaccttggccatcctgctctttgtatatgaacagaagctgaatgagtatgtggctaagggtctgaccgacagcatccaccgttaccactcagacaatagcaccaaggcagcgtgggactccatccagtcatttctgcagtgttgtggtataaatggcacgagtgattggaccagtggcccaccagcatcttgcccctcagatcgaaaagtggagggttgctatgcgaaagcaagactgtggtttcattccaatttcctgtatatcggaatcatcaccatctgtgtatgtgtgattgaggtgttggggatgtcctttgcactgaccctgaactgccagattgacaaaaccagccagaccatagggctatgatctgcagtagttctgtggtgaagagacttgtttcatctccggaaatgcaaaaccatttatagcatgaagccctacatgatcactgcaggatgatcctcctcccatcctttccctttttaggtccctgtcttatacaaccagagaagtgggtgttggccaggcacatcccatctcaggcagcaagacaatagaggcaaagacaaactggatttaatggcccaacatcaaagggtgaacccaggatatgaatttttgcatcttcccattgtcgaattagtctccagcctctaaataatgcccagtcttctccccaaagtcaagcaagagactagttgaagggagttctggggccaggctcactggaccattgtcacaaccctctgtttctctttgactaagtgccctggctacaggaattacacagttctctttctccaaagggcaagatctcatttcaatttctttattagagggccttattgatgtgttctaagtctttccagaaaaaaactatccagtgatttatatcctgatttcaaccagtcacttagctgataatcacagtaagaagacttctggtattatctctctatcagataagattttgttaatgtactattttactcttcaataaataaaacagtttattatctca

SEQ ID NO: 351036 - DNA, 1219 bp, Homo sapiens
tgtcgtcacagcatgatcatattttttcacccttcacttctccttttacacaaatagccccggatatctgtgttaccagccttgtctcggccacctcaaggataatcactaaattctgccgaaaggactgaggaacggtgcctggaaaagggcaagaatatcacggcatgggcatgagtagcttgaaactgctgaagtatgtcctgtttttcttcaacttgctcttttggatctgtggctgctgcattttgggctttgggatctacctgctgatccacaacaacttcggagtgctcttccataacctcccctccctcacgctgggcaatgtgtttgtcatcgtgggctctattatcatggtagttgccttcctgggctgcatgggctctatcaaggaaaacaagtgtctgcttatgtcggtgttggggatgtcctttgcactgaccctgaactgccagattgacaaaaccagccagaccatagggctatgatctgcagtagttctgtggtgaagagacttgtttcatctccggaaatgcaaaaccatttatagcatgaagccctacatgatcactgcaggatgatcctcctcccatcctttccctttttaggtccctgtcttatacaaccagagaagtgggtgttggccaggcacatcccatctcaggcagcaagacaatctttcactcactgacggcagcagccatgtctctcaaagtggtgaaactaatatctgagcatcttttagacaagagaggcaaagacaaactggatttaatggcccaacatcaaagggtgaacccaggatatgaatttttgcatcttcccattgtcgaattagtctccagcctctaaataatgcccagtcttctccccaaagtcaagcaagagactagttgaagggagttctggggccaggctcactggaccattgtcacaaccctctgtttctctttgactaagtgccctggctacaggaattacacagttctctttctccaaagggcaagatctcatttcaatttctttattagagggccttattgatgtgttctaagtctttccagaaaaaaactatccagtgatttatatcctgatttcaaccagtcacttagctgataatcacagtaagaagacttctggtattatctctctatcagataagattttgttaatgtactattttactcttcaataaataaaacagtttattatctca

SEQ ID NO: 351037 - DNA, 1496 bp, Homo sapiens
agatatgagtgattcacatgattcacagtcaaacaaaaaagccaccaagcagaatcccactgtgatccctcctcagctggtctgaaaaatacgaattgataaagtatttcatttgaaaacctgatcttgcatgttaaggggctgatgacgaaaattgtaatcaatttcctctttgtttctgtgcttagtttgacaagtgatgggtgaattgagggtagttttttgtcctttttaataaaaaaggacaaaaataatgtgatatttctaacatttttctacccaagtgttgggtatatcatagattagttaaaactcaatcaggaagctcagagaaaatgatttttctctgtttggaaacaaaggaggcacagagcatggatagagataactcattgcacagtgttcagtgagcagaatatgaccatcctagcagcaaggcttctgtgacttcctcagaagataaaacatgctccagtactttacagcctgttatcttgtcatcattgaccccgtttctctcctcactgctattctttaaccaaaggaaagagctcctgagagagacttgaaagtaatggttggaagggtggtttcagtgtaatggatacattctttttctcagaggccaatcccaggcattgtgaaagaaatggcttttcttatgaagacttcaaattttcccaactcttttcacaggtgttggggatgtcctttgcactgaccctgaactgccagattgacaaaaccagccagaccatagggctatgatctgcagtagttctgtggtgaagagacttgtttcatctccggaaatgcaaaaccatttatagcatgaagccctacatgatcactgcaggatgatcctcctcccatcctttccctttttaggtccctgtcttatacaaccagagaagtgggtgttggccaggcacatcccatctcaggcagcaagacaatctttcactcactgacggcagcagccatgtctctcaaagtggtgaaactaatatctgagcatcttttagacaagagaggcaaagacaaactggatttaatggcccaacatcaaagggtgaacccaggatatgaatttttgcatcttcccattgtcgaattagtctccagcctctaaataatgcccagtcttctccccaaagtcaagcaagagactagttgaagggagttctggggccaggctcactggaccattgtcacaaccctctgtttctctttgactaagtgccctggctacaggaattacacagttctctttctccaaagggcaagatctcatttcaatttctttattagagggccttattgatgtgttctaagtctttccagaaaaaaactatccagtgatttatatcctgatttcaaccagtcacttagctgataatcacagtaagaagacttctggtattatctctctatcagataagattttgttaatgtactattttactcttcaataaataaaacagtttattatctca

SEQ ID NO: 351038 - DNA, 1243 bp, Homo sapiens
actgaagaaacatccaaggtggtcttgaaggacactgggatcctgtaacacagccccggatatctgtgttaccagccttgtctcggccacctcaaggataatcactaaattctgccgaaaggactgaggaacggtgcctggaaaagggcaagaatatcacggcatgggcatgagtagcttgaaactgctgaagtatgtcctgtttttcttcaacttgctcttttggatctgtggctgctgcattttgggctttgggatctacctgctgatccacaacaacttcggagtgctcttccataacctcccctccctcacgctgggcaatgtgtttgtcatcgtgggctctattatcatggtagttgccttcctgggctgcatgggctctatcaaggaaaacaagtgtctgcttatgtcgttcttcatcctgctgctgattatcctccttgctgaggtgaccttggccatcctgctctttgtatatgaacagaagctgaatgagtatgtggctaagggtctgaccgacagcatccaccgttaccactcagacaatagcaccaaggcagcgtgggactccatccagtcatttctgcagtgttgtggtataaatggcacgagtgattggaccagtggcccaccagcatcttgcccctcagatcgaaaagtggagggttgctatgcgaaagcaagactgtggtttcattccaatttcctgtatatcggaatcatcaccatctgtgtatgtgtgattgagggtaagagcttaaccacagggttattgtgaggattacatgagttaagtcaggtaagatttcagaataataccaggtacacagtatttacacaataaatgttagctatttttactaatatatgaattcccccagccaagtagcaaataatgtaattaacaatttgctttaaggtatatagaaaatgtgctataagaacatctcttggccgggcgtggtggctcacgcctgtaatcccagcactttgggaggctgaggcaggcagatcacgaggtcaggagatcaagaccatcctggctaacatggtgaaaccccgtctctactaaaaatacaaaaaattaaccagacgtagtggcaggtgcctgtagtcccagctacttgggaggctaaggtaggagaatggcgtgaacctgggaggcggagcttgtagtgagtcaagatcgtgccactgcactcctgcctgggcgacagagcgagactctgtctccagaaaa

SEQ ID NO: 351039 - DNA, 1896 bp, Homo sapiens
actgaagaaacatccaaggtggtcttgaaggacactgggatcctgtaacacagccccggatatctgtgttaccagccttgtctcggccacctcaaggataatcactaaattctgccgaaaggactgaggaacggtgcctggaaaagggcaagaatatcacggcatgggcatgagtagcttgaaactgctgaagtatgtcctgtttttcttcaacttgctcttttgggagatacataaataacggttggcatttgggaggcctcaaccattcctgaggtactggtggtggcagttgcaagtatcttttgctgcactgaaggaggcaatgatgacgctggtacagatttcacttcagcatgggctggaatctgtaaatgatgcccagaaggcaaaactggagacttcacagtcactggaagactctgggtattaactacaataaaagatgagtctttttgtgttgagggaggaacagcaaatgtttgcatggtgagtccatcaattttcacaccatgactctgaactttagaaactgatgaagaaaaatttccagttcccacagaagtaactctacctttttctgatgtatctactgttcttgtaaggaaaatagtttgaagaactggctggctgaaaaatgggcacattgaactgatgcacttgtggaagagctggaaatctgagtctgaaaagtaacttgaactggttttcctgtattccctttcaaagcatcagacatgactgaagattgaactagtggtataagatttccagaagacttaggaattggaagtaattgcagaagattttttccatccgagccaatcgtctgaactacttggtacatgcagcctgaaacaccacgcgaggcgttgcctgaattttcctctgcgggtttcaggaagaccctccgtaggttatttgacattttagtggggagaaaggggacacctcatccagaaaagtgggaagcgtggggccgagtttcccaatggggcgagaaccagagcgagggaatgttgggctggagttgcccacagcaactgtgaggggttcgaccttaacggagggcgacagcgggctctcgagagggtgtatccccaggcttcgggacgaggtcgcgcaccgcgcagaaaccggaaggctcctggcggtggactgcgccctcacagccctacgctgagagagaatcggcgtgagtctccgccctcagagcctacgacaactctccagactccgccggagcaggcgcagggggcgtggccttggtggcaccacccccaacagagcctggtcagtgctgaagactgcgtcagtctggctctgccgccccgcccactgaagccgatagctggagcaaagctcggtcgggcgtcttccggggtcgtcacgtccggttgccaaggtgactggctcgctaaagcccaacccttatgatgcaatccaatggcaagtgatatttgctatcttttcttccggatcaaggaacaaatcgcaaaagaaagctctcccgacacctacgcaaaataaaatgtttccggggtcaatcataaattttctgcttctgtgctcgccgctagcgtacgtttttctctcccgtcagtgcattaaaagacatcggcgcgcttttttggagtcatgcacttctggcctgagaaaacttaaaacgcctgcctgtggccagcgattattgttgctgcttctctgaaggtttcccatttactcctctttcctgaagctttgcctctagacttacttaactctttcctccagcctacgttcatcgaaactatcacttattgtcatatagacctttatttctgaagggagatctgggagttgcatcagaacatccattgtattcattaaatcatttattcagctgtccattgcagt

SEQ ID NO: 351040 - DNA, 936 bp, Homo sapiens
tgtcgtcacagcatgatcatattttttcacccttcacttctccttttacacaaatagccccggatatctgtgttaccagccttgtctcggccacctcaaggataatcactaaattctgccgaaaggactgaggaacggtgcctggaaaagggcaagaatatcacggcatgggcatgagtagcttgaaactgctgaagtatgtcctgtttttcttcaacttgctcttttggatctgtggctgctgcattttgggctttgggatctacctgctgatccacaacaacttcggagtgctcttccataacctcccctccctcacgctgggcaatgtgtttgtcatcgtgggctctattatcatggtagttgccttcctgggctgcatgggctctatcaaggaaaacaagtgtctgcttatgtcggtgagtccttacagcagatgtggtgccccaagtcggggagatggtgcctaaatcccaggcaagatgtttcttggtagatcacttataggcacagaaagatcataggaaaatgagattggtacctcagatcagccaagtctgcccagaccaatagtatattatgtatgactagggtcccatggacaggtgaaagagggcattgctatcccccttgtagccatttttatattgctaataatgacttttgtcattattgtaattcccctttatagcattttattttttctttatgtctggatgaaatcaggtgtcatccatcttccaaaatcctcctcatgctagctattattatgtactttcagattctgactgagagtcgctaactaatggaaaataatttctaggctctttcctccccaaatgccaaaggatgcttccttaactcatgtctgcacaagatactccgtagagagatccaacttaggtgagggctctggctgcagccattgaggtctaa

SEQ ID NO: 351041 - DNA, 804 bp, Homo sapiens
actgaagaaacatccaaggtggtcttgaaggacactgggatcctgtaacacagccccggatatctgtgttaccagccttgtctcggccacctcaaggataatcactaaattctgccgaaaggactgaggaacggtgcctggaaaagggcaagaatatcacggcatgggcatgagtagcttgaaactgctgaagtatgtcctgtttttcttcaacttgctcttttgggtaagtgtatctcttctgagcacggtttagctcacctttacccagctaagctctcctcattcctctactgaagaggctggtgtggggtaaaatgcatgcgtgtttgggtcatgtccagcacaaccatcctagaaacaaaagagtaataatttttcccctcttcctgccacagaataaacctgcaaaattgaaaggtaccagtgcagttattaatggaggtgctgtttctctctgagggctttagtttactactactcgtagctaacatatataggtgagaaacctgagactgtgctctggatattgagtgcctctgtttttcttgtctttttttctagattccttgaaacaataagtgattgaaaggaaagtcaccctttccagggaggtttcactgtataaaattcagcaattgaatttcagatataggatgggttggtacttgtgtatatgagaagattattataagtttggcttctctagttttctgcctagcaagatgagcttcctcaagcagggcatcttctctacatggtcatggtttctacagagaaagccatgtgtgagcgactgaaaag

SEQ ID NO: 351042 - DNA, 718 bp, Homo sapiens
  misc_feature (646)..(646): n is a, c, g, or t
  misc_feature (718)..(718): n is a, c, g, or t
tgtcgtcacagcatgatcatattttttcacccttcacttctccttttacacaaatagccccggatatctgtgttaccagccttgtctcggccacctcaaggataatcactaaattctgccgaaaggactgaggaacggtgcctggaaaagggcaagaatatcacggcatgggcatgagtagcttgaaactgctgaagtatgtcctgtttttcttcaacttgctcttttggatctgtggctgctgcattttgggctttgggatctacctgctgatccacaacaacttcggagtgctcttccataacctcccctccctcacgctgggcaatgtgtttgtcatcgtgggctctattatcatggtagttgccttcctgggctgcatgggctctatcaaggctgaggtgaccttggccatcctgctctttgtatatgaacagaagctgaatgagtatgtggctaagggtctgaccgacagcatccaccgttaccactcagacaatagcaccaaggcagcgtgggactccatccagtcatttctgcagtgttgtggtataaatggcacgagtgattggaccagtggcccaccagcatcttgcccctcagatcgaaaagtggagttgctatcgaagccagactgtggttcatnccatttctgatatcggatcatcaccattggggatgtgtaatgaggggttgggatgcccttgccttgacccan

SEQ ID NO: 351043 - DNA, 430 bp, Homo sapiens
gtgaccttggccatcctgctctttgtatatgaacagaaggtaagttataaagacaacaacttattgtcttaatactgaaagtggggagtatgcagtggagaagttggtacaaagttacagaataagttctataatagagatagaaatgaagtggaaggatagaggaaacagagagtaattgtaattggggggaaaatttgtatgaaagagattgtatctgagtggtatcttgaggggtgcctggaaagagcagtaaaacaagtgtctcttcctctacttgctttcctctgtgtgtttggcaggagagaatgtctgcctcagtgcctaaggatagcccttgctttaattgctccttttcctcccttgtaaagccagagctctagaaggaagcaagcctactaaatacttcttccttcaatgccacctcatg

SEQ ID NO: 351044 - DNA, 1551 bp, Homo sapiens
actgaagaaacatccaaggtggtcttgaaggacactgggatcctgtaacacagccccggatatctgtgttaccagccttgtctcggccacctcaaggataatcactaaattctgccgaaaggactgaggaacggtgcctggaaaagggcaagaatatcacggcatgggcatgagtagcttgaaactgctgaagtatgtcctgtttttcttcaacttgctcttttggatctgtggctgctgcattttgggctttgggatctacctgctgatccacaacaacttcggagtgctcttccataacctcccctccctcacgctgggcaatgtgtttgtcatcgtgggctctattatcatggtagttgccttcctgggctgcatgggctctatcaaggaaaacaagtgtctgcttatgtcgttcttcatcctgctgctgattatcctccttgctgaggtgaccttggccatcctgctctttgtatatgaacagaagctgaatgagtatgtggctaagggtctgaccgacagcatccaccgttaccactcagacaatagcaccaaggcagcgtgggactccatccagtcatttctgcagtgttgtggtataaatggcacgagtgattggaccagtggcccaccagcatcttgcccctcagatcgaaaagtggagggttgctatgcgaaagcaagactgtggtttcattccaatttcctgtatatcggaatcatcaccatctgtgtatgtgtgattgaggtgttggggatgtcctttgcactgaccctgaactgccagattgacaaaaccagccagaccatagggctatgatctgcagtagttctgtggtgaagagacttgtttcatctccggaaatgcaaaaccatttatagcatgaagccctacatgatcactgcaggatgatcctcctcccatcctttccctttttaggtccctgtcttatacaaccagagaagtgggtgttggccaggcacatcccatctcaggcagcaagacaatctttcactcactgacggcagcagccatgtctctcaaagtggtgaaactaatatctgagcatcttttagacaagagaggcaaagacaaactggatttaatggcccaacatcaaagggtgaacccaggatatgaatttttgcatcttcccattgtcgaattagtctccagcctctaaataatgcccagtcttctccccaaagtcaagcaagagactagttgaagggagttctggggccaggctcactggaccattgtcacaaccctctgtttctctttgactaagtgccctggctacaggaattacacagttctctttctccaaagggcaagatctcatttcaatttctttattagagggccttattgatgtgttctaagtctttccagaaaaaaactatccagtgatttatatcctgatttcaaccagtcacttagctgataatcacagtaagaagacttctggtattatctctctatcagataagattttgttaatgtactattttactcttcaataaataaaacagtttattatctca

SEQ ID NO: 351045 - DNA, 1467 bp, Homo sapiens
actgaagaaacatccaaggtggtcttgaaggacactgggatcctgtaacacagccccggatatctgtgttaccagccttgtctcggccacctcaaggataatcactaaattctgccgaaaggactgaggaacggtgcctggaaaagggcaagaatatcacggcatgggcatgagtagcttgaaactgctgaagtatgtcctgtttttcttcaacttgctcttttggatctgtggctgctgcattttgggctttgggatctacctgctgatccacaacaacttcggagtgctcttccataacctcccctccctcacgctgggcaatgtgtttgtcatcgtgggctctattatcatggtagttgccttcctgggctgcatgggctctatcaaggaaaacaagtgtctgcttatgtcgttcttcatcctgctgctgattatcctccttgctgaggtgaccttggccatcctgctctttgtatatgaacagaagctgaatgagtatgtggctaagggtctgaccgacagcatccaccgttaccactcagacaatagcaccaaggcagcgtgggactccatccagtcatttctgcagtgttgtggtataaatggcacgagtgattggaccagtggcccaccagcatcttgcccctcagatcgaaaagtggaggtgttggggatgtcctttgcactgaccctgaactgccagattgacaaaaccagccagaccatagggctatgatctgcagtagttctgtggtgaagagacttgtttcatctccggaaatgcaaaaccatttatagcatgaagccctacatgatcactgcaggatgatcctcctcccatcctttccctttttaggtccctgtcttatacaaccagagaagtgggtgttggccaggcacatcccatctcaggcagcaagacaatctttcactcactgacggcagcagccatgtctctcaaagtggtgaaactaatatctgagcatcttttagacaagagaggcaaagacaaactggatttaatggcccaacatcaaagggtgaacccaggatatgaatttttgcatcttcccattgtcgaattagtctccagcctctaaataatgcccagtcttctccccaaagtcaagcaagagactagttgaagggagttctggggccaggctcactggaccattgtcacaaccctctgtttctctttgactaagtgccctggctacaggaattacacagttctctttctccaaagggcaagatctcatttcaatttctttattagagggccttattgatgtgttctaagtctttccagaaaaaaactatccagtgatttatatcctgatttcaaccagtcacttagctgataatcacagtaagaagacttctggtattatctctctatcagataagattttgttaatgtactattttactcttcaataaataaaacagtttattatctca

SEQ ID NO: 351046 - DNA, 2029 bp, Homo sapiens
actgaagaaacatccaaggtggtcttgaaggacactgggatcctgtaacacagccccggatatctgtgttaccagccttgtctcggccacctcaaggataatcactaaattctgccgaaaggactgaggaacggtgcctggaaaagggcaagaatatcacggcatgggcatgagtagcttgaaactgctgaagtatgtcctgtttttcttcaacttgctcttttggatctgtggctgctgcattttgggctttgggatctacctgctgatccacaacaacttcggagtgctcttccataacctcccctccctcacgctgggcaatgtgtttgtcatcgtgggctctattatcatggtagttgccttcctgggctgcatgggctctatcaaggaaaacaagtgtctgcttatgtcgttcttcatcctgctgctgattatcctccttgctgaggtgaccttggccatcctgctctttgtatatgaacagaagctgaatgagtatgtggctaagggtctgaccgacagcatccaccgttaccactcagacaatagcaccaaggcagcgtgggactccatccagtcatttctgcagtgttgtggtataaatggcacgagtgattggaccagtggcccaccagcatcttgcccctcagatcgaaaagtggagggttgctatgcgaaagcaagactgtggtttcattccaatttcctgtatatcggaatcatcaccatctgtgtatgtgtgattgaggtgttggggatgtcctttgcactgaccctgaactgccagattgacaaaaccagccagaccatagggctatgatctgcagtagttctgtggtgaagagacttgtttcatctccggaaatgcaaaaccatttatagcatgaagccctacatgatcactgcaggatgatcctcctcccatcctttccctttttaggtccctgtcttatacaaccagagaagtgggtgttggccaggcacatcccatctcaggcagcaagacaatctttcactcactgacggcagcagccatgtctctcaaagtggtgaaactaatatctgagcatcttttagacaagagaggcaaagacaaactggatttaatggcccaacatcaaagggtgaacccaggatatgaatttttgcatcttcccattgtcgaattagtctccagcctctaaataatgcccagtcttctccccaaagtcaagcaagagactagttgaagggagttctggggccaggctcactggaccattgtcacaaccctctgtttctctttgactaagtgccctggctacaggaattacacagttctctttctccaaagggcaagatctcatttcaatttctttattagagggccttattgatgtgttctaagtctttccagaaaaaaactatccagtgatttatatcctgatttcaaccagtcacttagctgataatcacagtaagaagacttctggtattatctctctatcagataagattttgttaatgtactattttactcttcaataaataaaacagtttattatctcataagaagaccccaagaaaccctacccatgggctgcaggaatcccacatcaagggggggccctatcaaaggagcttctgcggcgtaggggtggcctgatttcctggcctccgtccctgtagtaatctccagggggctgccctctaagagagacagggaaatcctaagagctgtgccagtgacgccgggtgatgttacaacccatggacatgccgagacacaagtcgttgcacggagccaatcttgtaaagcacacgacagcgctgtacccatccaaggggggcgaagcaccaatgatgtgggccaacatcacctccaccaaaagtattataaagcccgcccatgggggacatcacaacaaattccttgcgcgttataggtcgttgtctcaccactatgccgcctattaacaggccgatgatgaaaaaaatgttgctgcaacgcgagtatattatcttcaccagcagatattataccacg

SEQ ID NO: 351047 - DNA, 1788 bp, Homo sapiens
  misc_feature (1499)..(1500): n is a, c, g, or t
actgaagaaacatccaaggtggtcttgaaggacactgggatcctgtaacacagccccggatatctgtgttaccagccttgtctcggccacctcaaggataatcactaaattctgccgaaaggactgaggaacggtgcctggaaaagggcaagaatatcacggcatgggcatgagtagcttgaaactgctgaagtatgtcctgtttttcttcaacttgctcttttggatctgtggctgctgcattttgggctttgggatctacctgctgatccacaacaacttcggagtgctcttccataacctcccctccctcacgctgggcaatgtgtttgtcatcgtgggctctattatcatggtagttgccttcctgggctgcatgggctctatcaaggaaaacaagtgtctgcttatgtcgttcttcatcctgctgctgattatcctccttgctgaggtgaccttggccatcctgctctttgtatatgaacagaagctgaatgagtatgtggctaagggtctgaccgacagcatccaccgttaccactcagacaatagcaccaaggcagcgtgggactccatccagtcatttctgcagtgttgtggtataaatggcacgagtgattggaccagtggcccaccagcatcttgcccctcagatcgaaaagtggagggttgctatgcgaaagcaagactgtggtttcattccaatttcctgtatatcggaatcatcaccatctgtgtatgtgtgattgaggtgttggggatgtcctttgcactgaccctgaactgccagattgacaaaaccagccagaccatagggctatgatctgcagtagttctgtggtgaagagacttgtttcatctccggaaatgcaaaaccatttatagcatgaagccctacatgatcactgcaggatgatcctcctcccatcctttccctttttaggtccctgtcttatacaaccagagaagtgggtgttggccaggcacatcccatctcaggcagcaagacaatctttcactcactgacggcagcagccatgtctctcaaagtggtgaaactaatatctgagcatcttttagacaagagaggcaaagacaaactggatttaatggcccaacatcaaagggtgaacccaggatatgaatttttgcatcttcccattgtcgaattagtctccagcctctaaataatgcccagtcttctccccaaagtcaagcaagagactagttgaagggagttctggggccaggctcactggaccattgtcacaaccctctgtttctctttgactaagtgccctggctacaggaattacacagttctctttctccaaagggcaagatctcatttcaatttctttattagagggccttattgatgtgttctaagtctttccagaaaaaaactatccagtgatttatatcctgatttcaaccagtcacttagctgataatcagtaagaagacttctggtattatctctctatcagataagattnngttaatgtactattttactcttcgactaagtgccctggctacaggaattacccagttctctttctccaaagggcaagatctcatttcaatttctttattaaagggccttattgatgtgttctaagtctttccagaaaaaaactatccagtgatttatatcctgatttcaaccagtcacttagctgataatcccacagtaagaagacttctggtattatctctctatcagataagattttgttaatgtactattttactcttcaataaataaaacagtttattatctca

SEQ ID NO: 351048 - DNA, 1167 bp, Homo sapiens
cactgcccagtaacagtgaaaaggggaaggggaaacggagcagcattctctctggggcccttatggcatgtggcaaaagtagtgacaatcttcaccagggcaagaatatcacggcatgggcatgagtagcttgaaactgctgaagtatgtcctgtttttcttcaacttgctcttttggatctgtggctgctgcattttgggctttgggatctacctgctgatccacaacaacttcggagtgctcttccataacctcccctccctcacgctgggcaatgtgtttgtcatcgtgggctctattatcatggtagttgccttcctgggctgcatgggctctatcaaggaaaacaagtgtctgcttatgtcggtgttggggatgtcctttgcactgaccctgaactgccagattgacaaaaccagccagaccatagggctatgatctgcagtagttctgtggtgaagagacttgtttcatctccggaaatgcaaaaccatttatagcatgaagccctacatgatcactgcaggatgatcctcctcccatcctttccctttttaggtccctgtcttatacaaccagagaagtgggtgttggccaggcacatcccatctcaggcagcaagacaatctttcactcactgacggcagcagccatgtctctcaaagtggtgaaactaatatctgagcatcttttagacaagagaggcaaagacaaactggatttaatggcccaacatcaaagggtgaacccaggatatgaatttttgcatcttcccattgtcgaattagtctccagcctctaaataatgcccagtcttctccccaaagtcaagcaagagactagttgaagggagttctggggccaggctcactggaccattgtcacaaccctctgtttctctttgactaagtgccctggctacaggaattacacagttctctttctccaaagggcaagatctcatttcaatttctttattagagggccttattgatgtgttctaagtctttccagaaaaaaactatccagtgatttatatcctgatttcaaccagtcacttagctgataatcacagtaagaagacttctggtattatctctctatcagataagattttgttaatgtactattttactcttcaataaataaaacagtttattatctca

SEQ ID NO: 351049 - DNA, 1265 bp, Homo sapiens
actgaagaaacatccaaggtggtcttgaaggacactgggatcctgtaacacagccccggatatctgtgttaccagccttgtctcggccacctcaaggataatcactaaattctgccgaaaggactgaggaacggtgcctggaaaagggcaagaatatcacggcatgggcatgagtagcttgaaactgctgaagtatgtcctgtttttcttcaacttgctcttttggatctgtggctgctgcattttgggctttgggatctacctgctgatccacaacaacttcggagtgctcttccataacctcccctccctcacgctgggcaatgtgtttgtcatcgtgggctctattatcatggtagttgccttcctgggctgcatgggctctatcaaggaaaacaagtgtctgcttatgtcgttcttcatcctgctgctgattatcctccttgctgaggtgaccttggccatcctgctctttgtatatgaacagaagctgaatgagtatgtggctaagggtctgaccgacagcatccaccgttaccactcagacaatagcaccaaggcagcgtgggactccatccagtcatttctgcagtgttgtggtataaatggcacgagtgattggaccagtggcccaccagcatcttgcccctcagatcgaaaagtggagggttgctatgcgaaagcaagactgtggtttcattccaatttcctgtatatcggaatcatcaccatctgtgtatgtgtgattgaggtgttggggatgtcctttgcactgaccctgaactgccagattgacaaaaccagccagaccatagggctatgatctgcagtagttctgtggtgaagagacttgtttcatctccggaaatgcaaaaccatttatagcatgaagccctacatgatcactgcaggatgatcctcctcccatcctttccctttttaggtccctgtcttatacaaccagagaagtgggtgttggccaggcacatcccatctcaggcagcaagacaatctttcactcactgacggcagcagccatgtctctcaaagtggtgaaactaatatctgagcatcttttagacaagagaggcaaagacaaactggatttaatggcccaacatcaaagggtgaacccaggatatgaatttttgcatcttcccattgtcgaacacagtaagaagacttctggtattatctctctatcagataagattttgttaatgtactattttactcttcaataaataaaacagtttattatctca

SEQ ID NO: 351050 - DNA, 894 bp, Homo sapiens
actgaagaaacatccaaggtggtcttgaaggacactgggatcctgtaacacagccccggatatctgtgttaccagccttgtctcggccacctcaaggataatcactaaattctgccgaaaggactgaggaacggtgcctggaaaagggcaagaatatcacggcatgggcatgagtagcttgaaactgctgaagtatgtcctgtttttcttcaacttgctcttttggatctgtggctgctgcattttgggctttgggatctacctgctgatccacaacaacttcggagtgctcttccataacctcccctccctcacgctgggcaatgtgtttgtcatcgtgggctctattatcatggtagttgccttcctgggctgcatgggctctatcaaggaaaacaagtgtctgcttatgtcgttcttcatcctgctgctgattatcctccttgctgaggtgaccttggccatcctgctctttgtatatgaacagaagctgaatgagtatgtggctaagggtctgaccgacagcatccaccgttaccactcagacaatagcaccaaggcagcgtgggactccatccagtcatttctgcagtgttgtggtataaatggcacgagtgattggaccagtggcccaccagcatcttgcccctcagatcgaaaagtggagggttgctatgcgaaagcaagactgtggtttcattccaatttcctgtatatcggaatcatcaccatctgtgtatgtgtgattgagagggtgggggaatttcttttgactgaccctgaactggcagattgcaaaacaggccgaccatagactatgtctgcagaattttgtggggaactgtttaactcccgaatgccattattgatggcctccttgcacttcggtggccc

SEQ ID NO: 351051 - DNA, 1041 bp, Homo sapiens
cttggccacagcctggagccactcctgctgggcagcccacagggtccctgggcggagggcaggagcatccagttggagttgacaacaggaggcagaggcatcatggagggtccccggggatggctggtgctctgtgtgctggccatatcgctggcctctatggtgaccgaggacttgtgccgagcaccagacgggaagaaaggggaggcaggaagacctggcagacgggggcggccaggcctcaagggggagcaaggggagccgggggcccctggcatccggacaggcatccaaggccttaaaggagaccagggggaacctgggccctctggaaaccccggcaaggtgggctacccagggcccagcggccccctcggggcccgtggcatcccgggaattaaaggcaccaagggcagcccaggaaacatcaaggaccagccgaggccagccttctccgccattcggcggaaccccccaatggggggcaacgtggtcatcttcgacacggtcatcaccaaccaggaagaaccgtaccagaaccactccggccgattcgtctgcactgtacccggctactactacttcaccttccaggtgctgtcccagtgggaaatctgcctgtccatcgtctcctcctcaaggggccaggtccgacgctccctgggcttctgtgacaccaccaacaaggggctcttccaggtggtgtcagggggcatggtgcttcagctgcagcagggtgaccaggtctgggttgaaaaagaccccaaaaagggtcacatttaccagggctctgaggccgacagcgtcttcagcggcttcctcatcttcccatctgcctgagccagggaaggaccccctcccccacccacctctctggcttccatgctccgcctgtaaaatgggggcgctattgcttcagctgctgaagggagggggctggctctgagagccccaggactggctgccccgtgacacatgctctaagaagctcgtttcttagacctcttcctggaataaacatctgtgtctgtgtctgctgaa

SEQ ID NO: 351052 - DNA, 1339 bp, Homo sapiens
cttggccacagcctggagccactcctgctgggcagcccacagggtccctgggcggagggcaggagcatccagttggagttgacaacaggaggcagaggcatcatggagggtccccggggatggctggtgctctgtgtgctggccatatcgctggcctctatggtgaccgaggacttgtgccgagcaccagacgggaagaaaggggaggcaggaagacctggcagacgggggcggccaggcctcaagggggagcaaggggagccgggggcccctggcatccggacaggcatccaaggccttaaaggagaccagggggaacctgggccctctggaaaccccggcaaggtgggctacccagggcccagcggccccctcggggcccgtggcatcccgggaattaaaggcaccaagggcagcccaggaaacatcaaggaccagccgaggccagccttctccgccattcggcggaaccccccaatggggggcaacgtggtcatcttcgacacggtcatcaccaaccaggaagaaccgtaccagaaccactccggccgattcgtctgcactgtacccggctactactacttcaccttccaggtgctgtcccagtgggaaatctgcctgtccatcgtctcctcctcaaggggccaggtccgacgctccctgggcttctgtgacaccaccaacaaggggctcttccaggtggtgtcagggggcatggtgcttcagctgcagcagggtgaccaggtctgggttgaaaaagaccccaaaaagggtcacatttaccagggctctgaggccgacagcgtcttcagcggcttcctcatcttcccatctgcctgagccagggaaggaccccctcccccacccacctctctggcttccatgctccgcctgtaaaatgggggcgctattgcttcagctgctgaagggagggggctggctctgagagccccaggactggctgccccgtgacacatgctctaagaagctcgtttcttagacctcttcctggaataaacatctgtgtctgtgtctgctgaaaaaaaaaaaaaaaaaaaaaaaaaggcaagccgatccaaaagtatccctccatggacctaaactttacacataccacagttaccaggtacaaagtgaacccataaaccaaaatcttaactaactaccctaaaacaccattactactcatttaaacaacgtctctacccaattcacaacacctttataaaacatttccacacacacaagatcaccacaccaaaaccccttaaacctcccctcatcccatgtcaccccaatcaattatacaaacacaaacaaaacgcccttaacaccaact

SEQ ID NO: 351053 - DNA, 865 bp, Homo sapiens
cttggccacagcctggagccactcctgctgggcagcccacagggtccctgggcggagggcaggagcatccagttggagttgacaacaggaggcagaggcatcatggagggtccccggggatggctggtgctctgtgtgctggccatatcgctggcctctatggtgaccgaggacttgtgccgagcaccagacgggaagaaaggggaggcaggaagacctggcagacgggggcggccaggcctcaagggggagcaaggggagccgggggcccctggcatccggacaggcatccaaggccttaaaggagaccagggggaacctgggccctctggaaaccccggcaaggtgggctacccagggcccagcggccccctcggggcccgtggcatcccgggaattaaaggcaccaagggcagcccaggaaacatcaaggaccagccgaggccagccttctccgccattcggcggaaccccccaatggggggcaacgtggtcatcttcgacacggtcatcaccaaccaggaagaaccgtaccagaaccactccggccgattcgtctgcactgtacccggctactactacttcaccttccaggtgctgtcccagtgggaaatctgcctgtccatcgtctcctcctcaaggggccaggtccgacgctccctgggcttctgtgacaccaccaacaaggggctcttccaggtggtgtcagggggcatggtgcttcagctgcagcagggtgaccaggtctgggttgaaaaagaccccaaaaagggtcacatttaccagggctctgaggccgacagcgtcttcagcggcttcctcatcttcccatctgcctgcctgagatgggatcctctagatcact

SEQ ID NO: 351054 - DNA, 498 bp, Homo sapiens
cttggccacagcctggagccactcctgctgggcagcccacagggtccctgggcggagggcaggagcatccagttggagttgacaacaggaggcagaggcatcatggagggtccccggggatggctggtgctctgtgtgctggccatatcgctggcctctatggtgaccgaggacttgtgccgagcaccagacgggaagaaagggggggttgaaaaagaccccaaaaagggtcacatttaccagggctctgaggccgacagcgtcttcagcggcttcctcatcttcccatctgcctgagccagggaaggaccccctcccccacccacctctctggcttccatgctccgcctgtaaaatgggggcgctattgcttcagctgctgaagggagggggctggctctgagagccccaggactggctgccccgtgacacatgctctaagaagctcgtttcttagacctcttcctggaataaacatctgtgtctgtgtctgctgaa

SEQ ID NO: 351055 - DNA, 469 bp, Homo sapiens
cttggccacagcctggagccactcctgctgggcagcccacagggtccctgggcggagggcaggagcatccagttggagttgacaacaggaggcagaggcatcatggagggtccccggggatggctggtgctctgtgtgctggccatatcgctggcctctatggtgaccgaggacttgtgccgagcaccagacgggaagaaaggggaggcaggaagacctggcagacgggggcggccaggcctcaagggggagcaaggggagccggtgagccagggaaggaccccctcccccacccacctctctggcttccatgctccgcctgtaaaatgggggcgctattgcttcagctgctgaagggagggggctggctctgagagccccaggactggctgccccgtgacacatgctctaagaagctcgtttcttagacctcttcctggaataaacatctgtgtctgtgtctgctgaa

SEQ ID NO: 351056 - DNA, 449 bp, Homo sapiens
ttctgtgacaccaccaacaaggggctcttccaggtggtgtcagggggcatggtgcttcagctgcagcagggtgaccaggtctgggttgaaaaagaccccaaaaagggtcacatttaccagggctctgaggccgacagcgtcttcagcggcttcctcatcttcccatctgcctgagccagggaaggaccccctcccccacccacctctctggcttccatgctccgcctgtaaaatgggggcgctattgcttcagctgctgaagggagggggctggctctgagagccccaggactggctgccccgtgacacatgctctaagaagctcgtttcttagacctcttcctggaataaacatctgtgtctgtgtctgctgaacatgagcttcagttgctactcggagcattgagagggaggcctaagaataataacaatccagtgcttaagagtca

SEQ ID NO: 351057 - DNA, 1048 bp, Homo sapiens
ggcccaggaggctgggcagctgaggcagggagggagggaaataactgtgcctgattctaggacagggatgggggtgcagcactgatccaggacccagaatggaggcatcatggagggtccccggggatggctggtgctctgtgtgctggccatatcgctggcctctatggtgaccgaggacttgtgccgagcaccagacgggaagaaaggggaggcaggaagacctggcagacgggggcggccaggcctcaagggggagcaaggggagccgggggcccctggcatccggacaggcatccaaggccttaaaggagaccagggggaacctgggccctctggaaaccccggcaaggtgggctacccagggcccagcggccccctcggggcccgtggcatcccgggaattaaaggcaccaagggcagcccaggaaacatcaaggaccagccgaggccagccttctccgccattcggcggaaccccccaatggggggcaacgtggtcatcttcgacacggtcatcaccaaccaggaagaaccgtaccagaaccactccggccgattcgtctgcactgtacccggctactactacttcaccttccaggtgctgtcccagtgggaaatctgcctgtccatcgtctcctcctcaaggggccaggtccgacgctccctgggcttctgtgacaccaccaacaaggggctcttccaggtggtgtcagggggcatggtgcttcagctgcagcagggtgaccaggtctgggttgaaaaagaccccaaaaagggtcacatttaccagggctctgaggccgacagcgtcttcagcggcttcctcatcttcccatctgcctgagccagggaaggaccccctcccccacccacctctctggcttccatgctccgcctgtaaaatgggggcgctattgcttcagctgctgaagggagggggctggctctgagagccccaggactggctgccccgtgacacatgctctaagaagctcgtttcttagacctcttcctggaataaacatctgtgtctgtgtctgctgaa

SEQ ID NO: 351058 - DNA, 860 bp, Homo sapiens
cttggccacagcctggagccactcctgctgggcagcccacagggtccctgggcggagggcaggagcatccagttggagttgacaacaggaggcagaggcatcatggagggtccccggggatggctggtgctctgtgtgctggccatatcgctggcctctatggtgaccgaggacttgtgccgagcaccagacgggaagaaaggggaggcaggaagacctggcagacgggggcggccaggcctcaagggggagcaaggggagccgggggcccctggcatccggacaggcatccaaggccttaaaggagaccagggggaacctgggccctctggaaaccccggcaaggtgggctacccagggcccagcggccccctcggggcccgtggcatcccgggaattaaaggcaccaagggcagcccaggaaacatcaaggaccagccgaggccagccttctccgccattcggcggaaccccccaatggggggcaacgtggtcatcttcgacacggtcatcaccaaccaggaagaaccgtaccagaaccactccggccgattcgtctgcactgtacccggctactactacttcaccttccaggtgctgtcccagtgggaaatctgcctgtccatcgtctcctcctcaaggggccaggtccgacgctccctgggcttctgtgacaccaccaacaaggggctcttccaggtggtgtcagggggcatggtgcttcagctgcagcagggtgaccaggtctgggttgaaaaagaccccaaaaagggtcacatttaccagggctctgaggccgacagcgtccatcaacgcctcactcatcgtacctgcctcagatgcggatcctctagaacacc

SEQ ID NO: 351059 - DNA, 731 bp, Homo sapiens
cttggccacagcctggagccactcctgctgggcagcccacagggtccctgggcggagggcaggagcatccagttggagttgacaacaggaggcagaggcatcatggagggtccccggggatggctggtgctctgtgtgctggccatatcgctggcctctatggtgaccgaggacttgtgccgagcaccagacgggaagaaaggggaggcaggaagacctggcagacgggggcggccaggcctcaagggggagcaaggggagccgggggcccctggcatccggacaggcatccaaggccttaaaggagaccagggggaacctgggccctctggaaaccccggcaaggtgggctacccagggcccagcggccccctcggggcccgtggcatcccgggaattaaaggcaccaagggcagcccaggaaacatcaaggaccagccgaggccagccttctccgccattcggcggaaccccccaatggggggcaacgtggtcatcttcgacacggtcatcaccaaccaggaagaaccgtaccagaaccactccggccgattcgtctgcactgtacccggctactactacttcaccttccagacaccgtgtcctcttgcctgggagaggggaagcagatctgaggacatctctgtgccaggccagaaaccgcccacctgcagttccttctccgggatggacgtggggcccagctccctgccccaccttgggctgaagct

SEQ ID NO: 351060 - DNA, 2530 bp, Homo sapiens
  misc_feature (3)..(3): n is a, c, g, or t
  misc_feature (1400)..(1400): n is a, c, g, or t
  misc_feature (1601)..(1601): n is a, c, g, or t
ttncgccaagcttggcacgtggccgggggctattagtttcaatgcagtgatgaacacaaactatattttgagttctctgcagcaagtggaatgtggtatgaaaatatctgatatttacaaagatgatactgctaagtcagagtcacgtttattgctaatatgatggtggagtgttgtcttcattcataatgaaaggaaatgttatttttaatagaggttagtgaaaataaaaataaaactattttctaatcaaagtttatggtcctcctctccccagcactctacaattacctccaaagttgagaactctcaccttagacacacaactttataacgataccttatttccaaccccaaatctatgttcttatctcattttgctccaaattttaagttgcttcagaaatttaattagccctctgcttactctacaccatggaaaaaaggtaatatagtagaaattctgatagcaatttcaaaagatgtccaaaatagacattaatcattggaatgtctttcattgttaataagcacagtattaagtggtttaagttctagaatgattttaataaagtcatttatgatacttagctgtgcattccaaactgtaaaggaaaaggtaaaaaatgctacttaaaaataagctaaaaaccaagacagtcggtgaggtctgtggaaatggtagtattcatcttgggagaaacatgctactggaaaggcctggatttgtctagatgggagtcattaagactgtgggacctaaagtattcagcacaataaagcaacaggacatttcaatgttttccctggtagcctgagagagaagagggttggggttatgggacccaggggaagaccgaagacaaatctttaaagaaaaagataaatatgggtaagggtccctaaggcagtgacggcctaagcacactggtactatcttgactatcttgtggtcaaagttatttcctcttctgtgctataatcctctcctccactaatccactctgagtaaagatctgttacacaccatacccttgttcatggtgcccaggggaaatgaagaggagagtattacaggcaactggaagattaagcatcccagaccccattctgaggtatcagaaatattgaggaggatactggacttcctaagattatgtggaatgggggcctacaactttttgtgtataggaaaataatacctcagagggcagagggcaaagggaaatgaggacattcctaactggtctctctgttttaccttttatgctcctctaatccattttccatccagactgatgtccaaatttaaaggtctcatcgctcccctgcttaatatacttgaatgacttcttatgtaaactttgtcatgatctaaaagttcccgctagatctgcaantgccttcctccccccgtttcatctgtttagcagaccgagggcaccagtctctgtggtttaaacttgccaaacttttcttcacggaagttttgctgttcttttctccactagacagctgttccagaagttcttatgtctgattccttctcattcttcatgcctaagcttaaatataacacaagaagcccttccctgattatnctaaacaggggccttgcctattgatagtttctattacagtattatttatagttccttaattgccccataatgatgcagttattttacttgtatttttattatctgtttgccccataaatattactctcataaagacagagactgccctgttctcctttggagctcagtaaaacaaatatttgttgaataaatgaatatttgaagttagtctttatggaagcattataactttggttgtaagttttataatttaatattgtttataactctgaagataagtgagtctaaaccaggaaaatttacatttatactttaatgaataaaaatcatgaatacttacaaaacattcactattgccaagcattatatatacctagtattttacaaagccttctcttgtcactttcatagctactctaagtgatgggtcctgtaaccctgatctattggaggttaaactgagattcagagttaacttgtccagggtcacacagtaaattaattgtatcttaaccattaaaaatgtcatatgaggccgggtgtagtggctcatgcctataatcccagcactctgggaggctgaggcaggtggatcactttagcccaggagttggagatgagcctgggcaatatggcaaaactctgtctctacaaaaaaattaactgggcatggtggcatgtgcctgtagtctcaggtactaggaaggctgagttgggaggattgcttgagcctgggaggttaagcctgcagtgaaccgtaagcgagccactgtactccagcctgggtgacagagtgagagaccctgtctcaaaaaaaaaaaaaaaaagtcatgaaaagttaccactaactgaattatggctttgtctagttttttctgggttttctttattttccaactcttaagatattaagtcaaagctgtcatctt

SEQ ID NO: 351061 - DNA, 279 bp, Homo sapiens
gtgatgtggtcagaggatcccgtcgtcagcatcaaggaaaaggttaagaaagcaaagaataagaaactgggagctcttacagctgaagaaattgcacttaagatggaggcagatgaaaagaaaaagaagaaaaaaaagtaacatacccaaaactccttgactagaactatctccttttgtaaaggattttgagatatcaggcattagttgccttatttgtgagaaattttctgagggcttttttttttttgggatggcggggaggaggggtacggagct

SEQ ID NO: 351062 - DNA, 463 bp, Homo sapiens
tgccttggtcattgcttgccctagaggatcccgtcgtagcatcaaggaaaaggttaagaaagcaaagaataagaaactgggagctcttacagctgaagaaattgcacttaagatggaggcagatgaaaagaaaaagaagaaaaaaaagtaacatacccaaaactccttgactagaactatctccttttgtaaaggattttgagatatcaggcattagttgccttatttgtgagaaattttctgagggcttttttttttttggatgcgggacgagtcgaccagcatcaagcaagattggaaatggagtccttctatgaaggagaagacttttctgagaccctgactcgggccaaattggaagagctcaacagggatctgttccggtctactatgaagcccgtccagaaagggtgggaagatactgattggaaaaggtctgatatggatgctggacgaggggtac

SEQ ID NO: 351063 - DNA, 669 bp, Homo sapiens
  misc_feature (96)..(96): n is a, c, g, or t
tgtgttttgttgttgtcatctgcctccatcttaagtgcatttcttcagctgtaagagctcccagtttcttattcttgctgtcttaaccttttcctngatgctggccacatcaatttcagtttcagccattggaccttttagtggcttaaaagaggttagaaaagtagtccttgatactatgaagaatattcatccaatttataacattaaaagcttaatgattaagagagagttggcaaaagattctgaattacgatcacaaagttgggagagatttttgccacagttcaaacacaaaaatgtgaataaacgcaaggaaccaaagaaaaaaactgttaagaaagaatatacgccattcccaccaccacaaccagaaagtcagatcgataaagaattggctagtggtgaatactttttgaaggcaaatcagaagaagcggcagaaaatggaagcaataaaggctaaacaagcagaagccatcagtaagagacaagaggaaagaaacaaagcatttattcctcttgtctcttactgatggcttctgcttgtttcacaattggtttttccttaggtggaataaatgctttgtttctttcctcttgtttcttcagctgtaagagctcccagtttcttattctttgctttcttaaccttttccttgatgctggc

SEQ ID NO: 351064 - DNA, 9027 bp, Homo sapiens
  misc_feature (7897)..(7897): n is a, c, g, or t
  misc_feature (8098)..(8098): n is a, c, g, or t
agccggtagggtttaagaacagtttcatttccggagccaccggaagcagcttgcaaatggcgtctccctcgctggagcggccagaaaaaggcgctggaaaaagtgaatttcgtaaccagaagccgaagccggagaaccaagatgaatcagaactccttacggttcctgatggttggaaggaaccagctttttccaaagaggacaatcccagaggacttttggaggagagcagtttcgcaactttgttcccaaaatacagggaagcttacttgaaagagtgttggccattggtgcagaaagccttaaatgaacatcatgttaatgcaaccctggacctgatcgaaggcagcatgactgtttgtactacaaagaagacttttgatccatatatcatcattagggccagagatctgataaaactgttagcaaggagtgtttcatttgaacaggcagtacgaattcttcaggatgatgttgcatgtgacatcattaaaataggttctttagtaaggaataaagagagatttgtaaaacgaagacaacggcttattggtcccaaaggatctacattgaaggcattggaactcttaactaattgttacattatggttcagggaaacacagtttcagccattggaccttttagtggcttaaaagaggttagaaaagtagtccttgatactatgaagaatattcatccaatttataacattaaaagcttaatgattaagagagagttggcaaaagattctgaattacgatcacaaagttgggagagatttttgccacagttcaaacacaaaaatgtgaataaacgcaaggaaccaaagaaaaaaactgttaagaaagaatatacgccattcccaccaccacaaccagaaagtcagatcgataaagaattggctagtggtgaatactttttgaaggcaaatcagaagaagcggcagaaaatggaagcaataaaggctaaacaagcagaagccatcagtaagagacaagaggaaagaaacaaagcatttattccacctaaggaaaaaccaattgtgaaacctaaggaagcttctactgaaactaaaattgatgtggccagcatcaaggaaaaggttaagaaagcaaagaataagaaactgggagctcttacagctgaagaaattgcacttaagatggaggcagatgaaaagaaaaagaagaaaaaaaagtaacatacccaaaactccttgactagaactatctccttttgtaaaggattttgagatatcaggcattagttgccttatttgtgagaaattttctgagggcttttttttttttttggtggtggtggttgttcatagaagagtgttctttataaattatattattattgtattttttgaaaaatttatactagaaagtggtatatatgtctttgtatacattacgaccattgtgattatccattaaatccagtgtctgatgctattggttagtaatgatgtcccagcatttgatgttccctctctaatgataacaagtaaatatttaggtttatcccttttgaaagtttggttttacttttaacagtccatgaacagaaaattaaggcctctaaaatcagatcccctagttactcctctgttctgaatctggggaagtagtaaaccaaaaagacagggaaaaccagatatttagagtcgaagcagcatgcaaaaaataataatgtttttaactaatgaaggctactggagttactaagaatcacctaaaaatgtgctactgtaccttgctcattttgcagatttagaagctgaaacatgggttaggttacttactaaaagtccacctgtggcaacctgcaaataatgcttatttatactaaagatgagtttatctgatagagttaggaaatttcttcttttgagtaagagtattgctataacatatatttttttctgaaatgttttaaaatagaagtacacctaattgttattggttaaaaaaaaagccatatgtgaatgaggttggtttttgggttttttctttcctgaattgtattagtccaaaagaactaaattagggtacttgtgctgtaccaaaatggtaattataacagacagtattagaattactgaattaacaatgagaaagagagaagtgtatctgttacgtggatatatgggccagcctggatatacaacagagtagtaacctgtgaaacaaacatagaatatcctcttagacattgttcctcataatgcactgacagaattcacatagctcttaatgaaacaatttaagattgatgtacgtacgtttgacttggtctcgctgtcggttaactgtaaagttagggggaagaaagaaaaaaaattaaaagggtagacacagttgagagttttattttaaaaagctaagtcttataattatgaccattaacttgctttggctttattgcagtgactttccaagtttaattattcaaaactttttgaactgactgaattaacttggtatttttaagttgactttttacataaactttataaaccttttataaaaaggaaactataccattactataaatggaaaatcattttacacatcatacctagcaggtaataaaatttaaaaaataaaaattaaatattagaatgtgagaaatttattaaaatgtagttctaaaaataagtttcttcctgagaagaatgatactgtttatgatgaatccatagtgaaaagacagtgacctctctttcatccagtctagtatatcactaaatcatcattacgatgtttggctatcaagtcattaattactgtcctcctttcactgagctttattcaaattttgacaatcagagcactgggaagaaataaattccacaactgcctttagccttctggatactttcttttataaaatagaaaccttttccacaccagttctgcagcagtcgctattagatgctcgtggtagaacccatcaatcatctggtcctctgggtactggtgagcatccctggtcttcatacctgtgagtgggctttgtggtgaattactgtaaatatgctaccctcacttttcttggcagttatgtccatgaaatcaagagtgtgatgttctagttattttttcttatatatatttttaaatgttcaatattcaactattgaaacaaatgtacatctgtgaactagctaaaatcatcttatgtaccactaatatgcccagcacattttgtaaaacagtcctgatttggcctccaagggtatttattgaactaccagcagtatctaggagaccacgaaggaataccacgaaggaatttatgctccagtgcttgccataatttgtctgagaaggaatctgttaaataaaagcttttatcctctaacctttaccttcatcagaccttataaaaggtcaaatggtgattcttaagttttttagtcacaaatcttacttattcagtattagtgcgaagagtagaatactttcaagtaagcctaaacttacatgaaaacaaattacataaatctagctctgagaataggaaattagtgacaagatcaatctgtaagatgttgagcacttatctgaagtaaatgggtaatgagtttcacatcttataaatacaagttagcatgtgttttctcaagagtccaagggttttcattattggactacagctttaatcttctaaatgttattccccaagattaaagagcatctcaagttagatcaccaaagatcaaaagctaaaaccagaagtatttttgtcattgtggtggtggtagtgttactaattgcctagatttttaaagggaaacatttttttcactgggttgtttcgttgaaaaaaatagaagcagaaacttgcccaaagtcacagtggtcaaactggaaattgcaccaaaacttggcatactggttctgaaatccatagttttagcccttatgtatactggttaatttggaaggaagaaatatatacgttctgaagtgaagagtgagtgaaaggaagaattcagtgaatacattgataccttgatattatctgcattgtggctacatgttacttttcttcacaagagtgatataagtgaaataaagaatgattggactgggagaaaaatggctcagaaaactttgcaaaagtacgactgtatgtaaagataagtattcaacattaaatgggaaggaggagagcaagcagtttaatatatagaattttataattttaggcctgcaagggaccttataaaacatgagcaatggaacacttttttccaaactaaatttcgtgcagtggaacttggccgactctgtccttcctctattctaagcaccctactctagcccggctgctctgagttcagtttgttacaaatatggacacgaaagtaccacaggctttgcacagcttaattgaagtttccccttcacaccatggtaaaaaaacatactgggatggaagggcttgtgtctagaacaagaacaagaaataaactcttggtcacttactaatatttcaaaatcacaaagcagaattttgcttggatgtttagtaaaacatccttggaaatttaactgcttgcagcttctacacttcttcattaaatgctgtctggctaataaaaagtgccatgttgcagctttattttattttcattttttggagatagaccctcactgtgtcacccaggctggagtgcagtggtacaatctctgctcactgcaacctccacctcctgggctcaggtgattgtcctgcctcagcctcctgagtagctggggttacgggcgtccaccaccacacccagctagtttttgtatttttagtagagggggtttttgccatgttggccaggctgggcatggtggcatggtaatctcagctacttgggaggctgaggcaggaggatcgcctgaacccgtgagatggaggttgcagtgagctgagatcacaccactgcactctagcatgggtgacagagcaagactctgtctcaaaaaaaaaaaaaaaaaaaaaaaacgaaaacagaattctgtttgtttggatgacctgttatacttatttttgatcttgctgaaataagcaaatcttaggaatcttagtctacagtttctgacagttttttttgttgttgttgtttgaccaattagaactaaataaaaagaacgtgattttcacatttaaatttctcttaagtgtattcctagaacagtaagccattggtttaattgctacttgatgccagtttccttgaagatagccgttaagataaaacatggtttcattgttaattctgtagaaagttacatgttactattatgttattctattggtgtattgttccttttactcaccacagagattgtccaaacacttgtcattattggggcaggcactgcaggtggctcctctcttatatggccaagttgggtaattccctctgtaaagcagaagaaggatgtccattagaagtttttcggttttttaaaattgcaatttactatgaatccttaactaaatccagaagaatagtggagtgaagtacaaaggtccagagagttggtaatagaagtgaagacaggaaggcagaaatggaaggctgctaatatttgcatagttcattctatgtacctgtgtctatgcacctgttttaatctgcatcccatttaattgtgacagctctgagaggaagttattcttgttttacagatgagacaaaagatgtaagagatacctttaatcacaatttatacacttcagagtcagaggaaacctggatttaactccagggctgtgctccctctctttacctaccctctggcctatatgattactgccattcaaaaaactgtccatcttagaaaagctatggtgacccacattcaatattctcagttggtcagccctccataattttcactggataggagccatttggctggtgccttccaaaaaaataataaataatggtatgggggaatttctaaagtacaaattgttttcacatacaagatgtgatatgaataaatagctgctaattagtgagcactaccatgtgcttgtctttgttctaaacaaccttgaatgaaataatcttcacaaaaaccctatgaggaagttactgttgtctatttatacccattatatagctagaggctgagtcacagagtataagtaattgaccaaggtcacagactagaaagtgaaataatatccaagcattttatatccccataaatatcctcatagtagtaatggggagagggggcacatttatctcaatgaacctgccattgcactaattttttttggaactctgcttttggaaaaagttctaaacttttttgtgtaatcgtaccctttggcagtctggtgaggcctatgggctctttctcaacatagtttgttgttaaatgcataaaatacataggattataaaggaaaccaattaaattgaaatagttatcaaaatgtttaaaacaagatttgtgataaagtaatatgtgcttctctattaagatctaccgggggctattagtttcaatgcagtgatgaacacaaactatattttgagttctctgcagcaagtggaatgtggtatgaaaatatctgatatttacaaagatgatactgctaagtcagagtcacgtttattgctaatatgatggtggagtgttgtcttcattcataatgaaaggaaatgttatttttaatagaggttagtgaaaataaaaataaaactattttctaatcaaagtttatggtcctcctctccccagcactctacaattacctccaaagttgagaactctcaccttagacacacaactttataacgataccttatttccaaccccaaatctatgttcttatctcattttgctccaaattttaagttgcttcagaaatttaattagccctctgcttactctacaccatggaaaaaaggtaatatagtagaaattctgatagcaatttcaaaagatgtccaaaatagacattaatcattggaatgtctttcattgttaataagcacagtattaagtggtttaagttctagaatgattttaataaagtcatttatgatacttagctgtgcattccaaactgtaaaggaaaaggtaaaaaatgctacttaaaaataagctaaaaaccaagacagtcggtgaggtctgtggaaatggtagtattcatcttgggagaaacatgctactggaaaggcctggatttgtctagatgggagtcattaagactgtgggacctaaagtattcagcacaataaagcaacaggacatttcaatgttttccctggtagcctgagagagaagagggttggggttatgggacccaggggaagaccgaagacaaatctttaaagaaaaagataaatatgggtaagggtccctaaggcagtgacggcctaagcacactggtactatcttgactatcttgtggtcaaagttatttcctcttctgtgctataatcctctcctccactaatccactctgagtaaagatctgttacacaccatacccttgttcatggtgcccaggggaaatgaagaggagagtattacaggcaactggaagattaagcatcccagaccccattctgaggtatcagaaatattgaggaggatactggacttcctaagattatgtggaatgggggcctacaactttttgtgtataggaaaataatacctcagagggcagagggcaaagggaaatgaggacattcctaactggtctctctgttttaccttttatgctcctctaatccattttccatccagactgatgtccaaatttaaaggtctcatcgctcccctgcttaatatacttgaatgacttcttatgtaaactttgtcatgatctaaaagttcccgctagatctgcaantgccttcctccccccgtttcatctgtttagcagaccgagggcaccagtctctgtggtttaaacttgccaaacttttcttcacggaagttttgctgttcttttctccactagacagctgttccagaagttcttatgtctgattccttctcattcttcatgcctaagcttaaatataacacaagaagcccttccctgattatnctaaacaggggccttgcctattgatagtttctattacagtattatttatagttccttaattgccccataatgatgcagttattttacttgtatttttattatctgtttgccccataaatattactctcataaagacagagactgccctgttctcctttggagctcagtaaaacaaatatttgttgaataaatgaatatttgaagttagtctttatggaagcattataactttggttgtaagttttataatttaatattgtttataactctgaagataagtgagtctaaaccaggaaaatttacatttatactttaatgaataaaaatcatgaatacttacaaaacattcactattgccaagcattatatatacctagtattttacaaagccttctcttgtcactttcatagctactctaagtgatgggtcctgtaaccctgatctattggaggttaaactgagattcagagttaacttgtccagggtcacacagtaaattaattgtatcttaaccattaaaaatgtcatatgaggccgggtgtagtggctcatgcctataatcccagcactctgggaggctgaggcaggtggatcactttagcccaggagttggagatgagcctgggcaatatggcaaaactctgtctctacaaaaaaattaactgggcatggtggcatgtgcctgtagtctcaggtactaggaaggctgagttgggaggattgcttgagcctgggaggttaagcctgcagtgaaccgtaagcgagccactgtactccagcctgggtgacagagtgagagaccctgtctcaaaaaaaaaaaaaaaaagtcatgaaaagttaccactaactgaattatggctttgtctagttttttctgggttttctttattttccaactcttaagatattaagtcaaagctgtcatctt

SEQ ID NO: 351065 - DNA, 9052 bp, Homo sapiens
  misc_feature (7922)..(7922): n is a, c, g, or t
  misc_feature (8123)..(8123): n is a, c, g, or t
tcagcacccccgaacaacctccccctcaacataggctagtcgaggcctcgtgttaatcggccgagcggaagcagcttgcaaatggcgtctccctcgctggagcggccagaaaaaggcgctggaaaaagtgaatttcgtaaccagaagccgaagccggagaaccaagatgaatcagaactccttacggttcctgatggttggaaggaaccagctttttccaaagaggacaatcccagaggacttttggaggagagcagtttcgcaactttgttcccaaaatacagggaagcttacttgaaagagtgttggccattggtgcagaaagccttaaatgaacatcatgttaatgcaaccctggacctgatcgaaggcagcatgactgtttgtactacaaagaagacttttgatccatatatcatcattagggccagagatctgataaaactgttagcaaggagtgtttcatttgaacaggcagtacgaattcttcaggatgatgttgcatgtgacatcattaaaataggttctttagtaaggaataaagagagatttgtaaaacgaagacaacggcttattggtcccaaaggatctacattgaaggcattggaactcttaactaattgttacattatggttcagggaaacacagtttcagccattggaccttttagtggcttaaaagaggttagaaaagtagtccttgatactatgaagaatattcatccaatttataacattaaaagcttaatgattaagagagagttggcaaaagattctgaattacgatcacaaagttgggagagatttttgccacagttcaaacacaaaaatgtgaataaacgcaaggaaccaaagaaaaaaactgttaagaaagaatatacgccattcccaccaccacaaccagaaagtcagatcgataaagaattggctagtggtgaatactttttgaaggcaaatcagaagaagcggcagaaaatggaagcaataaaggctaaacaagcagaagccatcagtaagagacaagaggaaagaaacaaagcatttattccacctaaggaaaaaccaattgtgaaacctaaggaagcttctactgaaactaaaattgatgtggccagcatcaaggaaaaggttaagaaagcaaagaataagaaactgggagctcttacagctgaagaaattgcacttaagatggaggcagatgaaaagaaaaagaagaaaaaaaagtaacatacccaaaactccttgactagaactatctccttttgtaaaggattttgagatatcaggcattagttgccttatttgtgagaaattttctgagggcttttttttttttttggtggtggtggttgttcatagaagagtgttctttataaattatattattattgtattttttgaaaaatttatactagaaagtggtatatatgtctttgtatacattacgaccattgtgattatccattaaatccagtgtctgatgctattggttagtaatgatgtcccagcatttgatgttccctctctaatgataacaagtaaatatttaggtttatcccttttgaaagtttggttttacttttaacagtccatgaacagaaaattaaggcctctaaaatcagatcccctagttactcctctgttctgaatctggggaagtagtaaaccaaaaagacagggaaaaccagatatttagagtcgaagcagcatgcaaaaaataataatgtttttaactaatgaaggctactggagttactaagaatcacctaaaaatgtgctactgtaccttgctcattttgcagatttagaagctgaaacatgggttaggttacttactaaaagtccacctgtggcaacctgcaaataatgcttatttatactaaagatgagtttatctgatagagttaggaaatttcttcttttgagtaagagtattgctataacatatatttttttctgaaatgttttaaaatagaagtacacctaattgttattggttaaaaaaaaagccatatgtgaatgaggttggtttttgggttttttctttcctgaattgtattagtccaaaagaactaaattagggtacttgtgctgtaccaaaatggtaattataacagacagtattagaattactgaattaacaatgagaaagagagaagtgtatctgttacgtggatatatgggccagcctggatatacaacagagtagtaacctgtgaaacaaacatagaatatcctcttagacattgttcctcataatgcactgacagaattcacatagctcttaatgaaacaatttaagattgatgtacgtacgtttgacttggtctcgctgtcggttaactgtaaagttagggggaagaaagaaaaaaaattaaaagggtagacacagttgagagttttattttaaaaagctaagtcttataattatgaccattaacttgctttggctttattgcagtgactttccaagtttaattattcaaaactttttgaactgactgaattaacttggtatttttaagttgactttttacataaactttataaaccttttataaaaaggaaactataccattactataaatggaaaatcattttacacatcatacctagcaggtaataaaatttaaaaaataaaaattaaatattagaatgtgagaaatttattaaaatgtagttctaaaaataagtttcttcctgagaagaatgatactgtttatgatgaatccatagtgaaaagacagtgacctctctttcatccagtctagtatatcactaaatcatcattacgatgtttggctatcaagtcattaattactgtcctcctttcactgagctttattcaaattttgacaatcagagcactgggaagaaataaattccacaactgcctttagccttctggatactttcttttataaaatagaaaccttttccacaccagttctgcagcagtcgctattagatgctcgtggtagaacccatcaatcatctggtcctctgggtactggtgagcatccctggtcttcatacctgtgagtgggctttgtggtgaattactgtaaatatgctaccctcacttttcttggcagttatgtccatgaaatcaagagtgtgatgttctagttattttttcttatatatatttttaaatgttcaatattcaactattgaaacaaatgtacatctgtgaactagctaaaatcatcttatgtaccactaatatgcccagcacattttgtaaaacagtcctgatttggcctccaagggtatttattgaactaccagcagtatctaggagaccacgaaggaataccacgaaggaatttatgctccagtgcttgccataatttgtctgagaaggaatctgttaaataaaagcttttatcctctaacctttaccttcatcagaccttataaaaggtcaaatggtgattcttaagttttttagtcacaaatcttacttattcagtattagtgcgaagagtagaatactttcaagtaagcctaaacttacatgaaaacaaattacataaatctagctctgagaataggaaattagtgacaagatcaatctgtaagatgttgagcacttatctgaagtaaatgggtaatgagtttcacatcttataaatacaagttagcatgtgttttctcaagagtccaagggttttcattattggactacagctttaatcttctaaatgttattccccaagattaaagagcatctcaagttagatcaccaaagatcaaaagctaaaaccagaagtatttttgtcattgtggtggtggtagtgttactaattgcctagatttttaaagggaaacatttttttcactgggttgtttcgttgaaaaaaatagaagcagaaacttgcccaaagtcacagtggtcaaactggaaattgcaccaaaacttggcatactggttctgaaatccatagttttagcccttatgtatactggttaatttggaaggaagaaatatatacgttctgaagtgaagagtgagtgaaaggaagaattcagtgaatacattgataccttgatattatctgcattgtggctacatgttacttttcttcacaagagtgatataagtgaaataaagaatgattggactgggagaaaaatggctcagaaaactttgcaaaagtacgactgtatgtaaagataagtattcaacattaaatgggaaggaggagagcaagcagtttaatatatagaattttataattttaggcctgcaagggaccttataaaacatgagcaatggaacacttttttccaaactaaatttcgtgcagtggaacttggccgactctgtccttcctctattctaagcaccctactctagcccggctgctctgagttcagtttgttacaaatatggacacgaaagtaccacaggctttgcacagcttaattgaagtttccccttcacaccatggtaaaaaaacatactgggatggaagggcttgtgtctagaacaagaacaagaaataaactcttggtcacttactaatatttcaaaatcacaaagcagaattttgcttggatgtttagtaaaacatccttggaaatttaactgcttgcagcttctacacttcttcattaaatgctgtctggctaataaaaagtgccatgttgcagctttattttattttcattttttggagatagaccctcactgtgtcacccaggctggagtgcagtggtacaatctctgctcactgcaacctccacctcctgggctcaggtgattgtcctgcctcagcctcctgagtagctggggttacgggcgtccaccaccacacccagctagtttttgtatttttagtagagggggtttttgccatgttggccaggctgggcatggtggcatggtaatctcagctacttgggaggctgaggcaggaggatcgcctgaacccgtgagatggaggttgcagtgagctgagatcacaccactgcactctagcatgggtgacagagcaagactctgtctcaaaaaaaaaaaaaaaaaaaaaaaacgaaaacagaattctgtttgtttggatgacctgttatacttatttttgatcttgctgaaataagcaaatcttaggaatcttagtctacagtttctgacagttttttttgttgttgttgtttgaccaattagaactaaataaaaagaacgtgattttcacatttaaatttctcttaagtgtattcctagaacagtaagccattggtttaattgctacttgatgccagtttccttgaagatagccgttaagataaaacatggtttcattgttaattctgtagaaagttacatgttactattatgttattctattggtgtattgttccttttactcaccacagagattgtccaaacacttgtcattattggggcaggcactgcaggtggctcctctcttatatggccaagttgggtaattccctctgtaaagcagaagaaggatgtccattagaagtttttcggttttttaaaattgcaatttactatgaatccttaactaaatccagaagaatagtggagtgaagtacaaaggtccagagagttggtaatagaagtgaagacaggaaggcagaaatggaaggctgctaatatttgcatagttcattctatgtacctgtgtctatgcacctgttttaatctgcatcccatttaattgtgacagctctgagaggaagttattcttgttttacagatgagacaaaagatgtaagagatacctttaatcacaatttatacacttcagagtcagaggaaacctggatttaactccagggctgtgctccctctctttacctaccctctggcctatatgattactgccattcaaaaaactgtccatcttagaaaagctatggtgacccacattcaatattctcagttggtcagccctccataattttcactggataggagccatttggctggtgccttccaaaaaaataataaataatggtatgggggaatttctaaagtacaaattgttttcacatacaagatgtgatatgaataaatagctgctaattagtgagcactaccatgtgcttgtctttgttctaaacaaccttgaatgaaataatcttcacaaaaaccctatgaggaagttactgttgtctatttatacccattatatagctagaggctgagtcacagagtataagtaattgaccaaggtcacagactagaaagtgaaataatatccaagcattttatatccccataaatatcctcatagtagtaatggggagagggggcacatttatctcaatgaacctgccattgcactaattttttttggaactctgcttttggaaaaagttctaaacttttttgtgtaatcgtaccctttggcagtctggtgaggcctatgggctctttctcaacatagtttgttgttaaatgcataaaatacataggattataaaggaaaccaattaaattgaaatagttatcaaaatgtttaaaacaagatttgtgataaagtaatatgtgcttctctattaagatctaccgggggctattagtttcaatgcagtgatgaacacaaactatattttgagttctctgcagcaagtggaatgtggtatgaaaatatctgatatttacaaagatgatactgctaagtcagagtcacgtttattgctaatatgatggtggagtgttgtcttcattcataatgaaaggaaatgttatttttaatagaggttagtgaaaataaaaataaaactattttctaatcaaagtttatggtcctcctctccccagcactctacaattacctccaaagttgagaactctcaccttagacacacaactttataacgataccttatttccaaccccaaatctatgttcttatctcattttgctccaaattttaagttgcttcagaaatttaattagccctctgcttactctacaccatggaaaaaaggtaatatagtagaaattctgatagcaatttcaaaagatgtccaaaatagacattaatcattggaatgtctttcattgttaataagcacagtattaagtggtttaagttctagaatgattttaataaagtcatttatgatacttagctgtgcattccaaactgtaaaggaaaaggtaaaaaatgctacttaaaaataagctaaaaaccaagacagtcggtgaggtctgtggaaatggtagtattcatcttgggagaaacatgctactggaaaggcctggatttgtctagatgggagtcattaagactgtgggacctaaagtattcagcacaataaagcaacaggacatttcaatgttttccctggtagcctgagagagaagagggttggggttatgggacccaggggaagaccgaagacaaatctttaaagaaaaagataaatatgggtaagggtccctaaggcagtgacggcctaagcacactggtactatcttgactatcttgtggtcaaagttatttcctcttctgtgctataatcctctcctccactaatccactctgagtaaagatctgttacacaccatacccttgttcatggtgcccaggggaaatgaagaggagagtattacaggcaactggaagattaagcatcccagaccccattctgaggtatcagaaatattgaggaggatactggacttcctaagattatgtggaatgggggcctacaactttttgtgtataggaaaataatacctcagagggcagagggcaaagggaaatgaggacattcctaactggtctctctgttttaccttttatgctcctctaatccattttccatccagactgatgtccaaatttaaaggtctcatcgctcccctgcttaatatacttgaatgacttcttatgtaaactttgtcatgatctaaaagttcccgctagatctgcaantgccttcctccccccgtttcatctgtttagcagaccgagggcaccagtctctgtggtttaaacttgccaaacttttcttcacggaagttttgctgttcttttctccactagacagctgttccagaagttcttatgtctgattccttctcattcttcatgcctaagcttaaatataacacaagaagcccttccctgattatnctaaacaggggccttgcctattgatagtttctattacagtattatttatagttccttaattgccccataatgatgcagttattttacttgtatttttattatctgtttgccccataaatattactctcataaagacagagactgccctgttctcctttggagctcagtaaaacaaatatttgttgaataaatgaatatttgaagttagtctttatggaagcattataactttggttgtaagttttataatttaatattgtttataactctgaagataagtgagtctaaaccaggaaaatttacatttatactttaatgaataaaaatcatgaatacttacaaaacattcactattgccaagcattatatatacctagtattttacaaagccttctcttgtcactttcatagctactctaagtgatgggtcctgtaaccctgatctattggaggttaaactgagattcagagttaacttgtccagggtcacacagtaaattaattgtatcttaaccattaaaaatgtcatatgaggccgggtgtagtggctcatgcctataatcccagcactctgggaggctgaggcaggtggatcactttagcccaggagttggagatgagcctgggcaatatggcaaaactctgtctctacaaaaaaattaactgggcatggtggcatgtgcctgtagtctcaggtactaggaaggctgagttgggaggattgcttgagcctgggaggttaagcctgcagtgaaccgtaagcgagccactgtactccagcctgggtgacagagtgagagaccctgtctcaaaaaaaaaaaaaaaaagtcatgaaaagttaccactaactgaattatggctttgtctagttttttctgggttttctttattttccaactcttaagatattaagtcaaagctgtcatctt

SEQ ID NO: 351066 - DNA, 3844 bp, Homo sapiens
agccggtagggtttaagaacagtttcatttccggagccaccggaagcagcttgcaaatggcgtctccctcgctggagcggccagaaaaaggcgctggaaaaagtgaatttcgtaaccagaagccgaagccggagaaccaagatgaatcagaactccttacggttcctgatggttggaaggaaccagctttttccaaagaggacaatcccagaggacttttggaggagagcagtttcgcaactttgttcccaaaatacagggaagcttacttgaaagagtgttggccattggtgcagaaagccttaaatgaacatcatgttaatgcaaccctggacctgatcgaaggcagcatgactgtttgtactacaaagaagacttttgatccatatatcatcattagggccagagatctgataaaactgttagcaaggagtgtttcatttgaacaggcagtacgaattcttcaggatgatgttgcatgtgacatcattaaaataggttctttagtaaggaataaagagagatttgtaaaacgaagacaacggcttattggtcccaaaggatctacattgaaggcattggaactcttaactaattgttacattatggttcagggaaacacagtttcagccattggaccttttagtggcttaaaagaggttagaaaagtagtccttgatactatgaagaatattcatccaatttataacattaaaagcttaatgattaagagagagttggcaaaagattctgaattacgatcacaaagttgggagagatttttgccacagttcaaacacaaaaatgtgaataaacgcaaggaaccaaagaaaaaaactgttaagaaagaatatacgccattcccaccaccacaaccagaaagtcagatcgataaagaattggctagtggtgaatactttttgaaggcaaatcagaagaagcggcagaaaatggaagcaataaaggctaaacaagcagaagccatcagtaagagacaagaggaaagaaacaaagcatttattccacctaaggaaaaaccaattgtgaaacctaaggaagcttctactgaaactaaaattgatgtggccagcatcaaggaaaaggttaagaaagcaaagaataagaaactgggagctcttacagctgaagaaattgcacttaagatggaggcagatgaaaagaaaaagaagaaaaaaaagtaacatacccaaaactccttgactagaactatctccttttgtaaaggattttgagatatcaggcattagttgccttatttgtgagaaattttctgagggcttttttttttttttggtggtggtggttgttcatagaagagtgttctttataaattatattattattgtattttttgaaaaatttatactagaaagtggtatatatgtctttgtatacattacgaccattgtgattatccattaaatccagtgtctgatgctattggttagtaatgatgtcccagcatttgatgttccctctctaatgataacaagtaaatatttaggtttatcccttttgaaagtttggttttacttttaacagtccatgaacagaaaattaaggcctctaaaatcagatcccctagttactcctctgttctgaatctggggaagtagtaaaccaaaaagacagggaaaaccagatatttagagtcgaagcagcatgcaaaaaataataatgtttttaactaatgaaggctactggagttactaagaatcacctaaaaatgtgctactgtaccttgctcattttgcagatttagaagctgaaacatgggttaggttacttactaaaagtccacctgtggcaacctgcaaataatgcttatttatactaaagatgagtttatctgatagagttaggaaatttcttcttttgagtaagagtattgctataacatatatttttttctgaaatgttttaaaatagaagtacacctaattgttattggttaaaaaaaaagccatatgtgaatgaggttggtttttgggttttttctttcctgaattgtattagtccaaaagaactaaattagggtacttgtgctgtaccaaaatggtaattataacagacagtattagaattactgaattaacaatgagaaagagagaagtgtatctgttacgtggatatatgggccagcctggatatacaacagagtagtaacctgtgaaacaaacatagaatatcctcttagacattgttcctcataatgcactgacagaattcacatagctcttaatgaaacaatttaagattgatgtacgtacgtttgacttggtctcgctgtcggttaactgtaaagttagggggaagaaagaaaaaaaattaaaagggtagacacagttgagagttttattttaaaaagctaagtcttataattatgaccattaacttgctttggctttattgcagtgactttccaagtttaattattcaaaactttttgaactgactgaattaacttggtatttttaagttgactttttacataaactttataaaccttttataaaaaggaaactataccattactataaatggaaaatcattttacacatcatacctagcaggtaataaaatttaaaaaataaaaattaaatattagaatgtgagaaatttattaaaatgtagttctaaaaataagtttcttcctgagaagaatgatactgtttatgatgaatccatagtgaaaagacagtgacctctctttcatccagtctagtatatcactaaatcatcattacgatgtttggctatcaagtcattaattactgtcctcctttcactgagctttattcaaattttgacaatcagagcactgggaagaaataaattccacaactgcctttagccttctggatactttcttttataaaatagaaaccttttccacaccagttctgcagcagtcgctattagatgctcgtggtagaacccatcaatcatctggtcctctgggtactggtgagcatccctggtcttcatacctgtgagtgggctttgtggtgaattactgtaaatatgctaccctcacttttcttggcagttatgtccatgaaatcaagagtgtgatgttctagttattttttcttatatatatttttaaatgttcaatattcaactattgaaacaaatgtacatctgtgaactagctaaaatcatcttatgtaccactaatatgcccagcacattttgtaaaacagtcctgatttggcctccaagggtatttattgaactaccagcagtatctaggagaccacgaaggaataccacgaaggaatttatgctccagtgcttgccataatttgtctgagaaggaatctgttaaataaaagcttttatcctctaacctttaccttcatcagaccttataaaaggtcaaatggtgattcttaagttttttagtcacaaatcttacttattcagtattagtgcgaagagtagaatactttcaagtaagcctaaacttacatgaaaacaaattacataaatctagctctgagaataggaaattagtgacaagatcaatctgtaagatgttgagcacttatctgaagtaaatgggtaatgagtttcacatcttataaatacaagttagcatgtgttttctcaagagtccaagggttttcattattggactacagctttaatcttctaaatgttattccccaagattaaagagcatctcaagttagatcaccaaagatcaaaagctaaaaccagaagtataaagcgtggagcgctttatacttctcactggaattcgtggaacatatttcttttttttttttagattgtgttggtgttgtggatttttttt

SEQ ID NO: 351067 - DNA, 3373 bp, Homo sapiens
agccggtagggtttaagaacagtttcatttccggagccaccggaagcagcttgcaaatggcgtctccctcgctggagcggccagaaaaaggcgctggaaaaagtgaatttcgtaaccagaagccgaagccggagaaccaagatgaatcagaactccttacggttcctgatggttggaaggaaccagctttttccaaagaggacaatcccagaggacttttggaggagagcagtttcgcaactttgttcccaaaatacagggaagcttacttgaaagagtgttggccattggtgcagaaagccttaaatgaacatcatgttaatgcaaccctggacctgatcgaaggcagcatgactgtttgtactacaaagaagacttttgatccatatatcatcattagggccagagatctgataaaactgttagcaaggagtgtttcatttgaacaggcagtacgaattcttcaggatgatgttgcatgtgacatcattaaaataggttctttagtaaggaataaagagagatttgtaaaacgaagacaacggcttattggtcccaaaggatctacattgaaggcattggaactcttaactaattgttacattatggttcagggaaacacagtttcagccattggaccttttagtggcttaaaagaggttagaaaagtagtccttgatactatgaagaatattcatccaatttataacattaaaagcttaatgattaagagagagttggcaaaagattctgaattacgatcacaaagttgggagagatttttgccacagttcaaacacaaaaatgtgaataaacgcaaggaaccaaagaaaaaaactgttaagaaagaatatacgccattcccaccaccacaaccagaaagtcagatcgataaagaattggctagtggtgaatactttttgaaggcaaatcagaagaagcggcagaaaatggaagcaataaaggctaaacaagcagaagccatcagtaagagacaagaggaaagaaacaaagcatttattccacctaaggaaaaaccaattgtgaaacctaaggaagcttctactgaaactaaaattgatgtggccagcatcaaggaaaaggttaagaaagcaaagaataagaaactgggagctcttacagctgaagaaattgcacttaagatggaggcagatgaaaagaaaaagaagaaaaaaaagtaacatacccaaaactccttgactagaactatctccttttgtaaaggattttgagatatcaggcattagttgccttatttgtgagaaattttctgagggcttttttttttttttggtggtggtggttgttcatagaagagtgttctttataaattatattattattgtattttttgaaaaatttatactagaaagtggtatatatgtctttgtatacattacgaccattgtgattatccattaaatccagtgtctgatgctattggttagtaatgatgtcccagcatttgatgttccctctctaatgataacaagtaaatatttaggtttatcccttttgaaagtttggttttacttttaacagtccatgaacagaaaattaaggcctctaaaatcagatcccctagttactcctctgttctgaatctggggaagtagtaaaccaaaaagacagggaaaaccagatatttagagtcgaagcagcatgcaaaaaataataatgtttttaactaatgaaggctactggagttactaagaatcacctaaaaatgtgctactgtaccttgctcattttgcagatttagaagctgaaacatgggttaggttacttactaaaagtccacctgtggcaacctgcaaataatgcttatttatactaaagatgagtttatctgatagagttaggaaatttcttcttttgagtaagagtattgctataacatatatttttttctgaaatgttttaaaatagaagtacacctaattgttattggttaaaaaaaaagccatatgtgaatgaggttggtttttgggttttttctttcctgaattgtattagtccaaaagaactaaattagggtacttgtgctgtaccaaaatggtaattataacagacagtattagaattactgaattaacaatgagaaagagagaagtgtatctgttacgtggatatatgggccagcctggatatacaacagagtagtaacctgtgaaacaaacatagaatatcctcttagacattgttcctcataatgcactgacagaattcacatagctcttaatgaaacaatttaagattgatgtacgtacgtttgacttggtctcgctgtcggttaactgtaaagttagggggaagaaagaaaaaaaattaaaagggtagacacagttgagagttttattttaaaaagctaagtcttataattatgaccattaacttgctttggctttattgcagtgactttccaagtttaattattcaaaactttttgaactgactgaattaacttggtatttttaagttgactttttacataaactttataaaccttttataaaaaggaaactataccattactataaatggaaaatcattttacacatcatacctagcaggtaataaaatttaaaaaataaaaattaaatattagaatgtgagaaatttattaaaatgtagttctaaaaataagtttcttcctgagaagaatgatactgtttatgatgaatccatagtgaaaagacagtgacctctctttcatccagtctagtatatcactaaatcatcattacgatgtttggctatcaagtcattaattactgtcctcctttcactgagctttattcaaattttgacaatcagagcactgggaagaaataaattccacaactgcctttagccttctggatactttcttttataaaatagaaaccttttccacaccagttctgcagcagtcgctattagatgctcgtggtagaacccatcaatcatctggtcctctgggtactggtgagcatccctggtcttcatacctgtgagtgggctttgtggtgaattactgtaaatatgctaccctcacttttcttggcagttatgtccatgaaatcaagagtgtgatgttctagttattttttcttatatatatttttaaatgttcaatattcaactattgaaacaaatgtacatctgtgaactagctaaaatcatcttatgtaccactaatatgcccagcacattttgtaaaacagtcctgatttggcctccaagggtatttattgaactaccagcagtatctaggagaccacgaaggaataccacgaaggaatttatgctccagtgcttgccataatttgtctgagaaggaatctgttaaataaaagcttttatcctctaa

SEQ ID NO: 351068 - DNA, 2018 bp, Homo sapiens
agccggtagggtttaagaacagtttcatttccggagccaccggaagcagcttgcaaatggcgtctccctcgctggagcggccagaaaaaggcgctggaaaaagtgaatttcgtaaccagaagccgaagccggagaaccaagatgaatcagaactccttacggttcctgatggttggaaggaaccagctttttccaaagaggacaatcccagaggacttttggaggagagcagtttcgcaactttgttcccaaaatacagggaagcttacttgaaagagtgttggccattggtgcagaaagccttaaatgaacatcatgttaatgcaaccctggacctgatcgaaggcagcatgactgtttgtactacaaagaagacttttgatccatatatcatcattagggccagagatctgataaaactgttagcaaggagtgtttcatttgaacaggcagtacgaattcttcaggatgatgttgcatgtgacatcattaaaataggttctttagtaaggaataaagagagatttgtaaaacgaagacaacggcttattggtcccaaaggatctacattgaaggcattggaactcttaactaattgttacattatggttcagggaaacacagtttcagccattggaccttttagtggcttaaaagaggttagaaaagtagtccttgatactatgaagaatattcatccaatttataacattaaaagcttaatgattaagagagagttggcaaaagattctgaattacgatcacaaagttgggagagatttttgccacagttcaaacacaaaaatgtgaataaacgcaaggaaccaaagaaaaaaactgttaagaaagaatatacgccattcccaccaccacaaccagaaagtcagatcgataaagaattggctagtggtgaatactttttgaaggcaaatcagaagaagcggcagaaaatggaagcaataaaggctaaacaagcagaagccatcagtaagagacaagaggaaagaaacaaagcatttattccacctaaggaaaaaccaattgtgaaacctaaggaagcttctactgaaactaaaattgatgtggccagcatcaaggaaaaggttaagaaagcaaagaataagaaactgggagctcttacagctgaagaaattgcacttaagatggaggcagatgaaaagaaaaagaagaaaaaaaagtaacatacccaaaactccttgactagaactatctccttttgtaaaggattttgagatatcaggcattagttgccttatttgtgagaaattttctgagggcttttttttttttttggtggtggtggttgttcatagaagagtgttctttataaattatattattattgtattttttgaaaaatttatactagaaagtggtatatatgtctttgtatacattacgaccattgtgattatccattaaatccagtgtctgatgctattggttagtaatgatgtcccagcatttgatgttccctctctaatgataacaagtaaatatttaggtttatcccttttgaaagtttggttttacttttaacagtccatgaacagaaaattaaggcctctaaaatcagatcccctagttactcctctgttctgaatctggggaagtagtaaaccaaaaagacagggaaaaccagatatttagagtcgaagcagcatgcaaaaaataataatgtttttaactaatgaaggctactggagttactaagaatcacctaaaaatgtgctactgtaccttgctcattttgcagatttagaagctgaaacatgggttaggttacttactaaaagtccacctgtggcaactggcactaagggtattaatctaagactaggttactggataagtcggaattctccttgagtagagtttggtatactatatttttctggatgttgtaatgagaacctatgcttggtgcaaaccctctgttggggcgggggtatccccagattctaacacagagttgcccacgggtatacataaatctt

SEQ ID NO: 351069 - DNA, 1807 bp, Homo sapiens
agccggtagggtttaagaacagtttcatttccggagccaccggaagcagcttgcaaatggcgtctccctcgctggagcggccagaaaaaggcgctggaaaaagtgaatttcgtaaccagaagccgaagccggagaaccaagatgaatcagaactccttacggttcctgatggttggaaggaaccagctttttccaaagaggacaatcccagaggacttttggaggagagcagtttcgcaactttgttcccaaaatacagggaagcttacttgaaagagtgttggccattggtgcagaaagccttaaatgaacatcatgttaatgcaaccctggacctgatcgaaggcagcatgactgtttgtactacaaagaagacttttgatccatatatcatcattagggccagagatctgataaaactgttagcaaggagtgtttcatttgaacaggcagtacgaattcttcaggatgatgttgcatgtgacatcattaaaataggttctttagtaaggaataaagagagatttgtaaaacgaagacaacggcttattggtcccaaaggatctacattgaaggcattggaactcttaactaattgttacattatggttcagggaaacacagtttcagccattggaccttttagtggcttaaaagaggttagaaaagtagtccttgatactatgaagaatattcatccaatttataacattaaaagcttaatgattaagagagagttggcaaaagattctgaattacgatcacaaagttgggagagatttttgccacagttcaaacacaaaaatgtgaataaacgcaaggaaccaaagaaaaaaactgttaagaaagaatatacgccattcccaccaccacaaccagaaagtcagatcgataaagaattggctagtggtgaatactttttgaaggcaaatcagaagaagcggcagaaaatggaagcaataaaggctaaacaagcagaagccatcagtaagagacaagaggaaagaaacaaagcatttattccacctaaggaaaaaccaattgtgaaacctaaggaagcttctactgaaactaaaattgatgtggccagcatcaaggaaaaggttaagaaagcaaagaataagaaactgggagctcttacagctgaagaaattgcacttaagatggaggcagatgaaaagaaaaagaagaaaaaaaagtaacatacccaaaactccttgactagaactatctccttttgtaaaggattttgagatatcaggcattagttgccttatttgtgagaaattttctgagggcttttttttttttttggtggtggtggttgttcatagaagagtgttctttataaattatattattattgtattttttgaaaaatttatactagaaagtggtatatatgtctttgtatacattacgaccattgtgattatccattaaatccagtgtctgatgctattggttagtaatgatgtcccagcatttgatgttccctctctaatgataacaagtaaatatttaggtttatcccttttgaaagtttggttttacttttaacagtccatgaacagaaaattaaggcctctaaaatcagatcccctagttactcctctgttctgaatctggggaagtagtaaaccaaaaagacagggaaaaccagatatttagagtcgaagcagcatgcaaaaaataataatgtttttaactaatgaaggctactggagttactaagaatcacccttaaaaaatggttgcttttactttgtttaaacccccccctttgcttcatatttggccaagggaa

SEQ ID NO: 351070 - DNA, 1629 bp, Homo sapiens
agccggtagggtttaagaacagtttcatttccggagccaccggaagcagcttgcaaatggcgtctccctcgctggagcggccagaaaaaggcgctggaaaaagtgaatttcgtaaccagaagccgaagccggagaaccaagatgaatcagaactccttacggttcctgatggttggaaggaaccagctttttccaaagaggacaatcccagaggacttttggaggagagcagtttcgcaactttgttcccaaaatacagggaagcttacttgaaagagtgttggccattggtgcagaaagccttaaatgaacatcatgttaatgcaaccctggacctgatcgaaggcagcatgactgtttgtactacaaagaagacttttgatccatatatcatcattagggccagagatctgataaaactgttagcaaggagtgtttcatttgaacaggcagtacgaattcttcaggatgatgttgcatgtgacatcattaaaataggttctttagtaaggaataaagagagatttgtaaaacgaagacaacggcttattggtcccaaaggatctacattgaaggcattggaactcttaactaattgttacattatggttcagggaaacacagtttcagccattggaccttttagtggcttaaaagaggttagaaaagtagtccttgatactatgaagaatattcatccaatttataacattaaaagcttaatgattaagagagagttggcaaaagattctgaattacgatcacaaagttgggagagatttttgccacagttcaaacacaaaaatgtgaataaacgcaaggaaccaaagaaaaaaactgttaagaaagaatatacgccattcccaccaccacaaccagaaagtcagatcgataaagaattggctagtggtgaatactttttgaaggcaaatcagaagaagcggcagaaaatggaagcaataaaggctaaacaagcagaagccatcagtaagagacaagaggaaagaaacaaagcatttattccacctaaggaaaaaccaattgtgaaacctaaggaagcttctactgaaactaaaattgatgtggccagcatcaaggaaaaggttaagaaagcaaagaataagaaactgggagctcttacagctgaagaaattgcacttaagatggaggcagatgaaaagaaaaagaagaaaaaaaagtaacatacccaaaactccttgactagaactatctccttttgtaaaggattttgagatatcaggcattagttgccttatttgtgagaaattttctgagggcttttttttttttgggaggcgggacgaggtcgtccagcttcaacggcaacagatgctgtgccgggagcggcataaagagccacccagggagctggacacgtcctcctcggatgaggagaatgaggacggagacttcacggagtacgagtgcccgggcctggccccgagcggggaactgggggggtgcaaccttcggttcgaccacgcggaatggtccgtgcccctgccgtgccccagctcaccggcggccatggcttgacctgggggcagacagacgcccaccggttcccggacctcgaggcccctgggggggggcagggcctggggcttc

SEQ ID NO: 351071 - DNA, 1514 bp, Homo sapiens
agccggtagggtttaagaacagtttcatttccggagccaccggaagcagcttgcaaatggcgtctccctcgctggagcggccagaaaaaggcgctggaaaaagtgaatttcgtaaccagaagccgaagccggagaaccaagatgaatcagaactccttacggttcctgatggttggaaggaaccagctttttccaaagaggacaatcccagaggacttttggaggagagcagtttcgcaactttgttcccaaaatacagggaagcttacttgaaagagtgttggccattggtgcagaaagccttaaatgaacatcatgttaatgcaaccctggacctgatcgaaggcagcatgactgtttgtactacaaagaagacttttgatccatatatcatcattagggccagagatctgataaaactgttagcaaggagtgtttcatttgaacaggcagtacgaattcttcaggatgatgttgcatgtgacatcattaaaataggttctttagtaaggaataaagagagatttgtaaaacgaagacaacggcttattggtcccaaaggatctacattgaaggcattggaactcttaactaattgttacattatggttcagggaaacacagtttcagccattggaccttttagtggcttaaaagaggttagaaaagtagtccttgatactatgaagaatattcatccaatttataacattaaaagcttaatgattaagagagagttggcaaaagattctgaattacgatcacaaagttgggagagatttttgccacagttcaaacacaaaaatgtgaataaacgcaaggaaccaaagaaaaaaactgttaagaaagaatatacgccattcccaccaccacaaccagaaagtcagatcgataaagaattggctagtggtgaatactttttgaaggcaaatcagaagaagcggcagaaaatggaagcaataaaggctaaacaagcagaagccatcagtaagagacaagaggaaagaaacaaagcatttattccacctaaggaaaaaccaattgtgaaacctaaggaagcttctactgaaactaaaattgatgtggccagcatcaaggaaaaggttaagaaagcaaagaataagaaactgggagctcttacagctgaagaaattgcacttaagatggaggcagatgaaaagaaaaagaagaaaaaaaagtaacatacccaaaactccttgactagaactatctccttttgtaaaggattttgagatatcaggcattagttgccttatttgtgagaaattttctgagggcttttttttttttggatgcgggacgagtcgaccagcatcaagcaagattggaaatggagtccttctatgaaggagaagacttttctgagaccctgactcgggccaaattggaagagctcaacagggatctgttccggtctactatgaagcccgtccagaaagggtgggaagatactgattggaaaaggtctgatatggatgctggacgaggggtac

SEQ ID NO: 351072 - DNA, 8983 bp, Homo sapiens
  misc_feature (7853)..(7853): n is a, c, g, or t
  misc_feature (8054)..(8054): n is a, c, g, or t
tgaccacgcgtcgcggacgcgtgggcgctggagcggccagaaaaaggcgctggaaaaagtgaatttcgtaaccagaagccgaagccggagaaccaagatgaatcagaactccttacggttcctgatggttggaaggaaccagctttttccaaagaggacaatcccagaggacttttggaggagagcagtttcgcaactttgttcccaaaatacagggaagcttacttgaaagagtgttggccattggtgcagaaagccttaaatgaacatcatgttaatgcaaccctggacctgatcgaaggcagcatgactgtttgtactacaaagaagacttttgatccatatatcatcattagggccagagatctgataaaactgttagcaaggagtgtttcatttgaacaggcagtacgaattcttcaggatgatgttgcatgtgacatcattaaaataggttctttagtaaggaataaagagagatttgtaaaacgaagacaacggcttattggtcccaaaggatctacattgaaggcattggaactcttaactaattgttacattatggttcagggaaacacagtttcagccattggaccttttagtggcttaaaagaggttagaaaagtagtccttgatactatgaagaatattcatccaatttataacattaaaagcttaatgattaagagagagttggcaaaagattctgaattacgatcacaaagttgggagagatttttgccacagttcaaacacaaaaatgtgaataaacgcaaggaaccaaagaaaaaaactgttaagaaagaatatacgccattcccaccaccacaaccagaaagtcagatcgataaagaattggctagtggtgaatactttttgaaggcaaatcagaagaagcggcagaaaatggaagcaataaaggctaaacaagcagaagccatcagtaagagacaagaggaaagaaacaaagcatttattccacctaaggaaaaaccaattgtgaaacctaaggaagcttctactgaaactaaaattgatgtggccagcatcaaggaaaaggttaagaaagcaaagaataagaaactgggagctcttacagctgaagaaattgcacttaagatggaggcagatgaaaagaaaaagaagaaaaaaaagtaacatacccaaaactccttgactagaactatctccttttgtaaaggattttgagatatcaggcattagttgccttatttgtgagaaattttctgagggcttttttttttttttggtggtggtggttgttcatagaagagtgttctttataaattatattattattgtattttttgaaaaatttatactagaaagtggtatatatgtctttgtatacattacgaccattgtgattatccattaaatccagtgtctgatgctattggttagtaatgatgtcccagcatttgatgttccctctctaatgataacaagtaaatatttaggtttatcccttttgaaagtttggttttacttttaacagtccatgaacagaaaattaaggcctctaaaatcagatcccctagttactcctctgttctgaatctggggaagtagtaaaccaaaaagacagggaaaaccagatatttagagtcgaagcagcatgcaaaaaataataatgtttttaactaatgaaggctactggagttactaagaatcacctaaaaatgtgctactgtaccttgctcattttgcagatttagaagctgaaacatgggttaggttacttactaaaagtccacctgtggcaacctgcaaataatgcttatttatactaaagatgagtttatctgatagagttaggaaatttcttcttttgagtaagagtattgctataacatatatttttttctgaaatgttttaaaatagaagtacacctaattgttattggttaaaaaaaaagccatatgtgaatgaggttggtttttgggttttttctttcctgaattgtattagtccaaaagaactaaattagggtacttgtgctgtaccaaaatggtaattataacagacagtattagaattactgaattaacaatgagaaagagagaagtgtatctgttacgtggatatatgggccagcctggatatacaacagagtagtaacctgtgaaacaaacatagaatatcctcttagacattgttcctcataatgcactgacagaattcacatagctcttaatgaaacaatttaagattgatgtacgtacgtttgacttggtctcgctgtcggttaactgtaaagttagggggaagaaagaaaaaaaattaaaagggtagacacagttgagagttttattttaaaaagctaagtcttataattatgaccattaacttgctttggctttattgcagtgactttccaagtttaattattcaaaactttttgaactgactgaattaacttggtatttttaagttgactttttacataaactttataaaccttttataaaaaggaaactataccattactataaatggaaaatcattttacacatcatacctagcaggtaataaaatttaaaaaataaaaattaaatattagaatgtgagaaatttattaaaatgtagttctaaaaataagtttcttcctgagaagaatgatactgtttatgatgaatccatagtgaaaagacagtgacctctctttcatccagtctagtatatcactaaatcatcattacgatgtttggctatcaagtcattaattactgtcctcctttcactgagctttattcaaattttgacaatcagagcactgggaagaaataaattccacaactgcctttagccttctggatactttcttttataaaatagaaaccttttccacaccagttctgcagcagtcgctattagatgctcgtggtagaacccatcaatcatctggtcctctgggtactggtgagcatccctggtcttcatacctgtgagtgggctttgtggtgaattactgtaaatatgctaccctcacttttcttggcagttatgtccatgaaatcaagagtgtgatgttctagttattttttcttatatatatttttaaatgttcaatattcaactattgaaacaaatgtacatctgtgaactagctaaaatcatcttatgtaccactaatatgcccagcacattttgtaaaacagtcctgatttggcctccaagggtatttattgaactaccagcagtatctaggagaccacgaaggaataccacgaaggaatttatgctccagtgcttgccataatttgtctgagaaggaatctgttaaataaaagcttttatcctctaacctttaccttcatcagaccttataaaaggtcaaatggtgattcttaagttttttagtcacaaatcttacttattcagtattagtgcgaagagtagaatactttcaagtaagcctaaacttacatgaaaacaaattacataaatctagctctgagaataggaaattagtgacaagatcaatctgtaagatgttgagcacttatctgaagtaaatgggtaatgagtttcacatcttataaatacaagttagcatgtgttttctcaagagtccaagggttttcattattggactacagctttaatcttctaaatgttattccccaagattaaagagcatctcaagttagatcaccaaagatcaaaagctaaaaccagaagtatttttgtcattgtggtggtggtagtgttactaattgcctagatttttaaagggaaacatttttttcactgggttgtttcgttgaaaaaaatagaagcagaaacttgcccaaagtcacagtggtcaaactggaaattgcaccaaaacttggcatactggttctgaaatccatagttttagcccttatgtatactggttaatttggaaggaagaaatatatacgttctgaagtgaagagtgagtgaaaggaagaattcagtgaatacattgataccttgatattatctgcattgtggctacatgttacttttcttcacaagagtgatataagtgaaataaagaatgattggactgggagaaaaatggctcagaaaactttgcaaaagtacgactgtatgtaaagataagtattcaacattaaatgggaaggaggagagcaagcagtttaatatatagaattttataattttaggcctgcaagggaccttataaaacatgagcaatggaacacttttttccaaactaaatttcgtgcagtggaacttggccgactctgtccttcctctattctaagcaccctactctagcccggctgctctgagttcagtttgttacaaatatggacacgaaagtaccacaggctttgcacagcttaattgaagtttccccttcacaccatggtaaaaaaacatactgggatggaagggcttgtgtctagaacaagaacaagaaataaactcttggtcacttactaatatttcaaaatcacaaagcagaattttgcttggatgtttagtaaaacatccttggaaatttaactgcttgcagcttctacacttcttcattaaatgctgtctggctaataaaaagtgccatgttgcagctttattttattttcattttttggagatagaccctcactgtgtcacccaggctggagtgcagtggtacaatctctgctcactgcaacctccacctcctgggctcaggtgattgtcctgcctcagcctcctgagtagctggggttacgggcgtccaccaccacacccagctagtttttgtatttttagtagagggggtttttgccatgttggccaggctgggcatggtggcatggtaatctcagctacttgggaggctgaggcaggaggatcgcctgaacccgtgagatggaggttgcagtgagctgagatcacaccactgcactctagcatgggtgacagagcaagactctgtctcaaaaaaaaaaaaaaaaaaaaaaaacgaaaacagaattctgtttgtttggatgacctgttatacttatttttgatcttgctgaaataagcaaatcttaggaatcttagtctacagtttctgacagttttttttgttgttgttgtttgaccaattagaactaaataaaaagaacgtgattttcacatttaaatttctcttaagtgtattcctagaacagtaagccattggtttaattgctacttgatgccagtttccttgaagatagccgttaagataaaacatggtttcattgttaattctgtagaaagttacatgttactattatgttattctattggtgtattgttccttttactcaccacagagattgtccaaacacttgtcattattggggcaggcactgcaggtggctcctctcttatatggccaagttgggtaattccctctgtaaagcagaagaaggatgtccattagaagtttttcggttttttaaaattgcaatttactatgaatccttaactaaatccagaagaatagtggagtgaagtacaaaggtccagagagttggtaatagaagtgaagacaggaaggcagaaatggaaggctgctaatatttgcatagttcattctatgtacctgtgtctatgcacctgttttaatctgcatcccatttaattgtgacagctctgagaggaagttattcttgttttacagatgagacaaaagatgtaagagatacctttaatcacaatttatacacttcagagtcagaggaaacctggatttaactccagggctgtgctccctctctttacctaccctctggcctatatgattactgccattcaaaaaactgtccatcttagaaaagctatggtgacccacattcaatattctcagttggtcagccctccataattttcactggataggagccatttggctggtgccttccaaaaaaataataaataatggtatgggggaatttctaaagtacaaattgttttcacatacaagatgtgatatgaataaatagctgctaattagtgagcactaccatgtgcttgtctttgttctaaacaaccttgaatgaaataatcttcacaaaaaccctatgaggaagttactgttgtctatttatacccattatatagctagaggctgagtcacagagtataagtaattgaccaaggtcacagactagaaagtgaaataatatccaagcattttatatccccataaatatcctcatagtagtaatggggagagggggcacatttatctcaatgaacctgccattgcactaattttttttggaactctgcttttggaaaaagttctaaacttttttgtgtaatcgtaccctttggcagtctggtgaggcctatgggctctttctcaacatagtttgttgttaaatgcataaaatacataggattataaaggaaaccaattaaattgaaatagttatcaaaatgtttaaaacaagatttgtgataaagtaatatgtgcttctctattaagatctaccgggggctattagtttcaatgcagtgatgaacacaaactatattttgagttctctgcagcaagtggaatgtggtatgaaaatatctgatatttacaaagatgatactgctaagtcagagtcacgtttattgctaatatgatggtggagtgttgtcttcattcataatgaaaggaaatgttatttttaatagaggttagtgaaaataaaaataaaactattttctaatcaaagtttatggtcctcctctccccagcactctacaattacctccaaagttgagaactctcaccttagacacacaactttataacgataccttatttccaaccccaaatctatgttcttatctcattttgctccaaattttaagttgcttcagaaatttaattagccctctgcttactctacaccatggaaaaaaggtaatatagtagaaattctgatagcaatttcaaaagatgtccaaaatagacattaatcattggaatgtctttcattgttaataagcacagtattaagtggtttaagttctagaatgattttaataaagtcatttatgatacttagctgtgcattccaaactgtaaaggaaaaggtaaaaaatgctacttaaaaataagctaaaaaccaagacagtcggtgaggtctgtggaaatggtagtattcatcttgggagaaacatgctactggaaaggcctggatttgtctagatgggagtcattaagactgtgggacctaaagtattcagcacaataaagcaacaggacatttcaatgttttccctggtagcctgagagagaagagggttggggttatgggacccaggggaagaccgaagacaaatctttaaagaaaaagataaatatgggtaagggtccctaaggcagtgacggcctaagcacactggtactatcttgactatcttgtggtcaaagttatttcctcttctgtgctataatcctctcctccactaatccactctgagtaaagatctgttacacaccatacccttgttcatggtgcccaggggaaatgaagaggagagtattacaggcaactggaagattaagcatcccagaccccattctgaggtatcagaaatattgaggaggatactggacttcctaagattatgtggaatgggggcctacaactttttgtgtataggaaaataatacctcagagggcagagggcaaagggaaatgaggacattcctaactggtctctctgttttaccttttatgctcctctaatccattttccatccagactgatgtccaaatttaaaggtctcatcgctcccctgcttaatatacttgaatgacttcttatgtaaactttgtcatgatctaaaagttcccgctagatctgcaantgccttcctccccccgtttcatctgtttagcagaccgagggcaccagtctctgtggtttaaacttgccaaacttttcttcacggaagttttgctgttcttttctccactagacagctgttccagaagttcttatgtctgattccttctcattcttcatgcctaagcttaaatataacacaagaagcccttccctgattatnctaaacaggggccttgcctattgatagtttctattacagtattatttatagttccttaattgccccataatgatgcagttattttacttgtatttttattatctgtttgccccataaatattactctcataaagacagagactgccctgttctcctttggagctcagtaaaacaaatatttgttgaataaatgaatatttgaagttagtctttatggaagcattataactttggttgtaagttttataatttaatattgtttataactctgaagataagtgagtctaaaccaggaaaatttacatttatactttaatgaataaaaatcatgaatacttacaaaacattcactattgccaagcattatatatacctagtattttacaaagccttctcttgtcactttcatagctactctaagtgatgggtcctgtaaccctgatctattggaggttaaactgagattcagagttaacttgtccagggtcacacagtaaattaattgtatcttaaccattaaaaatgtcatatgaggccgggtgtagtggctcatgcctataatcccagcactctgggaggctgaggcaggtggatcactttagcccaggagttggagatgagcctgggcaatatggcaaaactctgtctctacaaaaaaattaactgggcatggtggcatgtgcctgtagtctcaggtactaggaaggctgagttgggaggattgcttgagcctgggaggttaagcctgcagtgaaccgtaagcgagccactgtactccagcctgggtgacagagtgagagaccctgtctcaaaaaaaaaaaaaaaaagtcatgaaaagttaccactaactgaattatggctttgtctagttttttctgggttttctttattttccaactcttaagatattaagtcaaagctgtcatctt

SEQ ID NO: 351073 - DNA, 8945 bp, Homo sapiens
  misc_feature (21)..(21): n is a, c, g, or t
  misc_feature (7815)..(7815): n is a, c, g, or t
  misc_feature (8016)..(8016): n is a, c, g, or t
gggtaccgggcccccccgtgncatttcgtaaccagaagcccgaagcccggagaaccaagatgaatcagaactccttacggttcctgatggttggaaggaaccagctttttccaaagaggacaatcccagaggacttttggaggagagcagtttcgcaactttgttcccaaaatacagggaagcttacttgaaagagtgttggccattggtgcagaaagccttaaatgaacatcatgttaatgcaaccctggacctgatcgaaggcagcatgactgtttgtactacaaagaagacttttgatccatatatcatcattagggccagagatctgataaaactgttagcaaggagtgtttcatttgaacaggcagtacgaattcttcaggatgatgttgcatgtgacatcattaaaataggttctttagtaaggaataaagagagatttgtaaaacgaagacaacggcttattggtcccaaaggatctacattgaaggcattggaactcttaactaattgttacattatggttcagggaaacacagtttcagccattggaccttttagtggcttaaaagaggttagaaaagtagtccttgatactatgaagaatattcatccaatttataacattaaaagcttaatgattaagagagagttggcaaaagattctgaattacgatcacaaagttgggagagatttttgccacagttcaaacacaaaaatgtgaataaacgcaaggaaccaaagaaaaaaactgttaagaaagaatatacgccattcccaccaccacaaccagaaagtcagatcgataaagaattggctagtggtgaatactttttgaaggcaaatcagaagaagcggcagaaaatggaagcaataaaggctaaacaagcagaagccatcagtaagagacaagaggaaagaaacaaagcatttattccacctaaggaaaaaccaattgtgaaacctaaggaagcttctactgaaactaaaattgatgtggccagcatcaaggaaaaggttaagaaagcaaagaataagaaactgggagctcttacagctgaagaaattgcacttaagatggaggcagatgaaaagaaaaagaagaaaaaaaagtaacatacccaaaactccttgactagaactatctccttttgtaaaggattttgagatatcaggcattagttgccttatttgtgagaaattttctgagggcttttttttttttttggtggtggtggttgttcatagaagagtgttctttataaattatattattattgtattttttgaaaaatttatactagaaagtggtatatatgtctttgtatacattacgaccattgtgattatccattaaatccagtgtctgatgctattggttagtaatgatgtcccagcatttgatgttccctctctaatgataacaagtaaatatttaggtttatcccttttgaaagtttggttttacttttaacagtccatgaacagaaaattaaggcctctaaaatcagatcccctagttactcctctgttctgaatctggggaagtagtaaaccaaaaagacagggaaaaccagatatttagagtcgaagcagcatgcaaaaaataataatgtttttaactaatgaaggctactggagttactaagaatcacctaaaaatgtgctactgtaccttgctcattttgcagatttagaagctgaaacatgggttaggttacttactaaaagtccacctgtggcaacctgcaaataatgcttatttatactaaagatgagtttatctgatagagttaggaaatttcttcttttgagtaagagtattgctataacatatatttttttctgaaatgttttaaaatagaagtacacctaattgttattggttaaaaaaaaagccatatgtgaatgaggttggtttttgggttttttctttcctgaattgtattagtccaaaagaactaaattagggtacttgtgctgtaccaaaatggtaattataacagacagtattagaattactgaattaacaatgagaaagagagaagtgtatctgttacgtggatatatgggccagcctggatatacaacagagtagtaacctgtgaaacaaacatagaatatcctcttagacattgttcctcataatgcactgacagaattcacatagctcttaatgaaacaatttaagattgatgtacgtacgtttgacttggtctcgctgtcggttaactgtaaagttagggggaagaaagaaaaaaaattaaaagggtagacacagttgagagttttattttaaaaagctaagtcttataattatgaccattaacttgctttggctttattgcagtgactttccaagtttaattattcaaaactttttgaactgactgaattaacttggtatttttaagttgactttttacataaactttataaaccttttataaaaaggaaactataccattactataaatggaaaatcattttacacatcatacctagcaggtaataaaatttaaaaaataaaaattaaatattagaatgtgagaaatttattaaaatgtagttctaaaaataagtttcttcctgagaagaatgatactgtttatgatgaatccatagtgaaaagacagtgacctctctttcatccagtctagtatatcactaaatcatcattacgatgtttggctatcaagtcattaattactgtcctcctttcactgagctttattcaaattttgacaatcagagcactgggaagaaataaattccacaactgcctttagccttctggatactttcttttataaaatagaaaccttttccacaccagttctgcagcagtcgctattagatgctcgtggtagaacccatcaatcatctggtcctctgggtactggtgagcatccctggtcttcatacctgtgagtgggctttgtggtgaattactgtaaatatgctaccctcacttttcttggcagttatgtccatgaaatcaagagtgtgatgttctagttattttttcttatatatatttttaaatgttcaatattcaactattgaaacaaatgtacatctgtgaactagctaaaatcatcttatgtaccactaatatgcccagcacattttgtaaaacagtcctgatttggcctccaagggtatttattgaactaccagcagtatctaggagaccacgaaggaataccacgaaggaatttatgctccagtgcttgccataatttgtctgagaaggaatctgttaaataaaagcttttatcctctaacctttaccttcatcagaccttataaaaggtcaaatggtgattcttaagttttttagtcacaaatcttacttattcagtattagtgcgaagagtagaatactttcaagtaagcctaaacttacatgaaaacaaattacataaatctagctctgagaataggaaattagtgacaagatcaatctgtaagatgttgagcacttatctgaagtaaatgggtaatgagtttcacatcttataaatacaagttagcatgtgttttctcaagagtccaagggttttcattattggactacagctttaatcttctaaatgttattccccaagattaaagagcatctcaagttagatcaccaaagatcaaaagctaaaaccagaagtatttttgtcattgtggtggtggtagtgttactaattgcctagatttttaaagggaaacatttttttcactgggttgtttcgttgaaaaaaatagaagcagaaacttgcccaaagtcacagtggtcaaactggaaattgcaccaaaacttggcatactggttctgaaatccatagttttagcccttatgtatactggttaatttggaaggaagaaatatatacgttctgaagtgaagagtgagtgaaaggaagaattcagtgaatacattgataccttgatattatctgcattgtggctacatgttacttttcttcacaagagtgatataagtgaaataaagaatgattggactgggagaaaaatggctcagaaaactttgcaaaagtacgactgtatgtaaagataagtattcaacattaaatgggaaggaggagagcaagcagtttaatatatagaattttataattttaggcctgcaagggaccttataaaacatgagcaatggaacacttttttccaaactaaatttcgtgcagtggaacttggccgactctgtccttcctctattctaagcaccctactctagcccggctgctctgagttcagtttgttacaaatatggacacgaaagtaccacaggctttgcacagcttaattgaagtttccccttcacaccatggtaaaaaaacatactgggatggaagggcttgtgtctagaacaagaacaagaaataaactcttggtcacttactaatatttcaaaatcacaaagcagaattttgcttggatgtttagtaaaacatccttggaaatttaactgcttgcagcttctacacttcttcattaaatgctgtctggctaataaaaagtgccatgttgcagctttattttattttcattttttggagatagaccctcactgtgtcacccaggctggagtgcagtggtacaatctctgctcactgcaacctccacctcctgggctcaggtgattgtcctgcctcagcctcctgagtagctggggttacgggcgtccaccaccacacccagctagtttttgtatttttagtagagggggtttttgccatgttggccaggctgggcatggtggcatggtaatctcagctacttgggaggctgaggcaggaggatcgcctgaacccgtgagatggaggttgcagtgagctgagatcacaccactgcactctagcatgggtgacagagcaagactctgtctcaaaaaaaaaaaaaaaaaaaaaaaacgaaaacagaattctgtttgtttggatgacctgttatacttatttttgatcttgctgaaataagcaaatcttaggaatcttagtctacagtttctgacagttttttttgttgttgttgtttgaccaattagaactaaataaaaagaacgtgattttcacatttaaatttctcttaagtgtattcctagaacagtaagccattggtttaattgctacttgatgccagtttccttgaagatagccgttaagataaaacatggtttcattgttaattctgtagaaagttacatgttactattatgttattctattggtgtattgttccttttactcaccacagagattgtccaaacacttgtcattattggggcaggcactgcaggtggctcctctcttatatggccaagttgggtaattccctctgtaaagcagaagaaggatgtccattagaagtttttcggttttttaaaattgcaatttactatgaatccttaactaaatccagaagaatagtggagtgaagtacaaaggtccagagagttggtaatagaagtgaagacaggaaggcagaaatggaaggctgctaatatttgcatagttcattctatgtacctgtgtctatgcacctgttttaatctgcatcccatttaattgtgacagctctgagaggaagttattcttgttttacagatgagacaaaagatgtaagagatacctttaatcacaatttatacacttcagagtcagaggaaacctggatttaactccagggctgtgctccctctctttacctaccctctggcctatatgattactgccattcaaaaaactgtccatcttagaaaagctatggtgacccacattcaatattctcagttggtcagccctccataattttcactggataggagccatttggctggtgccttccaaaaaaataataaataatggtatgggggaatttctaaagtacaaattgttttcacatacaagatgtgatatgaataaatagctgctaattagtgagcactaccatgtgcttgtctttgttctaaacaaccttgaatgaaataatcttcacaaaaaccctatgaggaagttactgttgtctatttatacccattatatagctagaggctgagtcacagagtataagtaattgaccaaggtcacagactagaaagtgaaataatatccaagcattttatatccccataaatatcctcatagtagtaatggggagagggggcacatttatctcaatgaacctgccattgcactaattttttttggaactctgcttttggaaaaagttctaaacttttttgtgtaatcgtaccctttggcagtctggtgaggcctatgggctctttctcaacatagtttgttgttaaatgcataaaatacataggattataaaggaaaccaattaaattgaaatagttatcaaaatgtttaaaacaagatttgtgataaagtaatatgtgcttctctattaagatctaccgggggctattagtttcaatgcagtgatgaacacaaactatattttgagttctctgcagcaagtggaatgtggtatgaaaatatctgatatttacaaagatgatactgctaagtcagagtcacgtttattgctaatatgatggtggagtgttgtcttcattcataatgaaaggaaatgttatttttaatagaggttagtgaaaataaaaataaaactattttctaatcaaagtttatggtcctcctctccccagcactctacaattacctccaaagttgagaactctcaccttagacacacaactttataacgataccttatttccaaccccaaatctatgttcttatctcattttgctccaaattttaagttgcttcagaaatttaattagccctctgcttactctacaccatggaaaaaaggtaatatagtagaaattctgatagcaatttcaaaagatgtccaaaatagacattaatcattggaatgtctttcattgttaataagcacagtattaagtggtttaagttctagaatgattttaataaagtcatttatgatacttagctgtgcattccaaactgtaaaggaaaaggtaaaaaatgctacttaaaaataagctaaaaaccaagacagtcggtgaggtctgtggaaatggtagtattcatcttgggagaaacatgctactggaaaggcctggatttgtctagatgggagtcattaagactgtgggacctaaagtattcagcacaataaagcaacaggacatttcaatgttttccctggtagcctgagagagaagagggttggggttatgggacccaggggaagaccgaagacaaatctttaaagaaaaagataaatatgggtaagggtccctaaggcagtgacggcctaagcacactggtactatcttgactatcttgtggtcaaagttatttcctcttctgtgctataatcctctcctccactaatccactctgagtaaagatctgttacacaccatacccttgttcatggtgcccaggggaaatgaagaggagagtattacaggcaactggaagattaagcatcccagaccccattctgaggtatcagaaatattgaggaggatactggacttcctaagattatgtggaatgggggcctacaactttttgtgtataggaaaataatacctcagagggcagagggcaaagggaaatgaggacattcctaactggtctctctgttttaccttttatgctcctctaatccattttccatccagactgatgtccaaatttaaaggtctcatcgctcccctgcttaatatacttgaatgacttcttatgtaaactttgtcatgatctaaaagttcccgctagatctgcaantgccttcctccccccgtttcatctgtttagcagaccgagggcaccagtctctgtggtttaaacttgccaaacttttcttcacggaagttttgctgttcttttctccactagacagctgttccagaagttcttatgtctgattccttctcattcttcatgcctaagcttaaatataacacaagaagcccttccctgattatnctaaacaggggccttgcctattgatagtttctattacagtattatttatagttccttaattgccccataatgatgcagttattttacttgtatttttattatctgtttgccccataaatattactctcataaagacagagactgccctgttctcctttggagctcagtaaaacaaatatttgttgaataaatgaatatttgaagttagtctttatggaagcattataactttggttgtaagttttataatttaatattgtttataactctgaagataagtgagtctaaaccaggaaaatttacatttatactttaatgaataaaaatcatgaatacttacaaaacattcactattgccaagcattatatatacctagtattttacaaagccttctcttgtcactttcatagctactctaagtgatgggtcctgtaaccctgatctattggaggttaaactgagattcagagttaacttgtccagggtcacacagtaaattaattgtatcttaaccattaaaaatgtcatatgaggccgggtgtagtggctcatgcctataatcccagcactctgggaggctgaggcaggtggatcactttagcccaggagttggagatgagcctgggcaatatggcaaaactctgtctctacaaaaaaattaactgggcatggtggcatgtgcctgtagtctcaggtactaggaaggctgagttgggaggattgcttgagcctgggaggttaagcctgcagtgaaccgtaagcgagccactgtactccagcctgggtgacagagtgagagaccctgtctcaaaaaaaaaaaaaaaaagtcatgaaaagttaccactaactgaattatggctttgtctagttttttctgggttttctttattttccaactcttaagatattaagtcaaagctgtcatctt

SEQ ID NO: 351074 - DNA, 9199 bp, Homo sapiens
  misc_feature (8069)..(8069): n is a, c, g, or t
  misc_feature (8270)..(8270): n is a, c, g, or t
agccggtagggtttaagaacagtttcatttccggagccaccggaagcagcttgcaaatggcgtctccctcgctggagcggccagaaaaaggcgctggaaaaagtgaatttcgtaaccagaagccgaagccggagaaccaagatgaatcagaactccttacggttcctgatggttggaaggaaccagctttttccaaagaggacaatcccagaggacttttggaggagagcagtttcgcaactttgttcccaaaatacagggaagcttacttgaaagagtgttggccattggtgcagaaagccttaaatgaacatcatgttaatgcaaccctggacctgatcgaaggcagcatgactgtttgtactacaaagaagacttttgatccatatatcatcattagggccagagatctgataaaactgttagcaaggagtgtttcatttgaacaggtaaatctagaattacagagactttgctttgtttgcatcagtgttaacctataacatcccaccatcaagttttcatatttgtgcttaggtaacaatagcgtgggcctggaaaatgaatgtaattgtaaaaaatgttgataatgtcttctttttttttttttttttgcaaaaggcagtacgaattcttcaggatgatgttgcatgtgacatcattaaaataggttctttagtaaggaataaagagagatttgtaaaacgaagacaacggcttattggtcccaaaggatctacattgaaggcattggaactcttaactaattgttacattatggttcagggaaacacagtttcagccattggaccttttagtggcttaaaagaggttagaaaagtagtccttgatactatgaagaatattcatccaatttataacattaaaagcttaatgattaagagagagttggcaaaagattctgaattacgatcacaaagttgggagagatttttgccacagttcaaacacaaaaatgtgaataaacgcaaggaaccaaagaaaaaaactgttaagaaagaatatacgccattcccaccaccacaaccagaaagtcagatcgataaagaattggctagtggtgaatactttttgaaggcaaatcagaagaagcggcagaaaatggaagcaataaaggctaaacaagcagaagccatcagtaagagacaagaggaaagaaacaaagcatttattccacctaaggaaaaaccaattgtgaaacctaaggaagcttctactgaaactaaaattgatgtggccagcatcaaggaaaaggttaagaaagcaaagaataagaaactgggagctcttacagctgaagaaattgcacttaagatggaggcagatgaaaagaaaaagaagaaaaaaaagtaacatacccaaaactccttgactagaactatctccttttgtaaaggattttgagatatcaggcattagttgccttatttgtgagaaattttctgagggcttttttttttttttggtggtggtggttgttcatagaagagtgttctttataaattatattattattgtattttttgaaaaatttatactagaaagtggtatatatgtctttgtatacattacgaccattgtgattatccattaaatccagtgtctgatgctattggttagtaatgatgtcccagcatttgatgttccctctctaatgataacaagtaaatatttaggtttatcccttttgaaagtttggttttacttttaacagtccatgaacagaaaattaaggcctctaaaatcagatcccctagttactcctctgttctgaatctggggaagtagtaaaccaaaaagacagggaaaaccagatatttagagtcgaagcagcatgcaaaaaataataatgtttttaactaatgaaggctactggagttactaagaatcacctaaaaatgtgctactgtaccttgctcattttgcagatttagaagctgaaacatgggttaggttacttactaaaagtccacctgtggcaacctgcaaataatgcttatttatactaaagatgagtttatctgatagagttaggaaatttcttcttttgagtaagagtattgctataacatatatttttttctgaaatgttttaaaatagaagtacacctaattgttattggttaaaaaaaaagccatatgtgaatgaggttggtttttgggttttttctttcctgaattgtattagtccaaaagaactaaattagggtacttgtgctgtaccaaaatggtaattataacagacagtattagaattactgaattaacaatgagaaagagagaagtgtatctgttacgtggatatatgggccagcctggatatacaacagagtagtaacctgtgaaacaaacatagaatatcctcttagacattgttcctcataatgcactgacagaattcacatagctcttaatgaaacaatttaagattgatgtacgtacgtttgacttggtctcgctgtcggttaactgtaaagttagggggaagaaagaaaaaaaattaaaagggtagacacagttgagagttttattttaaaaagctaagtcttataattatgaccattaacttgctttggctttattgcagtgactttccaagtttaattattcaaaactttttgaactgactgaattaacttggtatttttaagttgactttttacataaactttataaaccttttataaaaaggaaactataccattactataaatggaaaatcattttacacatcatacctagcaggtaataaaatttaaaaaataaaaattaaatattagaatgtgagaaatttattaaaatgtagttctaaaaataagtttcttcctgagaagaatgatactgtttatgatgaatccatagtgaaaagacagtgacctctctttcatccagtctagtatatcactaaatcatcattacgatgtttggctatcaagtcattaattactgtcctcctttcactgagctttattcaaattttgacaatcagagcactgggaagaaataaattccacaactgcctttagccttctggatactttcttttataaaatagaaaccttttccacaccagttctgcagcagtcgctattagatgctcgtggtagaacccatcaatcatctggtcctctgggtactggtgagcatccctggtcttcatacctgtgagtgggctttgtggtgaattactgtaaatatgctaccctcacttttcttggcagttatgtccatgaaatcaagagtgtgatgttctagttattttttcttatatatatttttaaatgttcaatattcaactattgaaacaaatgtacatctgtgaactagctaaaatcatcttatgtaccactaatatgcccagcacattttgtaaaacagtcctgatttggcctccaagggtatttattgaactaccagcagtatctaggagaccacgaaggaataccacgaaggaatttatgctccagtgcttgccataatttgtctgagaaggaatctgttaaataaaagcttttatcctctaacctttaccttcatcagaccttataaaaggtcaaatggtgattcttaagttttttagtcacaaatcttacttattcagtattagtgcgaagagtagaatactttcaagtaagcctaaacttacatgaaaacaaattacataaatctagctctgagaataggaaattagtgacaagatcaatctgtaagatgttgagcacttatctgaagtaaatgggtaatgagtttcacatcttataaatacaagttagcatgtgttttctcaagagtccaagggttttcattattggactacagctttaatcttctaaatgttattccccaagattaaagagcatctcaagttagatcaccaaagatcaaaagctaaaaccagaagtatttttgtcattgtggtggtggtagtgttactaattgcctagatttttaaagggaaacatttttttcactgggttgtttcgttgaaaaaaatagaagcagaaacttgcccaaagtcacagtggtcaaactggaaattgcaccaaaacttggcatactggttctgaaatccatagttttagcccttatgtatactggttaatttggaaggaagaaatatatacgttctgaagtgaagagtgagtgaaaggaagaattcagtgaatacattgataccttgatattatctgcattgtggctacatgttacttttcttcacaagagtgatataagtgaaataaagaatgattggactgggagaaaaatggctcagaaaactttgcaaaagtacgactgtatgtaaagataagtattcaacattaaatgggaaggaggagagcaagcagtttaatatatagaattttataattttaggcctgcaagggaccttataaaacatgagcaatggaacacttttttccaaactaaatttcgtgcagtggaacttggccgactctgtccttcctctattctaagcaccctactctagcccggctgctctgagttcagtttgttacaaatatggacacgaaagtaccacaggctttgcacagcttaattgaagtttccccttcacaccatggtaaaaaaacatactgggatggaagggcttgtgtctagaacaagaacaagaaataaactcttggtcacttactaatatttcaaaatcacaaagcagaattttgcttggatgtttagtaaaacatccttggaaatttaactgcttgcagcttctacacttcttcattaaatgctgtctggctaataaaaagtgccatgttgcagctttattttattttcattttttggagatagaccctcactgtgtcacccaggctggagtgcagtggtacaatctctgctcactgcaacctccacctcctgggctcaggtgattgtcctgcctcagcctcctgagtagctggggttacgggcgtccaccaccacacccagctagtttttgtatttttagtagagggggtttttgccatgttggccaggctgggcatggtggcatggtaatctcagctacttgggaggctgaggcaggaggatcgcctgaacccgtgagatggaggttgcagtgagctgagatcacaccactgcactctagcatgggtgacagagcaagactctgtctcaaaaaaaaaaaaaaaaaaaaaaaacgaaaacagaattctgtttgtttggatgacctgttatacttatttttgatcttgctgaaataagcaaatcttaggaatcttagtctacagtttctgacagttttttttgttgttgttgtttgaccaattagaactaaataaaaagaacgtgattttcacatttaaatttctcttaagtgtattcctagaacagtaagccattggtttaattgctacttgatgccagtttccttgaagatagccgttaagataaaacatggtttcattgttaattctgtagaaagttacatgttactattatgttattctattggtgtattgttccttttactcaccacagagattgtccaaacacttgtcattattggggcaggcactgcaggtggctcctctcttatatggccaagttgggtaattccctctgtaaagcagaagaaggatgtccattagaagtttttcggttttttaaaattgcaatttactatgaatccttaactaaatccagaagaatagtggagtgaagtacaaaggtccagagagttggtaatagaagtgaagacaggaaggcagaaatggaaggctgctaatatttgcatagttcattctatgtacctgtgtctatgcacctgttttaatctgcatcccatttaattgtgacagctctgagaggaagttattcttgttttacagatgagacaaaagatgtaagagatacctttaatcacaatttatacacttcagagtcagaggaaacctggatttaactccagggctgtgctccctctctttacctaccctctggcctatatgattactgccattcaaaaaactgtccatcttagaaaagctatggtgacccacattcaatattctcagttggtcagccctccataattttcactggataggagccatttggctggtgccttccaaaaaaataataaataatggtatgggggaatttctaaagtacaaattgttttcacatacaagatgtgatatgaataaatagctgctaattagtgagcactaccatgtgcttgtctttgttctaaacaaccttgaatgaaataatcttcacaaaaaccctatgaggaagttactgttgtctatttatacccattatatagctagaggctgagtcacagagtataagtaattgaccaaggtcacagactagaaagtgaaataatatccaagcattttatatccccataaatatcctcatagtagtaatggggagagggggcacatttatctcaatgaacctgccattgcactaattttttttggaactctgcttttggaaaaagttctaaacttttttgtgtaatcgtaccctttggcagtctggtgaggcctatgggctctttctcaacatagtttgttgttaaatgcataaaatacataggattataaaggaaaccaattaaattgaaatagttatcaaaatgtttaaaacaagatttgtgataaagtaatatgtgcttctctattaagatctaccgggggctattagtttcaatgcagtgatgaacacaaactatattttgagttctctgcagcaagtggaatgtggtatgaaaatatctgatatttacaaagatgatactgctaagtcagagtcacgtttattgctaatatgatggtggagtgttgtcttcattcataatgaaaggaaatgttatttttaatagaggttagtgaaaataaaaataaaactattttctaatcaaagtttatggtcctcctctccccagcactctacaattacctccaaagttgagaactctcaccttagacacacaactttataacgataccttatttccaaccccaaatctatgttcttatctcattttgctccaaattttaagttgcttcagaaatttaattagccctctgcttactctacaccatggaaaaaaggtaatatagtagaaattctgatagcaatttcaaaagatgtccaaaatagacattaatcattggaatgtctttcattgttaataagcacagtattaagtggtttaagttctagaatgattttaataaagtcatttatgatacttagctgtgcattccaaactgtaaaggaaaaggtaaaaaatgctacttaaaaataagctaaaaaccaagacagtcggtgaggtctgtggaaatggtagtattcatcttgggagaaacatgctactggaaaggcctggatttgtctagatgggagtcattaagactgtgggacctaaagtattcagcacaataaagcaacaggacatttcaatgttttccctggtagcctgagagagaagagggttggggttatgggacccaggggaagaccgaagacaaatctttaaagaaaaagataaatatgggtaagggtccctaaggcagtgacggcctaagcacactggtactatcttgactatcttgtggtcaaagttatttcctcttctgtgctataatcctctcctccactaatccactctgagtaaagatctgttacacaccatacccttgttcatggtgcccaggggaaatgaagaggagagtattacaggcaactggaagattaagcatcccagaccccattctgaggtatcagaaatattgaggaggatactggacttcctaagattatgtggaatgggggcctacaactttttgtgtataggaaaataatacctcagagggcagagggcaaagggaaatgaggacattcctaactggtctctctgttttaccttttatgctcctctaatccattttccatccagactgatgtccaaatttaaaggtctcatcgctcccctgcttaatatacttgaatgacttcttatgtaaactttgtcatgatctaaaagttcccgctagatctgcaantgccttcctccccccgtttcatctgtttagcagaccgagggcaccagtctctgtggtttaaacttgccaaacttttcttcacggaagttttgctgttcttttctccactagacagctgttccagaagttcttatgtctgattccttctcattcttcatgcctaagcttaaatataacacaagaagcccttccctgattatnctaaacaggggccttgcctattgatagtttctattacagtattatttatagttccttaattgccccataatgatgcagttattttacttgtatttttattatctgtttgccccataaatattactctcataaagacagagactgccctgttctcctttggagctcagtaaaacaaatatttgttgaataaatgaatatttgaagttagtctttatggaagcattataactttggttgtaagttttataatttaatattgtttataactctgaagataagtgagtctaaaccaggaaaatttacatttatactttaatgaataaaaatcatgaatacttacaaaacattcactattgccaagcattatatatacctagtattttacaaagccttctcttgtcactttcatagctactctaagtgatgggtcctgtaaccctgatctattggaggttaaactgagattcagagttaacttgtccagggtcacacagtaaattaattgtatcttaaccattaaaaatgtcatatgaggccgggtgtagtggctcatgcctataatcccagcactctgggaggctgaggcaggtggatcactttagcccaggagttggagatgagcctgggcaatatggcaaaactctgtctctacaaaaaaattaactgggcatggtggcatgtgcctgtagtctcaggtactaggaaggctgagttgggaggattgcttgagcctgggaggttaagcctgcagtgaaccgtaagcgagccactgtactccagcctgggtgacagagtgagagaccctgtctcaaaaaaaaaaaaaaaaagtcatgaaaagttaccactaactgaattatggctttgtctagttttttctgggttttctttattttccaactcttaagatattaagtcaaagctgtcatctt

SEQ ID NO: 351075 - DNA, 8968 bp, Homo sapiens
  misc_feature (7838)..(7838): n is a, c, g, or t
  misc_feature (8039)..(8039): n is a, c, g, or t
tcagcacccccgaacaacctccccctcaacataggctagtcgaggcctcgtgttaatcggccgagcggaagcagcttgcaaatggcgtctccctcgctggagcggccagaaaaaggcgctggaaaaagtgaatttcgtaaccagaagccgaagccggagaaccaagatgaatcagaactccttacggttcctgatggttggaaggaaccagctttttccaaagaggacaatcccagaggacttttggaggagagcagtttcgcaactttgttcccaaaatacagggaagcttacttgaaagagtgttggccattggtgcagaaagccttaaatgaacatcatgttaatgcaaccctggacctgatcgaaggcagcatgactgtttgtactacaaagaagacttttgatccatatatcatcattagggccagagatctgataaaactgttagcaaggagtgtttcatttgaacaggcagtacgaattcttcaggatgatgttgcatgtgacatcattaaaataggttctttagtaaggaataaagagagatttgtaaaacgaagacaacggcttattggtcccaaaggatctacattgaaggttagaaaagtagtccttgatactatgaagaatattcatccaatttataacattaaaagcttaatgattaagagagagttggcaaaagattctgaattacgatcacaaagttgggagagatttttgccacagttcaaacacaaaaatgtgaataaacgcaaggaaccaaagaaaaaaactgttaagaaagaatatacgccattcccaccaccacaaccagaaagtcagatcgataaagaattggctagtggtgaatactttttgaaggcaaatcagaagaagcggcagaaaatggaagcaataaaggctaaacaagcagaagccatcagtaagagacaagaggaaagaaacaaagcatttattccacctaaggaaaaaccaattgtgaaacctaaggaagcttctactgaaactaaaattgatgtggccagcatcaaggaaaaggttaagaaagcaaagaataagaaactgggagctcttacagctgaagaaattgcacttaagatggaggcagatgaaaagaaaaagaagaaaaaaaagtaacatacccaaaactccttgactagaactatctccttttgtaaaggattttgagatatcaggcattagttgccttatttgtgagaaattttctgagggcttttttttttttttggtggtggtggttgttcatagaagagtgttctttataaattatattattattgtattttttgaaaaatttatactagaaagtggtatatatgtctttgtatacattacgaccattgtgattatccattaaatccagtgtctgatgctattggttagtaatgatgtcccagcatttgatgttccctctctaatgataacaagtaaatatttaggtttatcccttttgaaagtttggttttacttttaacagtccatgaacagaaaattaaggcctctaaaatcagatcccctagttactcctctgttctgaatctggggaagtagtaaaccaaaaagacagggaaaaccagatatttagagtcgaagcagcatgcaaaaaataataatgtttttaactaatgaaggctactggagttactaagaatcacctaaaaatgtgctactgtaccttgctcattttgcagatttagaagctgaaacatgggttaggttacttactaaaagtccacctgtggcaacctgcaaataatgcttatttatactaaagatgagtttatctgatagagttaggaaatttcttcttttgagtaagagtattgctataacatatatttttttctgaaatgttttaaaatagaagtacacctaattgttattggttaaaaaaaaagccatatgtgaatgaggttggtttttgggttttttctttcctgaattgtattagtccaaaagaactaaattagggtacttgtgctgtaccaaaatggtaattataacagacagtattagaattactgaattaacaatgagaaagagagaagtgtatctgttacgtggatatatgggccagcctggatatacaacagagtagtaacctgtgaaacaaacatagaatatcctcttagacattgttcctcataatgcactgacagaattcacatagctcttaatgaaacaatttaagattgatgtacgtacgtttgacttggtctcgctgtcggttaactgtaaagttagggggaagaaagaaaaaaaattaaaagggtagacacagttgagagttttattttaaaaagctaagtcttataattatgaccattaacttgctttggctttattgcagtgactttccaagtttaattattcaaaactttttgaactgactgaattaacttggtatttttaagttgactttttacataaactttataaaccttttataaaaaggaaactataccattactataaatggaaaatcattttacacatcatacctagcaggtaataaaatttaaaaaataaaaattaaatattagaatgtgagaaatttattaaaatgtagttctaaaaataagtttcttcctgagaagaatgatactgtttatgatgaatccatagtgaaaagacagtgacctctctttcatccagtctagtatatcactaaatcatcattacgatgtttggctatcaagtcattaattactgtcctcctttcactgagctttattcaaattttgacaatcagagcactgggaagaaataaattccacaactgcctttagccttctggatactttcttttataaaatagaaaccttttccacaccagttctgcagcagtcgctattagatgctcgtggtagaacccatcaatcatctggtcctctgggtactggtgagcatccctggtcttcatacctgtgagtgggctttgtggtgaattactgtaaatatgctaccctcacttttcttggcagttatgtccatgaaatcaagagtgtgatgttctagttattttttcttatatatatttttaaatgttcaatattcaactattgaaacaaatgtacatctgtgaactagctaaaatcatcttatgtaccactaatatgcccagcacattttgtaaaacagtcctgatttggcctccaagggtatttattgaactaccagcagtatctaggagaccacgaaggaataccacgaaggaatttatgctccagtgcttgccataatttgtctgagaaggaatctgttaaataaaagcttttatcctctaacctttaccttcatcagaccttataaaaggtcaaatggtgattcttaagttttttagtcacaaatcttacttattcagtattagtgcgaagagtagaatactttcaagtaagcctaaacttacatgaaaacaaattacataaatctagctctgagaataggaaattagtgacaagatcaatctgtaagatgttgagcacttatctgaagtaaatgggtaatgagtttcacatcttataaatacaagttagcatgtgttttctcaagagtccaagggttttcattattggactacagctttaatcttctaaatgttattccccaagattaaagagcatctcaagttagatcaccaaagatcaaaagctaaaaccagaagtatttttgtcattgtggtggtggtagtgttactaattgcctagatttttaaagggaaacatttttttcactgggttgtttcgttgaaaaaaatagaagcagaaacttgcccaaagtcacagtggtcaaactggaaattgcaccaaaacttggcatactggttctgaaatccatagttttagcccttatgtatactggttaatttggaaggaagaaatatatacgttctgaagtgaagagtgagtgaaaggaagaattcagtgaatacattgataccttgatattatctgcattgtggctacatgttacttttcttcacaagagtgatataagtgaaataaagaatgattggactgggagaaaaatggctcagaaaactttgcaaaagtacgactgtatgtaaagataagtattcaacattaaatgggaaggaggagagcaagcagtttaatatatagaattttataattttaggcctgcaagggaccttataaaacatgagcaatggaacacttttttccaaactaaatttcgtgcagtggaacttggccgactctgtccttcctctattctaagcaccctactctagcccggctgctctgagttcagtttgttacaaatatggacacgaaagtaccacaggctttgcacagcttaattgaagtttccccttcacaccatggtaaaaaaacatactgggatggaagggcttgtgtctagaacaagaacaagaaataaactcttggtcacttactaatatttcaaaatcacaaagcagaattttgcttggatgtttagtaaaacatccttggaaatttaactgcttgcagcttctacacttcttcattaaatgctgtctggctaataaaaagtgccatgttgcagctttattttattttcattttttggagatagaccctcactgtgtcacccaggctggagtgcagtggtacaatctctgctcactgcaacctccacctcctgggctcaggtgattgtcctgcctcagcctcctgagtagctggggttacgggcgtccaccaccacacccagctagtttttgtatttttagtagagggggtttttgccatgttggccaggctgggcatggtggcatggtaatctcagctacttgggaggctgaggcaggaggatcgcctgaacccgtgagatggaggttgcagtgagctgagatcacaccactgcactctagcatgggtgacagagcaagactctgtctcaaaaaaaaaaaaaaaaaaaaaaaacgaaaacagaattctgtttgtttggatgacctgttatacttatttttgatcttgctgaaataagcaaatcttaggaatcttagtctacagtttctgacagttttttttgttgttgttgtttgaccaattagaactaaataaaaagaacgtgattttcacatttaaatttctcttaagtgtattcctagaacagtaagccattggtttaattgctacttgatgccagtttccttgaagatagccgttaagataaaacatggtttcattgttaattctgtagaaagttacatgttactattatgttattctattggtgtattgttccttttactcaccacagagattgtccaaacacttgtcattattggggcaggcactgcaggtggctcctctcttatatggccaagttgggtaattccctctgtaaagcagaagaaggatgtccattagaagtttttcggttttttaaaattgcaatttactatgaatccttaactaaatccagaagaatagtggagtgaagtacaaaggtccagagagttggtaatagaagtgaagacaggaaggcagaaatggaaggctgctaatatttgcatagttcattctatgtacctgtgtctatgcacctgttttaatctgcatcccatttaattgtgacagctctgagaggaagttattcttgttttacagatgagacaaaagatgtaagagatacctttaatcacaatttatacacttcagagtcagaggaaacctggatttaactccagggctgtgctccctctctttacctaccctctggcctatatgattactgccattcaaaaaactgtccatcttagaaaagctatggtgacccacattcaatattctcagttggtcagccctccataattttcactggataggagccatttggctggtgccttccaaaaaaataataaataatggtatgggggaatttctaaagtacaaattgttttcacatacaagatgtgatatgaataaatagctgctaattagtgagcactaccatgtgcttgtctttgttctaaacaaccttgaatgaaataatcttcacaaaaaccctatgaggaagttactgttgtctatttatacccattatatagctagaggctgagtcacagagtataagtaattgaccaaggtcacagactagaaagtgaaataatatccaagcattttatatccccataaatatcctcatagtagtaatggggagagggggcacatttatctcaatgaacctgccattgcactaattttttttggaactctgcttttggaaaaagttctaaacttttttgtgtaatcgtaccctttggcagtctggtgaggcctatgggctctttctcaacatagtttgttgttaaatgcataaaatacataggattataaaggaaaccaattaaattgaaatagttatcaaaatgtttaaaacaagatttgtgataaagtaatatgtgcttctctattaagatctaccgggggctattagtttcaatgcagtgatgaacacaaactatattttgagttctctgcagcaagtggaatgtggtatgaaaatatctgatatttacaaagatgatactgctaagtcagagtcacgtttattgctaatatgatggtggagtgttgtcttcattcataatgaaaggaaatgttatttttaatagaggttagtgaaaataaaaataaaactattttctaatcaaagtttatggtcctcctctccccagcactctacaattacctccaaagttgagaactctcaccttagacacacaactttataacgataccttatttccaaccccaaatctatgttcttatctcattttgctccaaattttaagttgcttcagaaatttaattagccctctgcttactctacaccatggaaaaaaggtaatatagtagaaattctgatagcaatttcaaaagatgtccaaaatagacattaatcattggaatgtctttcattgttaataagcacagtattaagtggtttaagttctagaatgattttaataaagtcatttatgatacttagctgtgcattccaaactgtaaaggaaaaggtaaaaaatgctacttaaaaataagctaaaaaccaagacagtcggtgaggtctgtggaaatggtagtattcatcttgggagaaacatgctactggaaaggcctggatttgtctagatgggagtcattaagactgtgggacctaaagtattcagcacaataaagcaacaggacatttcaatgttttccctggtagcctgagagagaagagggttggggttatgggacccaggggaagaccgaagacaaatctttaaagaaaaagataaatatgggtaagggtccctaaggcagtgacggcctaagcacactggtactatcttgactatcttgtggtcaaagttatttcctcttctgtgctataatcctctcctccactaatccactctgagtaaagatctgttacacaccatacccttgttcatggtgcccaggggaaatgaagaggagagtattacaggcaactggaagattaagcatcccagaccccattctgaggtatcagaaatattgaggaggatactggacttcctaagattatgtggaatgggggcctacaactttttgtgtataggaaaataatacctcagagggcagagggcaaagggaaatgaggacattcctaactggtctctctgttttaccttttatgctcctctaatccattttccatccagactgatgtccaaatttaaaggtctcatcgctcccctgcttaatatacttgaatgacttcttatgtaaactttgtcatgatctaaaagttcccgctagatctgcaantgccttcctccccccgtttcatctgtttagcagaccgagggcaccagtctctgtggtttaaacttgccaaacttttcttcacggaagttttgctgttcttttctccactagacagctgttccagaagttcttatgtctgattccttctcattcttcatgcctaagcttaaatataacacaagaagcccttccctgattatnctaaacaggggccttgcctattgatagtttctattacagtattatttatagttccttaattgccccataatgatgcagttattttacttgtatttttattatctgtttgccccataaatattactctcataaagacagagactgccctgttctcctttggagctcagtaaaacaaatatttgttgaataaatgaatatttgaagttagtctttatggaagcattataactttggttgtaagttttataatttaatattgtttataactctgaagataagtgagtctaaaccaggaaaatttacatttatactttaatgaataaaaatcatgaatacttacaaaacattcactattgccaagcattatatatacctagtattttacaaagccttctcttgtcactttcatagctactctaagtgatgggtcctgtaaccctgatctattggaggttaaactgagattcagagttaacttgtccagggtcacacagtaaattaattgtatcttaaccattaaaaatgtcatatgaggccgggtgtagtggctcatgcctataatcccagcactctgggaggctgaggcaggtggatcactttagcccaggagttggagatgagcctgggcaatatggcaaaactctgtctctacaaaaaaattaactgggcatggtggcatgtgcctgtagtctcaggtactaggaaggctgagttgggaggattgcttgagcctgggaggttaagcctgcagtgaaccgtaagcgagccactgtactccagcctgggtgacagagtgagagaccctgtctcaaaaaaaaaaaaaaaaagtcatgaaaagttaccactaactgaattatggctttgtctagttttttctgggttttctttattttccaactcttaagatattaagtcaaagctgtcatctt

SEQ ID NO: 351076 - DNA, 9136 bp, Homo sapiens
  misc_feature (8006)..(8006): n is a, c, g, or t
  misc_feature (8207)..(8207): n is a, c, g, or t
tcagcacccccgaacaacctccccctcaacataggctagtcgaggcctcgtgttaatcggccgagcggaagcagcttgcaaatggcgtctccctcgctggagcggccagaaaaaggcgctggaaaaagtgaatttcgtaaccagaagccgaagccggagaaccaagatgaatcagaactccttacggttcctgatggttggaaggaaccagctttttccaaagaggacaatcccagaggacttttggaggagagcagtttcgcaactttgttcccaaaatacagggaagcttacttgaaagagtgttggccattggtgcagaaagccttaaatgaacatcatgttaatgcaaccctggacctgatcgaaggcagcatgactgtttgtactacaaagaagacttttgatccatatatcatcattagggccagagatctgataaaactgttagcaaggagtgtttcatttgaacaggcagtacgaattcttcaggatgatgttgcatgtgacatcattaaaataggttctttagtaaggaataaagagagatttgtaaaacgaagacaacggcttattggtcccaaaggatctacattgaaggtattttttaattagtggaaaacttgagtctcttccttaatactttttcagagtaatgaattttaacttgatctcttgatacaggcattggaactcttaactaattgttacattatggttcagggaaacacagtttcagccattggaccttttagtggcttaaaagaggttagaaaagtagtccttgatactatgaagaatattcatccaatttataacattaaaagcttaatgattaagagagagttggcaaaagattctgaattacgatcacaaagttgggagagatttttgccacagttcaaacacaaaaatgtgaataaacgcaaggaaccaaagaaaaaaactgttaagaaagaatatacgccattcccaccaccacaaccagaaagtcagatcgataaagaattggctagtggtgaatactttttgaaggcaaatcagaagaagcggcagaaaatggaagcaataaaggctaaacaagcagaagccatcagtaagagacaagaggaaagaaacaaagcatttattccacctaaggaaaaaccaattgtgaaacctaaggaagcttctactgaaactaaaattgatgtggccagcatcaaggaaaaggttaagaaagcaaagaataagaaactgggagctcttacagctgaagaaattgcacttaagatggaggcagatgaaaagaaaaagaagaaaaaaaagtaacatacccaaaactccttgactagaactatctccttttgtaaaggattttgagatatcaggcattagttgccttatttgtgagaaattttctgagggcttttttttttttttggtggtggtggttgttcatagaagagtgttctttataaattatattattattgtattttttgaaaaatttatactagaaagtggtatatatgtctttgtatacattacgaccattgtgattatccattaaatccagtgtctgatgctattggttagtaatgatgtcccagcatttgatgttccctctctaatgataacaagtaaatatttaggtttatcccttttgaaagtttggttttacttttaacagtccatgaacagaaaattaaggcctctaaaatcagatcccctagttactcctctgttctgaatctggggaagtagtaaaccaaaaagacagggaaaaccagatatttagagtcgaagcagcatgcaaaaaataataatgtttttaactaatgaaggctactggagttactaagaatcacctaaaaatgtgctactgtaccttgctcattttgcagatttagaagctgaaacatgggttaggttacttactaaaagtccacctgtggcaacctgcaaataatgcttatttatactaaagatgagtttatctgatagagttaggaaatttcttcttttgagtaagagtattgctataacatatatttttttctgaaatgttttaaaatagaagtacacctaattgttattggttaaaaaaaaagccatatgtgaatgaggttggtttttgggttttttctttcctgaattgtattagtccaaaagaactaaattagggtacttgtgctgtaccaaaatggtaattataacagacagtattagaattactgaattaacaatgagaaagagagaagtgtatctgttacgtggatatatgggccagcctggatatacaacagagtagtaacctgtgaaacaaacatagaatatcctcttagacattgttcctcataatgcactgacagaattcacatagctcttaatgaaacaatttaagattgatgtacgtacgtttgacttggtctcgctgtcggttaactgtaaagttagggggaagaaagaaaaaaaattaaaagggtagacacagttgagagttttattttaaaaagctaagtcttataattatgaccattaacttgctttggctttattgcagtgactttccaagtttaattattcaaaactttttgaactgactgaattaacttggtatttttaagttgactttttacataaactttataaaccttttataaaaaggaaactataccattactataaatggaaaatcattttacacatcatacctagcaggtaataaaatttaaaaaataaaaattaaatattagaatgtgagaaatttattaaaatgtagttctaaaaataagtttcttcctgagaagaatgatactgtttatgatgaatccatagtgaaaagacagtgacctctctttcatccagtctagtatatcactaaatcatcattacgatgtttggctatcaagtcattaattactgtcctcctttcactgagctttattcaaattttgacaatcagagcactgggaagaaataaattccacaactgcctttagccttctggatactttcttttataaaatagaaaccttttccacaccagttctgcagcagtcgctattagatgctcgtggtagaacccatcaatcatctggtcctctgggtactggtgagcatccctggtcttcatacctgtgagtgggctttgtggtgaattactgtaaatatgctaccctcacttttcttggcagttatgtccatgaaatcaagagtgtgatgttctagttattttttcttatatatatttttaaatgttcaatattcaactattgaaacaaatgtacatctgtgaactagctaaaatcatcttatgtaccactaatatgcccagcacattttgtaaaacagtcctgatttggcctccaagggtatttattgaactaccagcagtatctaggagaccacgaaggaataccacgaaggaatttatgctccagtgcttgccataatttgtctgagaaggaatctgttaaataaaagcttttatcctctaacctttaccttcatcagaccttataaaaggtcaaatggtgattcttaagttttttagtcacaaatcttacttattcagtattagtgcgaagagtagaatactttcaagtaagcctaaacttacatgaaaacaaattacataaatctagctctgagaataggaaattagtgacaagatcaatctgtaagatgttgagcacttatctgaagtaaatgggtaatgagtttcacatcttataaatacaagttagcatgtgttttctcaagagtccaagggttttcattattggactacagctttaatcttctaaatgttattccccaagattaaagagcatctcaagttagatcaccaaagatcaaaagctaaaaccagaagtatttttgtcattgtggtggtggtagtgttactaattgcctagatttttaaagggaaacatttttttcactgggttgtttcgttgaaaaaaatagaagcagaaacttgcccaaagtcacagtggtcaaactggaaattgcaccaaaacttggcatactggttctgaaatccatagttttagcccttatgtatactggttaatttggaaggaagaaatatatacgttctgaagtgaagagtgagtgaaaggaagaattcagtgaatacattgataccttgatattatctgcattgtggctacatgttacttttcttcacaagagtgatataagtgaaataaagaatgattggactgggagaaaaatggctcagaaaactttgcaaaagtacgactgtatgtaaagataagtattcaacattaaatgggaaggaggagagcaagcagtttaatatatagaattttataattttaggcctgcaagggaccttataaaacatgagcaatggaacacttttttccaaactaaatttcgtgcagtggaacttggccgactctgtccttcctctattctaagcaccctactctagcccggctgctctgagttcagtttgttacaaatatggacacgaaagtaccacaggctttgcacagcttaattgaagtttccccttcacaccatggtaaaaaaacatactgggatggaagggcttgtgtctagaacaagaacaagaaataaactcttggtcacttactaatatttcaaaatcacaaagcagaattttgcttggatgtttagtaaaacatccttggaaatttaactgcttgcagcttctacacttcttcattaaatgctgtctggctaataaaaagtgccatgttgcagctttattttattttcattttttggagatagaccctcactgtgtcacccaggctggagtgcagtggtacaatctctgctcactgcaacctccacctcctgggctcaggtgattgtcctgcctcagcctcctgagtagctggggttacgggcgtccaccaccacacccagctagtttttgtatttttagtagagggggtttttgccatgttggccaggctgggcatggtggcatggtaatctcagctacttgggaggctgaggcaggaggatcgcctgaacccgtgagatggaggttgcagtgagctgagatcacaccactgcactctagcatgggtgacagagcaagactctgtctcaaaaaaaaaaaaaaaaaaaaaaaacgaaaacagaattctgtttgtttggatgacctgttatacttatttttgatcttgctgaaataagcaaatcttaggaatcttagtctacagtttctgacagttttttttgttgttgttgtttgaccaattagaactaaataaaaagaacgtgattttcacatttaaatttctcttaagtgtattcctagaacagtaagccattggtttaattgctacttgatgccagtttccttgaagatagccgttaagataaaacatggtttcattgttaattctgtagaaagttacatgttactattatgttattctattggtgtattgttccttttactcaccacagagattgtccaaacacttgtcattattggggcaggcactgcaggtggctcctctcttatatggccaagttgggtaattccctctgtaaagcagaagaaggatgtccattagaagtttttcggttttttaaaattgcaatttactatgaatccttaactaaatccagaagaatagtggagtgaagtacaaaggtccagagagttggtaatagaagtgaagacaggaaggcagaaatggaaggctgctaatatttgcatagttcattctatgtacctgtgtctatgcacctgttttaatctgcatcccatttaattgtgacagctctgagaggaagttattcttgttttacagatgagacaaaagatgtaagagatacctttaatcacaatttatacacttcagagtcagaggaaacctggatttaactccagggctgtgctccctctctttacctaccctctggcctatatgattactgccattcaaaaaactgtccatcttagaaaagctatggtgacccacattcaatattctcagttggtcagccctccataattttcactggataggagccatttggctggtgccttccaaaaaaataataaataatggtatgggggaatttctaaagtacaaattgttttcacatacaagatgtgatatgaataaatagctgctaattagtgagcactaccatgtgcttgtctttgttctaaacaaccttgaatgaaataatcttcacaaaaaccctatgaggaagttactgttgtctatttatacccattatatagctagaggctgagtcacagagtataagtaattgaccaaggtcacagactagaaagtgaaataatatccaagcattttatatccccataaatatcctcatagtagtaatggggagagggggcacatttatctcaatgaacctgccattgcactaattttttttggaactctgcttttggaaaaagttctaaacttttttgtgtaatcgtaccctttggcagtctggtgaggcctatgggctctttctcaacatagtttgttgttaaatgcataaaatacataggattataaaggaaaccaattaaattgaaatagttatcaaaatgtttaaaacaagatttgtgataaagtaatatgtgcttctctattaagatctaccgggggctattagtttcaatgcagtgatgaacacaaactatattttgagttctctgcagcaagtggaatgtggtatgaaaatatctgatatttacaaagatgatactgctaagtcagagtcacgtttattgctaatatgatggtggagtgttgtcttcattcataatgaaaggaaatgttatttttaatagaggttagtgaaaataaaaataaaactattttctaatcaaagtttatggtcctcctctccccagcactctacaattacctccaaagttgagaactctcaccttagacacacaactttataacgataccttatttccaaccccaaatctatgttcttatctcattttgctccaaattttaagttgcttcagaaatttaattagccctctgcttactctacaccatggaaaaaaggtaatatagtagaaattctgatagcaatttcaaaagatgtccaaaatagacattaatcattggaatgtctttcattgttaataagcacagtattaagtggtttaagttctagaatgattttaataaagtcatttatgatacttagctgtgcattccaaactgtaaaggaaaaggtaaaaaatgctacttaaaaataagctaaaaaccaagacagtcggtgaggtctgtggaaatggtagtattcatcttgggagaaacatgctactggaaaggcctggatttgtctagatgggagtcattaagactgtgggacctaaagtattcagcacaataaagcaacaggacatttcaatgttttccctggtagcctgagagagaagagggttggggttatgggacccaggggaagaccgaagacaaatctttaaagaaaaagataaatatgggtaagggtccctaaggcagtgacggcctaagcacactggtactatcttgactatcttgtggtcaaagttatttcctcttctgtgctataatcctctcctccactaatccactctgagtaaagatctgttacacaccatacccttgttcatggtgcccaggggaaatgaagaggagagtattacaggcaactggaagattaagcatcccagaccccattctgaggtatcagaaatattgaggaggatactggacttcctaagattatgtggaatgggggcctacaactttttgtgtataggaaaataatacctcagagggcagagggcaaagggaaatgaggacattcctaactggtctctctgttttaccttttatgctcctctaatccattttccatccagactgatgtccaaatttaaaggtctcatcgctcccctgcttaatatacttgaatgacttcttatgtaaactttgtcatgatctaaaagttcccgctagatctgcaantgccttcctccccccgtttcatctgtttagcagaccgagggcaccagtctctgtggtttaaacttgccaaacttttcttcacggaagttttgctgttcttttctccactagacagctgttccagaagttcttatgtctgattccttctcattcttcatgcctaagcttaaatataacacaagaagcccttccctgattatnctaaacaggggccttgcctattgatagtttctattacagtattatttatagttccttaattgccccataatgatgcagttattttacttgtatttttattatctgtttgccccataaatattactctcataaagacagagactgccctgttctcctttggagctcagtaaaacaaatatttgttgaataaatgaatatttgaagttagtctttatggaagcattataactttggttgtaagttttataatttaatattgtttataactctgaagataagtgagtctaaaccaggaaaatttacatttatactttaatgaataaaaatcatgaatacttacaaaacattcactattgccaagcattatatatacctagtattttacaaagccttctcttgtcactttcatagctactctaagtgatgggtcctgtaaccctgatctattggaggttaaactgagattcagagttaacttgtccagggtcacacagtaaattaattgtatcttaaccattaaaaatgtcatatgaggccgggtgtagtggctcatgcctataatcccagcactctgggaggctgaggcaggtggatcactttagcccaggagttggagatgagcctgggcaatatggcaaaactctgtctctacaaaaaaattaactgggcatggtggcatgtgcctgtagtctcaggtactaggaaggctgagttgggaggattgcttgagcctgggaggttaagcctgcagtgaaccgtaagcgagccactgtactccagcctgggtgacagagtgagagaccctgtctcaaaaaaaaaaaaaaaaagtcatgaaaagttaccactaactgaattatggctttgtctagttttttctgggttttctttattttccaactcttaagatattaagtcaaagctgtcatctt

SEQ ID NO: 351077 - DNA, 8568 bp, Homo sapiens
  misc_feature (7438)..(7438): n is a, c, g, or t
  misc_feature (7639)..(7639): n is a, c, g, or t
gaaactgtattgtattcaagggagattgactgcctttatgaaagatggagaagccactcagagcagttgaaggaactacttaattatttaattacattatttaatttggtacccattacctgatttttgcagtattaatcctcttctccatagctcattaaaatccttgtgactaattcatttttctttgcaaatttcaggttagaaaagtagtccttgatactatgaagaatattcatccaatttataacattaaaagcttaatgattaagagagagttggcaaaagattctgaattacgatcacaaagttgggagagatttttgccacagttcaaacacaaaaatgtgaataaacgcaaggaaccaaagaaaaaaactgttaagaaagaatatacgccattcccaccaccacaaccagaaagtcagatcgataaagaattggctagtggtgaatactttttgaaggcaaatcagaagaagcggcagaaaatggaagcaataaaggctaaacaagcagaagccatcagtaagagacaagaggaaagaaacaaagcatttattccacctaaggaaaaaccaattgtgaaacctaaggaagcttctactgaaactaaaattgatgtggccagcatcaaggaaaaggttaagaaagcaaagaataagaaactgggagctcttacagctgaagaaattgcacttaagatggaggcagatgaaaagaaaaagaagaaaaaaaagtaacatacccaaaactccttgactagaactatctccttttgtaaaggattttgagatatcaggcattagttgccttatttgtgagaaattttctgagggcttttttttttttttggtggtggtggttgttcatagaagagtgttctttataaattatattattattgtattttttgaaaaatttatactagaaagtggtatatatgtctttgtatacattacgaccattgtgattatccattaaatccagtgtctgatgctattggttagtaatgatgtcccagcatttgatgttccctctctaatgataacaagtaaatatttaggtttatcccttttgaaagtttggttttacttttaacagtccatgaacagaaaattaaggcctctaaaatcagatcccctagttactcctctgttctgaatctggggaagtagtaaaccaaaaagacagggaaaaccagatatttagagtcgaagcagcatgcaaaaaataataatgtttttaactaatgaaggctactggagttactaagaatcacctaaaaatgtgctactgtaccttgctcattttgcagatttagaagctgaaacatgggttaggttacttactaaaagtccacctgtggcaacctgcaaataatgcttatttatactaaagatgagtttatctgatagagttaggaaatttcttcttttgagtaagagtattgctataacatatatttttttctgaaatgttttaaaatagaagtacacctaattgttattggttaaaaaaaaagccatatgtgaatgaggttggtttttgggttttttctttcctgaattgtattagtccaaaagaactaaattagggtacttgtgctgtaccaaaatggtaattataacagacagtattagaattactgaattaacaatgagaaagagagaagtgtatctgttacgtggatatatgggccagcctggatatacaacagagtagtaacctgtgaaacaaacatagaatatcctcttagacattgttcctcataatgcactgacagaattcacatagctcttaatgaaacaatttaagattgatgtacgtacgtttgacttggtctcgctgtcggttaactgtaaagttagggggaagaaagaaaaaaaattaaaagggtagacacagttgagagttttattttaaaaagctaagtcttataattatgaccattaacttgctttggctttattgcagtgactttccaagtttaattattcaaaactttttgaactgactgaattaacttggtatttttaagttgactttttacataaactttataaaccttttataaaaaggaaactataccattactataaatggaaaatcattttacacatcatacctagcaggtaataaaatttaaaaaataaaaattaaatattagaatgtgagaaatttattaaaatgtagttctaaaaataagtttcttcctgagaagaatgatactgtttatgatgaatccatagtgaaaagacagtgacctctctttcatccagtctagtatatcactaaatcatcattacgatgtttggctatcaagtcattaattactgtcctcctttcactgagctttattcaaattttgacaatcagagcactgggaagaaataaattccacaactgcctttagccttctggatactttcttttataaaatagaaaccttttccacaccagttctgcagcagtcgctattagatgctcgtggtagaacccatcaatcatctggtcctctgggtactggtgagcatccctggtcttcatacctgtgagtgggctttgtggtgaattactgtaaatatgctaccctcacttttcttggcagttatgtccatgaaatcaagagtgtgatgttctagttattttttcttatatatatttttaaatgttcaatattcaactattgaaacaaatgtacatctgtgaactagctaaaatcatcttatgtaccactaatatgcccagcacattttgtaaaacagtcctgatttggcctccaagggtatttattgaactaccagcagtatctaggagaccacgaaggaataccacgaaggaatttatgctccagtgcttgccataatttgtctgagaaggaatctgttaaataaaagcttttatcctctaacctttaccttcatcagaccttataaaaggtcaaatggtgattcttaagttttttagtcacaaatcttacttattcagtattagtgcgaagagtagaatactttcaagtaagcctaaacttacatgaaaacaaattacataaatctagctctgagaataggaaattagtgacaagatcaatctgtaagatgttgagcacttatctgaagtaaatgggtaatgagtttcacatcttataaatacaagttagcatgtgttttctcaagagtccaagggttttcattattggactacagctttaatcttctaaatgttattccccaagattaaagagcatctcaagttagatcaccaaagatcaaaagctaaaaccagaagtatttttgtcattgtggtggtggtagtgttactaattgcctagatttttaaagggaaacatttttttcactgggttgtttcgttgaaaaaaatagaagcagaaacttgcccaaagtcacagtggtcaaactggaaattgcaccaaaacttggcatactggttctgaaatccatagttttagcccttatgtatactggttaatttggaaggaagaaatatatacgttctgaagtgaagagtgagtgaaaggaagaattcagtgaatacattgataccttgatattatctgcattgtggctacatgttacttttcttcacaagagtgatataagtgaaataaagaatgattggactgggagaaaaatggctcagaaaactttgcaaaagtacgactgtatgtaaagataagtattcaacattaaatgggaaggaggagagcaagcagtttaatatatagaattttataattttaggcctgcaagggaccttataaaacatgagcaatggaacacttttttccaaactaaatttcgtgcagtggaacttggccgactctgtccttcctctattctaagcaccctactctagcccggctgctctgagttcagtttgttacaaatatggacacgaaagtaccacaggctttgcacagcttaattgaagtttccccttcacaccatggtaaaaaaacatactgggatggaagggcttgtgtctagaacaagaacaagaaataaactcttggtcacttactaatatttcaaaatcacaaagcagaattttgcttggatgtttagtaaaacatccttggaaatttaactgcttgcagcttctacacttcttcattaaatgctgtctggctaataaaaagtgccatgttgcagctttattttattttcattttttggagatagaccctcactgtgtcacccaggctggagtgcagtggtacaatctctgctcactgcaacctccacctcctgggctcaggtgattgtcctgcctcagcctcctgagtagctggggttacgggcgtccaccaccacacccagctagtttttgtatttttagtagagggggtttttgccatgttggccaggctgggcatggtggcatggtaatctcagctacttgggaggctgaggcaggaggatcgcctgaacccgtgagatggaggttgcagtgagctgagatcacaccactgcactctagcatgggtgacagagcaagactctgtctcaaaaaaaaaaaaaaaaaaaaaaaacgaaaacagaattctgtttgtttggatgacctgttatacttatttttgatcttgctgaaataagcaaatcttaggaatcttagtctacagtttctgacagttttttttgttgttgttgtttgaccaattagaactaaataaaaagaacgtgattttcacatttaaatttctcttaagtgtattcctagaacagtaagccattggtttaattgctacttgatgccagtttccttgaagatagccgttaagataaaacatggtttcattgttaattctgtagaaagttacatgttactattatgttattctattggtgtattgttccttttactcaccacagagattgtccaaacacttgtcattattggggcaggcactgcaggtggctcctctcttatatggccaagttgggtaattccctctgtaaagcagaagaaggatgtccattagaagtttttcggttttttaaaattgcaatttactatgaatccttaactaaatccagaagaatagtggagtgaagtacaaaggtccagagagttggtaatagaagtgaagacaggaaggcagaaatggaaggctgctaatatttgcatagttcattctatgtacctgtgtctatgcacctgttttaatctgcatcccatttaattgtgacagctctgagaggaagttattcttgttttacagatgagacaaaagatgtaagagatacctttaatcacaatttatacacttcagagtcagaggaaacctggatttaactccagggctgtgctccctctctttacctaccctctggcctatatgattactgccattcaaaaaactgtccatcttagaaaagctatggtgacccacattcaatattctcagttggtcagccctccataattttcactggataggagccatttggctggtgccttccaaaaaaataataaataatggtatgggggaatttctaaagtacaaattgttttcacatacaagatgtgatatgaataaatagctgctaattagtgagcactaccatgtgcttgtctttgttctaaacaaccttgaatgaaataatcttcacaaaaaccctatgaggaagttactgttgtctatttatacccattatatagctagaggctgagtcacagagtataagtaattgaccaaggtcacagactagaaagtgaaataatatccaagcattttatatccccataaatatcctcatagtagtaatggggagagggggcacatttatctcaatgaacctgccattgcactaattttttttggaactctgcttttggaaaaagttctaaacttttttgtgtaatcgtaccctttggcagtctggtgaggcctatgggctctttctcaacatagtttgttgttaaatgcataaaatacataggattataaaggaaaccaattaaattgaaatagttatcaaaatgtttaaaacaagatttgtgataaagtaatatgtgcttctctattaagatctaccgggggctattagtttcaatgcagtgatgaacacaaactatattttgagttctctgcagcaagtggaatgtggtatgaaaatatctgatatttacaaagatgatactgctaagtcagagtcacgtttattgctaatatgatggtggagtgttgtcttcattcataatgaaaggaaatgttatttttaatagaggttagtgaaaataaaaataaaactattttctaatcaaagtttatggtcctcctctccccagcactctacaattacctccaaagttgagaactctcaccttagacacacaactttataacgataccttatttccaaccccaaatctatgttcttatctcattttgctccaaattttaagttgcttcagaaatttaattagccctctgcttactctacaccatggaaaaaaggtaatatagtagaaattctgatagcaatttcaaaagatgtccaaaatagacattaatcattggaatgtctttcattgttaataagcacagtattaagtggtttaagttctagaatgattttaataaagtcatttatgatacttagctgtgcattccaaactgtaaaggaaaaggtaaaaaatgctacttaaaaataagctaaaaaccaagacagtcggtgaggtctgtggaaatggtagtattcatcttgggagaaacatgctactggaaaggcctggatttgtctagatgggagtcattaagactgtgggacctaaagtattcagcacaataaagcaacaggacatttcaatgttttccctggtagcctgagagagaagagggttggggttatgggacccaggggaagaccgaagacaaatctttaaagaaaaagataaatatgggtaagggtccctaaggcagtgacggcctaagcacactggtactatcttgactatcttgtggtcaaagttatttcctcttctgtgctataatcctctcctccactaatccactctgagtaaagatctgttacacaccatacccttgttcatggtgcccaggggaaatgaagaggagagtattacaggcaactggaagattaagcatcccagaccccattctgaggtatcagaaatattgaggaggatactggacttcctaagattatgtggaatgggggcctacaactttttgtgtataggaaaataatacctcagagggcagagggcaaagggaaatgaggacattcctaactggtctctctgttttaccttttatgctcctctaatccattttccatccagactgatgtccaaatttaaaggtctcatcgctcccctgcttaatatacttgaatgacttcttatgtaaactttgtcatgatctaaaagttcccgctagatctgcaantgccttcctccccccgtttcatctgtttagcagaccgagggcaccagtctctgtggtttaaacttgccaaacttttcttcacggaagttttgctgttcttttctccactagacagctgttccagaagttcttatgtctgattccttctcattcttcatgcctaagcttaaatataacacaagaagcccttccctgattatnctaaacaggggccttgcctattgatagtttctattacagtattatttatagttccttaattgccccataatgatgcagttattttacttgtatttttattatctgtttgccccataaatattactctcataaagacagagactgccctgttctcctttggagctcagtaaaacaaatatttgttgaataaatgaatatttgaagttagtctttatggaagcattataactttggttgtaagttttataatttaatattgtttataactctgaagataagtgagtctaaaccaggaaaatttacatttatactttaatgaataaaaatcatgaatacttacaaaacattcactattgccaagcattatatatacctagtattttacaaagccttctcttgtcactttcatagctactctaagtgatgggtcctgtaaccctgatctattggaggttaaactgagattcagagttaacttgtccagggtcacacagtaaattaattgtatcttaaccattaaaaatgtcatatgaggccgggtgtagtggctcatgcctataatcccagcactctgggaggctgaggcaggtggatcactttagcccaggagttggagatgagcctgggcaatatggcaaaactctgtctctacaaaaaaattaactgggcatggtggcatgtgcctgtagtctcaggtactaggaaggctgagttgggaggattgcttgagcctgggaggttaagcctgcagtgaaccgtaagcgagccactgtactccagcctgggtgacagagtgagagaccctgtctcaaaaaaaaaaaaaaaaagtcatgaaaagttaccactaactgaattatggctttgtctagttttttctgggttttctttattttccaactcttaagatattaagtcaaagctgtcatctt

SEQ ID NO: 351078 - DNA, 8290 bp, Homo sapiens
  misc_feature (7160)..(7160): n is a, c, g, or t
  misc_feature (7361)..(7361): n is a, c, g, or t
tctgaagtaggatttaaggaaatagtcttaatatagttgaatccagtaattggttcaattatgccatttatgccatttttatgtatacttgtactaatatataaagtattttatgatttgttttatcttaatctgaagaaatttctaactgctttaggcaagtgtttttatattttatactgtgatcacctttcaattattcaattataagaatactctgaagttaactgccttaaacatatattctttgttaaacatatattctttgttttacttggtaaaatctaaagtattacatgtgttgtgcttttaatttgtctagcttctactgaaactaaaattgatgtggccagcatcaaggaaaaggttaagaaagcaaagaataagaaactgggagctcttacagctgaagaaattgcacttaagatggaggcagatgaaaagaaaaagaagaaaaaaaagtaacatacccaaaactccttgactagaactatctccttttgtaaaggattttgagatatcaggcattagttgccttatttgtgagaaattttctgagggcttttttttttttttggtggtggtggttgttcatagaagagtgttctttataaattatattattattgtattttttgaaaaatttatactagaaagtggtatatatgtctttgtatacattacgaccattgtgattatccattaaatccagtgtctgatgctattggttagtaatgatgtcccagcatttgatgttccctctctaatgataacaagtaaatatttaggtttatcccttttgaaagtttggttttacttttaacagtccatgaacagaaaattaaggcctctaaaatcagatcccctagttactcctctgttctgaatctggggaagtagtaaaccaaaaagacagggaaaaccagatatttagagtcgaagcagcatgcaaaaaataataatgtttttaactaatgaaggctactggagttactaagaatcacctaaaaatgtgctactgtaccttgctcattttgcagatttagaagctgaaacatgggttaggttacttactaaaagtccacctgtggcaacctgcaaataatgcttatttatactaaagatgagtttatctgatagagttaggaaatttcttcttttgagtaagagtattgctataacatatatttttttctgaaatgttttaaaatagaagtacacctaattgttattggttaaaaaaaaagccatatgtgaatgaggttggtttttgggttttttctttcctgaattgtattagtccaaaagaactaaattagggtacttgtgctgtaccaaaatggtaattataacagacagtattagaattactgaattaacaatgagaaagagagaagtgtatctgttacgtggatatatgggccagcctggatatacaacagagtagtaacctgtgaaacaaacatagaatatcctcttagacattgttcctcataatgcactgacagaattcacatagctcttaatgaaacaatttaagattgatgtacgtacgtttgacttggtctcgctgtcggttaactgtaaagttagggggaagaaagaaaaaaaattaaaagggtagacacagttgagagttttattttaaaaagctaagtcttataattatgaccattaacttgctttggctttattgcagtgactttccaagtttaattattcaaaactttttgaactgactgaattaacttggtatttttaagttgactttttacataaactttataaaccttttataaaaaggaaactataccattactataaatggaaaatcattttacacatcatacctagcaggtaataaaatttaaaaaataaaaattaaatattagaatgtgagaaatttattaaaatgtagttctaaaaataagtttcttcctgagaagaatgatactgtttatgatgaatccatagtgaaaagacagtgacctctctttcatccagtctagtatatcactaaatcatcattacgatgtttggctatcaagtcattaattactgtcctcctttcactgagctttattcaaattttgacaatcagagcactgggaagaaataaattccacaactgcctttagccttctggatactttcttttataaaatagaaaccttttccacaccagttctgcagcagtcgctattagatgctcgtggtagaacccatcaatcatctggtcctctgggtactggtgagcatccctggtcttcatacctgtgagtgggctttgtggtgaattactgtaaatatgctaccctcacttttcttggcagttatgtccatgaaatcaagagtgtgatgttctagttattttttcttatatatatttttaaatgttcaatattcaactattgaaacaaatgtacatctgtgaactagctaaaatcatcttatgtaccactaatatgcccagcacattttgtaaaacagtcctgatttggcctccaagggtatttattgaactaccagcagtatctaggagaccacgaaggaataccacgaaggaatttatgctccagtgcttgccataatttgtctgagaaggaatctgttaaataaaagcttttatcctctaacctttaccttcatcagaccttataaaaggtcaaatggtgattcttaagttttttagtcacaaatcttacttattcagtattagtgcgaagagtagaatactttcaagtaagcctaaacttacatgaaaacaaattacataaatctagctctgagaataggaaattagtgacaagatcaatctgtaagatgttgagcacttatctgaagtaaatgggtaatgagtttcacatcttataaatacaagttagcatgtgttttctcaagagtccaagggttttcattattggactacagctttaatcttctaaatgttattccccaagattaaagagcatctcaagttagatcaccaaagatcaaaagctaaaaccagaagtatttttgtcattgtggtggtggtagtgttactaattgcctagatttttaaagggaaacatttttttcactgggttgtttcgttgaaaaaaatagaagcagaaacttgcccaaagtcacagtggtcaaactggaaattgcaccaaaacttggcatactggttctgaaatccatagttttagcccttatgtatactggttaatttggaaggaagaaatatatacgttctgaagtgaagagtgagtgaaaggaagaattcagtgaatacattgataccttgatattatctgcattgtggctacatgttacttttcttcacaagagtgatataagtgaaataaagaatgattggactgggagaaaaatggctcagaaaactttgcaaaagtacgactgtatgtaaagataagtattcaacattaaatgggaaggaggagagcaagcagtttaatatatagaattttataattttaggcctgcaagggaccttataaaacatgagcaatggaacacttttttccaaactaaatttcgtgcagtggaacttggccgactctgtccttcctctattctaagcaccctactctagcccggctgctctgagttcagtttgttacaaatatggacacgaaagtaccacaggctttgcacagcttaattgaagtttccccttcacaccatggtaaaaaaacatactgggatggaagggcttgtgtctagaacaagaacaagaaataaactcttggtcacttactaatatttcaaaatcacaaagcagaattttgcttggatgtttagtaaaacatccttggaaatttaactgcttgcagcttctacacttcttcattaaatgctgtctggctaataaaaagtgccatgttgcagctttattttattttcattttttggagatagaccctcactgtgtcacccaggctggagtgcagtggtacaatctctgctcactgcaacctccacctcctgggctcaggtgattgtcctgcctcagcctcctgagtagctggggttacgggcgtccaccaccacacccagctagtttttgtatttttagtagagggggtttttgccatgttggccaggctgggcatggtggcatggtaatctcagctacttgggaggctgaggcaggaggatcgcctgaacccgtgagatggaggttgcagtgagctgagatcacaccactgcactctagcatgggtgacagagcaagactctgtctcaaaaaaaaaaaaaaaaaaaaaaaacgaaaacagaattctgtttgtttggatgacctgttatacttatttttgatcttgctgaaataagcaaatcttaggaatcttagtctacagtttctgacagttttttttgttgttgttgtttgaccaattagaactaaataaaaagaacgtgattttcacatttaaatttctcttaagtgtattcctagaacagtaagccattggtttaattgctacttgatgccagtttccttgaagatagccgttaagataaaacatggtttcattgttaattctgtagaaagttacatgttactattatgttattctattggtgtattgttccttttactcaccacagagattgtccaaacacttgtcattattggggcaggcactgcaggtggctcctctcttatatggccaagttgggtaattccctctgtaaagcagaagaaggatgtccattagaagtttttcggttttttaaaattgcaatttactatgaatccttaactaaatccagaagaatagtggagtgaagtacaaaggtccagagagttggtaatagaagtgaagacaggaaggcagaaatggaaggctgctaatatttgcatagttcattctatgtacctgtgtctatgcacctgttttaatctgcatcccatttaattgtgacagctctgagaggaagttattcttgttttacagatgagacaaaagatgtaagagatacctttaatcacaatttatacacttcagagtcagaggaaacctggatttaactccagggctgtgctccctctctttacctaccctctggcctatatgattactgccattcaaaaaactgtccatcttagaaaagctatggtgacccacattcaatattctcagttggtcagccctccataattttcactggataggagccatttggctggtgccttccaaaaaaataataaataatggtatgggggaatttctaaagtacaaattgttttcacatacaagatgtgatatgaataaatagctgctaattagtgagcactaccatgtgcttgtctttgttctaaacaaccttgaatgaaataatcttcacaaaaaccctatgaggaagttactgttgtctatttatacccattatatagctagaggctgagtcacagagtataagtaattgaccaaggtcacagactagaaagtgaaataatatccaagcattttatatccccataaatatcctcatagtagtaatggggagagggggcacatttatctcaatgaacctgccattgcactaattttttttggaactctgcttttggaaaaagttctaaacttttttgtgtaatcgtaccctttggcagtctggtgaggcctatgggctctttctcaacatagtttgttgttaaatgcataaaatacataggattataaaggaaaccaattaaattgaaatagttatcaaaatgtttaaaacaagatttgtgataaagtaatatgtgcttctctattaagatctaccgggggctattagtttcaatgcagtgatgaacacaaactatattttgagttctctgcagcaagtggaatgtggtatgaaaatatctgatatttacaaagatgatactgctaagtcagagtcacgtttattgctaatatgatggtggagtgttgtcttcattcataatgaaaggaaatgttatttttaatagaggttagtgaaaataaaaataaaactattttctaatcaaagtttatggtcctcctctccccagcactctacaattacctccaaagttgagaactctcaccttagacacacaactttataacgataccttatttccaaccccaaatctatgttcttatctcattttgctccaaattttaagttgcttcagaaatttaattagccctctgcttactctacaccatggaaaaaaggtaatatagtagaaattctgatagcaatttcaaaagatgtccaaaatagacattaatcattggaatgtctttcattgttaataagcacagtattaagtggtttaagttctagaatgattttaataaagtcatttatgatacttagctgtgcattccaaactgtaaaggaaaaggtaaaaaatgctacttaaaaataagctaaaaaccaagacagtcggtgaggtctgtggaaatggtagtattcatcttgggagaaacatgctactggaaaggcctggatttgtctagatgggagtcattaagactgtgggacctaaagtattcagcacaataaagcaacaggacatttcaatgttttccctggtagcctgagagagaagagggttggggttatgggacccaggggaagaccgaagacaaatctttaaagaaaaagataaatatgggtaagggtccctaaggcagtgacggcctaagcacactggtactatcttgactatcttgtggtcaaagttatttcctcttctgtgctataatcctctcctccactaatccactctgagtaaagatctgttacacaccatacccttgttcatggtgcccaggggaaatgaagaggagagtattacaggcaactggaagattaagcatcccagaccccattctgaggtatcagaaatattgaggaggatactggacttcctaagattatgtggaatgggggcctacaactttttgtgtataggaaaataatacctcagagggcagagggcaaagggaaatgaggacattcctaactggtctctctgttttaccttttatgctcctctaatccattttccatccagactgatgtccaaatttaaaggtctcatcgctcccctgcttaatatacttgaatgacttcttatgtaaactttgtcatgatctaaaagttcccgctagatctgcaantgccttcctccccccgtttcatctgtttagcagaccgagggcaccagtctctgtggtttaaacttgccaaacttttcttcacggaagttttgctgttcttttctccactagacagctgttccagaagttcttatgtctgattccttctcattcttcatgcctaagcttaaatataacacaagaagcccttccctgattatnctaaacaggggccttgcctattgatagtttctattacagtattatttatagttccttaattgccccataatgatgcagttattttacttgtatttttattatctgtttgccccataaatattactctcataaagacagagactgccctgttctcctttggagctcagtaaaacaaatatttgttgaataaatgaatatttgaagttagtctttatggaagcattataactttggttgtaagttttataatttaatattgtttataactctgaagataagtgagtctaaaccaggaaaatttacatttatactttaatgaataaaaatcatgaatacttacaaaacattcactattgccaagcattatatatacctagtattttacaaagccttctcttgtcactttcatagctactctaagtgatgggtcctgtaaccctgatctattggaggttaaactgagattcagagttaacttgtccagggtcacacagtaaattaattgtatcttaaccattaaaaatgtcatatgaggccgggtgtagtggctcatgcctataatcccagcactctgggaggctgaggcaggtggatcactttagcccaggagttggagatgagcctgggcaatatggcaaaactctgtctctacaaaaaaattaactgggcatggtggcatgtgcctgtagtctcaggtactaggaaggctgagttgggaggattgcttgagcctgggaggttaagcctgcagtgaaccgtaagcgagccactgtactccagcctgggtgacagagtgagagaccctgtctcaaaaaaaaaaaaaaaaagtcatgaaaagttaccactaactgaattatggctttgtctagttttttctgggttttctttattttccaactcttaagatattaagtcaaagctgtcatctt

SEQ ID NO: 351079 - DNA, 7966 bp, Homo sapiens
  misc_feature (6836)..(6836): n is a, c, g, or t
  misc_feature (7037)..(7037): n is a, c, g, or t
gtgatgtggtcagaggatcccgtcgtcagcatcaaggaaaaggttaagaaagcaaagaataagaaactgggagctcttacagctgaagaaattgcacttaagatggaggcagatgaaaagaaaaagaagaaaaaaaagtaacatacccaaaactccttgactagaactatctccttttgtaaaggattttgagatatcaggcattagttgccttatttgtgagaaattttctgagggcttttttttttttttggtggtggtggttgttcatagaagagtgttctttataaattatattattattgtattttttgaaaaatttatactagaaagtggtatatatgtctttgtatacattacgaccattgtgattatccattaaatccagtgtctgatgctattggttagtaatgatgtcccagcatttgatgttccctctctaatgataacaagtaaatatttaggtttatcccttttgaaagtttggttttacttttaacagtccatgaacagaaaattaaggcctctaaaatcagatcccctagttactcctctgttctgaatctggggaagtagtaaaccaaaaagacagggaaaaccagatatttagagtcgaagcagcatgcaaaaaataataatgtttttaactaatgaaggctactggagttactaagaatcacctaaaaatgtgctactgtaccttgctcattttgcagatttagaagctgaaacatgggttaggttacttactaaaagtccacctgtggcaacctgcaaataatgcttatttatactaaagatgagtttatctgatagagttaggaaatttcttcttttgagtaagagtattgctataacatatatttttttctgaaatgttttaaaatagaagtacacctaattgttattggttaaaaaaaaagccatatgtgaatgaggttggtttttgggttttttctttcctgaattgtattagtccaaaagaactaaattagggtacttgtgctgtaccaaaatggtaattataacagacagtattagaattactgaattaacaatgagaaagagagaagtgtatctgttacgtggatatatgggccagcctggatatacaacagagtagtaacctgtgaaacaaacatagaatatcctcttagacattgttcctcataatgcactgacagaattcacatagctcttaatgaaacaatttaagattgatgtacgtacgtttgacttggtctcgctgtcggttaactgtaaagttagggggaagaaagaaaaaaaattaaaagggtagacacagttgagagttttattttaaaaagctaagtcttataattatgaccattaacttgctttggctttattgcagtgactttccaagtttaattattcaaaactttttgaactgactgaattaacttggtatttttaagttgactttttacataaactttataaaccttttataaaaaggaaactataccattactataaatggaaaatcattttacacatcatacctagcaggtaataaaatttaaaaaataaaaattaaatattagaatgtgagaaatttattaaaatgtagttctaaaaataagtttcttcctgagaagaatgatactgtttatgatgaatccatagtgaaaagacagtgacctctctttcatccagtctagtatatcactaaatcatcattacgatgtttggctatcaagtcattaattactgtcctcctttcactgagctttattcaaattttgacaatcagagcactgggaagaaataaattccacaactgcctttagccttctggatactttcttttataaaatagaaaccttttccacaccagttctgcagcagtcgctattagatgctcgtggtagaacccatcaatcatctggtcctctgggtactggtgagcatccctggtcttcatacctgtgagtgggctttgtggtgaattactgtaaatatgctaccctcacttttcttggcagttatgtccatgaaatcaagagtgtgatgttctagttattttttcttatatatatttttaaatgttcaatattcaactattgaaacaaatgtacatctgtgaactagctaaaatcatcttatgtaccactaatatgcccagcacattttgtaaaacagtcctgatttggcctccaagggtatttattgaactaccagcagtatctaggagaccacgaaggaataccacgaaggaatttatgctccagtgcttgccataatttgtctgagaaggaatctgttaaataaaagcttttatcctctaacctttaccttcatcagaccttataaaaggtcaaatggtgattcttaagttttttagtcacaaatcttacttattcagtattagtgcgaagagtagaatactttcaagtaagcctaaacttacatgaaaacaaattacataaatctagctctgagaataggaaattagtgacaagatcaatctgtaagatgttgagcacttatctgaagtaaatgggtaatgagtttcacatcttataaatacaagttagcatgtgttttctcaagagtccaagggttttcattattggactacagctttaatcttctaaatgttattccccaagattaaagagcatctcaagttagatcaccaaagatcaaaagctaaaaccagaagtatttttgtcattgtggtggtggtagtgttactaattgcctagatttttaaagggaaacatttttttcactgggttgtttcgttgaaaaaaatagaagcagaaacttgcccaaagtcacagtggtcaaactggaaattgcaccaaaacttggcatactggttctgaaatccatagttttagcccttatgtatactggttaatttggaaggaagaaatatatacgttctgaagtgaagagtgagtgaaaggaagaattcagtgaatacattgataccttgatattatctgcattgtggctacatgttacttttcttcacaagagtgatataagtgaaataaagaatgattggactgggagaaaaatggctcagaaaactttgcaaaagtacgactgtatgtaaagataagtattcaacattaaatgggaaggaggagagcaagcagtttaatatatagaattttataattttaggcctgcaagggaccttataaaacatgagcaatggaacacttttttccaaactaaatttcgtgcagtggaacttggccgactctgtccttcctctattctaagcaccctactctagcccggctgctctgagttcagtttgttacaaatatggacacgaaagtaccacaggctttgcacagcttaattgaagtttccccttcacaccatggtaaaaaaacatactgggatggaagggcttgtgtctagaacaagaacaagaaataaactcttggtcacttactaatatttcaaaatcacaaagcagaattttgcttggatgtttagtaaaacatccttggaaatttaactgcttgcagcttctacacttcttcattaaatgctgtctggctaataaaaagtgccatgttgcagctttattttattttcattttttggagatagaccctcactgtgtcacccaggctggagtgcagtggtacaatctctgctcactgcaacctccacctcctgggctcaggtgattgtcctgcctcagcctcctgagtagctggggttacgggcgtccaccaccacacccagctagtttttgtatttttagtagagggggtttttgccatgttggccaggctgggcatggtggcatggtaatctcagctacttgggaggctgaggcaggaggatcgcctgaacccgtgagatggaggttgcagtgagctgagatcacaccactgcactctagcatgggtgacagagcaagactctgtctcaaaaaaaaaaaaaaaaaaaaaaaacgaaaacagaattctgtttgtttggatgacctgttatacttatttttgatcttgctgaaataagcaaatcttaggaatcttagtctacagtttctgacagttttttttgttgttgttgtttgaccaattagaactaaataaaaagaacgtgattttcacatttaaatttctcttaagtgtattcctagaacagtaagccattggtttaattgctacttgatgccagtttccttgaagatagccgttaagataaaacatggtttcattgttaattctgtagaaagttacatgttactattatgttattctattggtgtattgttccttttactcaccacagagattgtccaaacacttgtcattattggggcaggcactgcaggtggctcctctcttatatggccaagttgggtaattccctctgtaaagcagaagaaggatgtccattagaagtttttcggttttttaaaattgcaatttactatgaatccttaactaaatccagaagaatagtggagtgaagtacaaaggtccagagagttggtaatagaagtgaagacaggaaggcagaaatggaaggctgctaatatttgcatagttcattctatgtacctgtgtctatgcacctgttttaatctgcatcccatttaattgtgacagctctgagaggaagttattcttgttttacagatgagacaaaagatgtaagagatacctttaatcacaatttatacacttcagagtcagaggaaacctggatttaactccagggctgtgctccctctctttacctaccctctggcctatatgattactgccattcaaaaaactgtccatcttagaaaagctatggtgacccacattcaatattctcagttggtcagccctccataattttcactggataggagccatttggctggtgccttccaaaaaaataataaataatggtatgggggaatttctaaagtacaaattgttttcacatacaagatgtgatatgaataaatagctgctaattagtgagcactaccatgtgcttgtctttgttctaaacaaccttgaatgaaataatcttcacaaaaaccctatgaggaagttactgttgtctatttatacccattatatagctagaggctgagtcacagagtataagtaattgaccaaggtcacagactagaaagtgaaataatatccaagcattttatatccccataaatatcctcatagtagtaatggggagagggggcacatttatctcaatgaacctgccattgcactaattttttttggaactctgcttttggaaaaagttctaaacttttttgtgtaatcgtaccctttggcagtctggtgaggcctatgggctctttctcaacatagtttgttgttaaatgcataaaatacataggattataaaggaaaccaattaaattgaaatagttatcaaaatgtttaaaacaagatttgtgataaagtaatatgtgcttctctattaagatctaccgggggctattagtttcaatgcagtgatgaacacaaactatattttgagttctctgcagcaagtggaatgtggtatgaaaatatctgatatttacaaagatgatactgctaagtcagagtcacgtttattgctaatatgatggtggagtgttgtcttcattcataatgaaaggaaatgttatttttaatagaggttagtgaaaataaaaataaaactattttctaatcaaagtttatggtcctcctctccccagcactctacaattacctccaaagttgagaactctcaccttagacacacaactttataacgataccttatttccaaccccaaatctatgttcttatctcattttgctccaaattttaagttgcttcagaaatttaattagccctctgcttactctacaccatggaaaaaaggtaatatagtagaaattctgatagcaatttcaaaagatgtccaaaatagacattaatcattggaatgtctttcattgttaataagcacagtattaagtggtttaagttctagaatgattttaataaagtcatttatgatacttagctgtgcattccaaactgtaaaggaaaaggtaaaaaatgctacttaaaaataagctaaaaaccaagacagtcggtgaggtctgtggaaatggtagtattcatcttgggagaaacatgctactggaaaggcctggatttgtctagatgggagtcattaagactgtgggacctaaagtattcagcacaataaagcaacaggacatttcaatgttttccctggtagcctgagagagaagagggttggggttatgggacccaggggaagaccgaagacaaatctttaaagaaaaagataaatatgggtaagggtccctaaggcagtgacggcctaagcacactggtactatcttgactatcttgtggtcaaagttatttcctcttctgtgctataatcctctcctccactaatccactctgagtaaagatctgttacacaccatacccttgttcatggtgcccaggggaaatgaagaggagagtattacaggcaactggaagattaagcatcccagaccccattctgaggtatcagaaatattgaggaggatactggacttcctaagattatgtggaatgggggcctacaactttttgtgtataggaaaataatacctcagagggcagagggcaaagggaaatgaggacattcctaactggtctctctgttttaccttttatgctcctctaatccattttccatccagactgatgtccaaatttaaaggtctcatcgctcccctgcttaatatacttgaatgacttcttatgtaaactttgtcatgatctaaaagttcccgctagatctgcaantgccttcctccccccgtttcatctgtttagcagaccgagggcaccagtctctgtggtttaaacttgccaaacttttcttcacggaagttttgctgttcttttctccactagacagctgttccagaagttcttatgtctgattccttctcattcttcatgcctaagcttaaatataacacaagaagcccttccctgattatnctaaacaggggccttgcctattgatagtttctattacagtattatttatagttccttaattgccccataatgatgcagttattttacttgtatttttattatctgtttgccccataaatattactctcataaagacagagactgccctgttctcctttggagctcagtaaaacaaatatttgttgaataaatgaatatttgaagttagtctttatggaagcattataactttggttgtaagttttataatttaatattgtttataactctgaagataagtgagtctaaaccaggaaaatttacatttatactttaatgaataaaaatcatgaatacttacaaaacattcactattgccaagcattatatatacctagtattttacaaagccttctcttgtcactttcatagctactctaagtgatgggtcctgtaaccctgatctattggaggttaaactgagattcagagttaacttgtccagggtcacacagtaaattaattgtatcttaaccattaaaaatgtcatatgaggccgggtgtagtggctcatgcctataatcccagcactctgggaggctgaggcaggtggatcactttagcccaggagttggagatgagcctgggcaatatggcaaaactctgtctctacaaaaaaattaactgggcatggtggcatgtgcctgtagtctcaggtactaggaaggctgagttgggaggattgcttgagcctgggaggttaagcctgcagtgaaccgtaagcgagccactgtactccagcctgggtgacagagtgagagaccctgtctcaaaaaaaaaaaaaaaaagtcatgaaaagttaccactaactgaattatggctttgtctagttttttctgggttttctttattttccaactcttaagatattaagtcaaagctgtcatctt

SEQ ID NO: 351080 - DNA, 8183 bp, Homo sapiens
  misc_feature (7053)..(7053): n is a, c, g, or t
  misc_feature (7254)..(7254): n is a, c, g, or t
gtacccctcgtcccgcctccatatgggcccccgtgacctcctgtattgccgtgatgttgcatcctcctcttccccttatcctcgacacccctgaggctgggaccgaccatttctttgaccttcctaccacttctttccacccctcttctcttttctgaccccttttagggctagtgagattccgctttatgtttggagagcttaatggccatgacactgtcttgatgctggacgagtcgtcccgagcatcaaggaaaaggttaagaaagcaaagaataagaaactgggagctcttacagctgaagaaattgcacttaagatggaggcagatgaaaagaaaaagaagaaaaaaaagtaacatacccaaaactccttgactagaactatctccttttgtaaaggattttgagatatcaggcattagttgccttatttgtgagaaattttctgagggcttttttttttttttggtggtggtggttgttcatagaagagtgttctttataaattatattattattgtattttttgaaaaatttatactagaaagtggtatatatgtctttgtatacattacgaccattgtgattatccattaaatccagtgtctgatgctattggttagtaatgatgtcccagcatttgatgttccctctctaatgataacaagtaaatatttaggtttatcccttttgaaagtttggttttacttttaacagtccatgaacagaaaattaaggcctctaaaatcagatcccctagttactcctctgttctgaatctggggaagtagtaaaccaaaaagacagggaaaaccagatatttagagtcgaagcagcatgcaaaaaataataatgtttttaactaatgaaggctactggagttactaagaatcacctaaaaatgtgctactgtaccttgctcattttgcagatttagaagctgaaacatgggttaggttacttactaaaagtccacctgtggcaacctgcaaataatgcttatttatactaaagatgagtttatctgatagagttaggaaatttcttcttttgagtaagagtattgctataacatatatttttttctgaaatgttttaaaatagaagtacacctaattgttattggttaaaaaaaaagccatatgtgaatgaggttggtttttgggttttttctttcctgaattgtattagtccaaaagaactaaattagggtacttgtgctgtaccaaaatggtaattataacagacagtattagaattactgaattaacaatgagaaagagagaagtgtatctgttacgtggatatatgggccagcctggatatacaacagagtagtaacctgtgaaacaaacatagaatatcctcttagacattgttcctcataatgcactgacagaattcacatagctcttaatgaaacaatttaagattgatgtacgtacgtttgacttggtctcgctgtcggttaactgtaaagttagggggaagaaagaaaaaaaattaaaagggtagacacagttgagagttttattttaaaaagctaagtcttataattatgaccattaacttgctttggctttattgcagtgactttccaagtttaattattcaaaactttttgaactgactgaattaacttggtatttttaagttgactttttacataaactttataaaccttttataaaaaggaaactataccattactataaatggaaaatcattttacacatcatacctagcaggtaataaaatttaaaaaataaaaattaaatattagaatgtgagaaatttattaaaatgtagttctaaaaataagtttcttcctgagaagaatgatactgtttatgatgaatccatagtgaaaagacagtgacctctctttcatccagtctagtatatcactaaatcatcattacgatgtttggctatcaagtcattaattactgtcctcctttcactgagctttattcaaattttgacaatcagagcactgggaagaaataaattccacaactgcctttagccttctggatactttcttttataaaatagaaaccttttccacaccagttctgcagcagtcgctattagatgctcgtggtagaacccatcaatcatctggtcctctgggtactggtgagcatccctggtcttcatacctgtgagtgggctttgtggtgaattactgtaaatatgctaccctcacttttcttggcagttatgtccatgaaatcaagagtgtgatgttctagttattttttcttatatatatttttaaatgttcaatattcaactattgaaacaaatgtacatctgtgaactagctaaaatcatcttatgtaccactaatatgcccagcacattttgtaaaacagtcctgatttggcctccaagggtatttattgaactaccagcagtatctaggagaccacgaaggaataccacgaaggaatttatgctccagtgcttgccataatttgtctgagaaggaatctgttaaataaaagcttttatcctctaacctttaccttcatcagaccttataaaaggtcaaatggtgattcttaagttttttagtcacaaatcttacttattcagtattagtgcgaagagtagaatactttcaagtaagcctaaacttacatgaaaacaaattacataaatctagctctgagaataggaaattagtgacaagatcaatctgtaagatgttgagcacttatctgaagtaaatgggtaatgagtttcacatcttataaatacaagttagcatgtgttttctcaagagtccaagggttttcattattggactacagctttaatcttctaaatgttattccccaagattaaagagcatctcaagttagatcaccaaagatcaaaagctaaaaccagaagtatttttgtcattgtggtggtggtagtgttactaattgcctagatttttaaagggaaacatttttttcactgggttgtttcgttgaaaaaaatagaagcagaaacttgcccaaagtcacagtggtcaaactggaaattgcaccaaaacttggcatactggttctgaaatccatagttttagcccttatgtatactggttaatttggaaggaagaaatatatacgttctgaagtgaagagtgagtgaaaggaagaattcagtgaatacattgataccttgatattatctgcattgtggctacatgttacttttcttcacaagagtgatataagtgaaataaagaatgattggactgggagaaaaatggctcagaaaactttgcaaaagtacgactgtatgtaaagataagtattcaacattaaatgggaaggaggagagcaagcagtttaatatatagaattttataattttaggcctgcaagggaccttataaaacatgagcaatggaacacttttttccaaactaaatttcgtgcagtggaacttggccgactctgtccttcctctattctaagcaccctactctagcccggctgctctgagttcagtttgttacaaatatggacacgaaagtaccacaggctttgcacagcttaattgaagtttccccttcacaccatggtaaaaaaacatactgggatggaagggcttgtgtctagaacaagaacaagaaataaactcttggtcacttactaatatttcaaaatcacaaagcagaattttgcttggatgtttagtaaaacatccttggaaatttaactgcttgcagcttctacacttcttcattaaatgctgtctggctaataaaaagtgccatgttgcagctttattttattttcattttttggagatagaccctcactgtgtcacccaggctggagtgcagtggtacaatctctgctcactgcaacctccacctcctgggctcaggtgattgtcctgcctcagcctcctgagtagctggggttacgggcgtccaccaccacacccagctagtttttgtatttttagtagagggggtttttgccatgttggccaggctgggcatggtggcatggtaatctcagctacttgggaggctgaggcaggaggatcgcctgaacccgtgagatggaggttgcagtgagctgagatcacaccactgcactctagcatgggtgacagagcaagactctgtctcaaaaaaaaaaaaaaaaaaaaaaaacgaaaacagaattctgtttgtttggatgacctgttatacttatttttgatcttgctgaaataagcaaatcttaggaatcttagtctacagtttctgacagttttttttgttgttgttgtttgaccaattagaactaaataaaaagaacgtgattttcacatttaaatttctcttaagtgtattcctagaacagtaagccattggtttaattgctacttgatgccagtttccttgaagatagccgttaagataaaacatggtttcattgttaattctgtagaaagttacatgttactattatgttattctattggtgtattgttccttttactcaccacagagattgtccaaacacttgtcattattggggcaggcactgcaggtggctcctctcttatatggccaagttgggtaattccctctgtaaagcagaagaaggatgtccattagaagtttttcggttttttaaaattgcaatttactatgaatccttaactaaatccagaagaatagtggagtgaagtacaaaggtccagagagttggtaatagaagtgaagacaggaaggcagaaatggaaggctgctaatatttgcatagttcattctatgtacctgtgtctatgcacctgttttaatctgcatcccatttaattgtgacagctctgagaggaagttattcttgttttacagatgagacaaaagatgtaagagatacctttaatcacaatttatacacttcagagtcagaggaaacctggatttaactccagggctgtgctccctctctttacctaccctctggcctatatgattactgccattcaaaaaactgtccatcttagaaaagctatggtgacccacattcaatattctcagttggtcagccctccataattttcactggataggagccatttggctggtgccttccaaaaaaataataaataatggtatgggggaatttctaaagtacaaattgttttcacatacaagatgtgatatgaataaatagctgctaattagtgagcactaccatgtgcttgtctttgttctaaacaaccttgaatgaaataatcttcacaaaaaccctatgaggaagttactgttgtctatttatacccattatatagctagaggctgagtcacagagtataagtaattgaccaaggtcacagactagaaagtgaaataatatccaagcattttatatccccataaatatcctcatagtagtaatggggagagggggcacatttatctcaatgaacctgccattgcactaattttttttggaactctgcttttggaaaaagttctaaacttttttgtgtaatcgtaccctttggcagtctggtgaggcctatgggctctttctcaacatagtttgttgttaaatgcataaaatacataggattataaaggaaaccaattaaattgaaatagttatcaaaatgtttaaaacaagatttgtgataaagtaatatgtgcttctctattaagatctaccgggggctattagtttcaatgcagtgatgaacacaaactatattttgagttctctgcagcaagtggaatgtggtatgaaaatatctgatatttacaaagatgatactgctaagtcagagtcacgtttattgctaatatgatggtggagtgttgtcttcattcataatgaaaggaaatgttatttttaatagaggttagtgaaaataaaaataaaactattttctaatcaaagtttatggtcctcctctccccagcactctacaattacctccaaagttgagaactctcaccttagacacacaactttataacgataccttatttccaaccccaaatctatgttcttatctcattttgctccaaattttaagttgcttcagaaatttaattagccctctgcttactctacaccatggaaaaaaggtaatatagtagaaattctgatagcaatttcaaaagatgtccaaaatagacattaatcattggaatgtctttcattgttaataagcacagtattaagtggtttaagttctagaatgattttaataaagtcatttatgatacttagctgtgcattccaaactgtaaaggaaaaggtaaaaaatgctacttaaaaataagctaaaaaccaagacagtcggtgaggtctgtggaaatggtagtattcatcttgggagaaacatgctactggaaaggcctggatttgtctagatgggagtcattaagactgtgggacctaaagtattcagcacaataaagcaacaggacatttcaatgttttccctggtagcctgagagagaagagggttggggttatgggacccaggggaagaccgaagacaaatctttaaagaaaaagataaatatgggtaagggtccctaaggcagtgacggcctaagcacactggtactatcttgactatcttgtggtcaaagttatttcctcttctgtgctataatcctctcctccactaatccactctgagtaaagatctgttacacaccatacccttgttcatggtgcccaggggaaatgaagaggagagtattacaggcaactggaagattaagcatcccagaccccattctgaggtatcagaaatattgaggaggatactggacttcctaagattatgtggaatgggggcctacaactttttgtgtataggaaaataatacctcagagggcagagggcaaagggaaatgaggacattcctaactggtctctctgttttaccttttatgctcctctaatccattttccatccagactgatgtccaaatttaaaggtctcatcgctcccctgcttaatatacttgaatgacttcttatgtaaactttgtcatgatctaaaagttcccgctagatctgcaantgccttcctccccccgtttcatctgtttagcagaccgagggcaccagtctctgtggtttaaacttgccaaacttttcttcacggaagttttgctgttcttttctccactagacagctgttccagaagttcttatgtctgattccttctcattcttcatgcctaagcttaaatataacacaagaagcccttccctgattatnctaaacaggggccttgcctattgatagtttctattacagtattatttatagttccttaattgccccataatgatgcagttattttacttgtatttttattatctgtttgccccataaatattactctcataaagacagagactgccctgttctcctttggagctcagtaaaacaaatatttgttgaataaatgaatatttgaagttagtctttatggaagcattataactttggttgtaagttttataatttaatattgtttataactctgaagataagtgagtctaaaccaggaaaatttacatttatactttaatgaataaaaatcatgaatacttacaaaacattcactattgccaagcattatatatacctagtattttacaaagccttctcttgtcactttcatagctactctaagtgatgggtcctgtaaccctgatctattggaggttaaactgagattcagagttaacttgtccagggtcacacagtaaattaattgtatcttaaccattaaaaatgtcatatgaggccgggtgtagtggctcatgcctataatcccagcactctgggaggctgaggcaggtggatcactttagcccaggagttggagatgagcctgggcaatatggcaaaactctgtctctacaaaaaaattaactgggcatggtggcatgtgcctgtagtctcaggtactaggaaggctgagttgggaggattgcttgagcctgggaggttaagcctgcagtgaaccgtaagcgagccactgtactccagcctgggtgacagagtgagagaccctgtctcaaaaaaaaaaaaaaaaagtcatgaaaagttaccactaactgaattatggctttgtctagttttttctgggttttctttattttccaactcttaagatattaagtcaaagctgtcatctt

SEQ ID NO: 351081 - DNA, 7976 bp, Homo sapiens
  misc_feature (6846)..(6846): n is a, c, g, or t
  misc_feature (7047)..(7047): n is a, c, g, or t
tgccttggtcattgcttgccctagaggatcccgtcgtagcatcaaggaaaaggttaagaaagcaaagaataagaaactgggagctcttacagctgaagaaattgcacttaagatggaggcagatgaaaagaaaaagaagaaaaaaaagtaacatacccaaaactccttgactagaactatctccttttgtaaaggattttgagatatcaggcattagttgccttatttgtgagaaattttctgagggcttttttttttttttggtggtggtggttgttcatagaagagtgttctttataaattatattattattgtattttttgaaaaatttatactagaaagtggtatatatgtctttgtatacattacgaccattgtgattatccattaaatccagtgtctgatgctattggttagtaatgatgtcccagcatttgatgttccctctctaatgataacaagtaaatatttaggtttatcccttttgaaagtttggttttacttttaacagtccatgaacagaaaattaaggcctctaaaatcagatcccctagttactcctctgttctgaatctggggaagtagtaaaccaaaaagacagggaaaaccagatatttagagtcgaagcagcatgcaaaaaataataatgtttttaactaatgaaggctactggagttactaagaatcacctaaaaatgtgctactgtaccttgctcattttgcagatttagaagctgaaacatgggttaggttacttactaaaagtccacctgtggcaacctgcaaataatgcttatttatactaaagatgagtttatctgatagagttaggaaatttcttcttttgagtaagagtattgctataacatatatttttttctgaaatgttttaaaatagaagtacacctaattgttattggttaaaaaaaaagccatatgtgaatgaggttggtttttgggttttttctttcctgaattgtattagtccaaaagaactaaattagggtacttgtgctgtaccaaaatggtaattataacagacagtattagaattactgaattaacaatgagaaagagagaagtgtatctgttacgtggatatatgggccagcctggatatacaacagagtagtaacctgtgaaacaaacatagaatatcctcttagacattgttcctcataatgcactgacagaattcacatagctcttaatgaaacaatttaagattgatgtacgtacgtttgacttggtctcgctgtcggttaactgtaaagttagggggaagaaagaaaaaaaattaaaagggtagacacagttgagagttttattttaaaaagctaagtcttataattatgaccattaacttgctttggctttattgcagtgactttccaagtttaattattcaaaactttttgaactgactgaattaacttggtatttttaagttgactttttacataaactttataaaccttttataaaaaggaaactataccattactataaatggaaaatcattttacacatcatacctagcaggtaataaaatttaaaaaataaaaattaaatattagaatgtgagaaatttattaaaatgtagttctaaaaataagtttcttcctgagaagaatgatactgtttatgatgaatccatagtgaaaagacagtgacctctctttcatccagtctagtatatcactaaatcatcattacgatgtttggctatcaagtcattaattactgtcctcctttcactgagctttattcaaattttgacaatcagagcactgggaagaaataaattccacaactgcctttagccttctggatactttcttttataaaatagaaaccttttccacaccagttctgcagcagtcgctattagatgctcgtggtagaacccatcaatcatctggtcctctgggtactggtgagcatccctggtcttcatacctgtgagtgggctttgtggtgaattactgtaaatatgctaccctcacttttcttggcagttatgtccatgaaatcaagagtgtgatgttctagttattttttcttatatatatttttaaatgttcaatattcaactattgaaacaaatgtacatctgtgaactagctaaaatcatcttatgtaccactaatatgcccagcacattttgtaaaacagtcctgatttggcctccaagggtatttattgaactaccagcagtatctaggagaccacgaaggaataccacgaaggaatttatgctccagtgcttgccataatttgtctgagaaggaatctgttaaataaaagcttttatcctctaacctttaccttcatcagaccttataaaaggtcaaatggtgattcttaagttttttagtcacaaatcttacttattcagtattagtgcgaagagtagaatactttcaagtaagcctaaacttacatgaaaacaaattacataaatctagctctgagaataggaaattagtgacaagatcaatctgtaagatgttgagcacttatctgaagtaaatgggtaatgagtttcacatcttataaatacaagttagcatgtgttttctcaagagtccaagggttttcattattggactacagctttaatcttctaaatgttattccccaagattaaagagcatctcaagttagatcaccaaagatcaaaagctaaaaccagaagtatttttgtcattgtggtggtggtagtgttactaattgcctagatttttaaagggaaacatttttttcactgggttgtttcgttgaaaaaaatagaagcagaaacttgcccaaagtcacagtggtcaaactggaaattgcaccaaaacttggcatactggttctgaaatccatagttttagcccttatgtatactggttaatttggaaggaagaaatatatacgttctgaagtgaagagtgagtgaaaggaagaattcagtgaatacattgataccttgatattatctgcattgtggctacatgttacttttcttcacaagagtgatataagtgaaataaagaatgattggactgggagaaaaatggctcagaaaactttgcaaaagtacgactgtatgtaaagataagtattcaacattaaatgggaaggaggagagcaagcagtttaatatatagaattttataattttaggcctgcaagggaccttataaaacatgagcaatggaacacttttttccaaactaaatttcgtgcagtggaacttggccgactctgtccttcctctattctaagcaccctactctagcccggctgctctgagttcagtttgttacaaatatggacacgaaagtaccacaggctttgcacagcttaattgaagtttccccttcacaccatggtaaaaaaacatactgggatggaagggcttgtgtctagaacaagaacaagaaataaactcttggtcacttactaatatttcaaaatcacaaagcagaattttgcttggatgtttagtaaaacatccttggaaatttaactgcttgcagcttctacacttcttcattaaatgctgtctggctaataaaaagtgccatgttgcagctttattttattttcattttttggagatagaccctcactgtgtcacccaggctggagtgcagtggtacaatctctgctcactgcaacctccacctcctgggctcaggtgattgtcctgcctcagcctcctgagtagctggggttacgggcgtccaccaccacacccagctagtttttgtatttttagtagagggggtttttgccatgttggccaggctgggcatggtggcatggtaatctcagctacttgggaggctgaggcaggaggatcgcctgaacccgtgagatggaggttgcagtgagctgagatcacaccactgcactctagcatgggtgacagagcaagactctgtctcaaaaaaaaaaaaaaaaaaaaaaaacgaaaacagaattctgtttgtttggatgacctgttatacttatttttgatcttgctgaaataagcaaatcttaggaatcttagtctacagtttctgacagttttttttgttgttgttgtttgaccaattagaactaaataaaaagaacgtgattttcacatttaaatttctcttaagtgtattcctagaacagtaagccattggtttaattgctacttgatgccagtttccttgaagatagccgttaagataaaacatggtttcattgttaattctgtagaaagttacatgttactattatgttattctattggtgtattgttccttttactcaccacagagattgtccaaacacttgtcattattggggcaggcactgcaggtggctcctctcttatatggccaagttgggtaattccctctgtaaagcagaagaaggatgtccattagaagtttttcggttttttaaaattgcaatttactatgaatccttaactaaatccagaagaatagtggagtgaagtacaaaggtccagagagttggtaatagaagtgaagacaggaaggcagaaatggaaggctgctaatatttgcatagttcattctatgtacctgtgtctatgcacctgttttaatctgcatcccatttaattgtgacagctctgagaggaagttattcttgttttacagatgagacaaaagatgtaagagatacctttaatcacaatttatacacttcagagtcagaggaaacctggatttaactccagggctgtgctccctctctttacctaccctctggcctatatgattactgccattcaaaaaactgtccatcttagaaaagctatggtgacccacattcaatattctcagttggtcagccctccataattttcactggataggagccatttggctggtgccttccaaaaaaataataaataatggtatgggggaatttctaaagtacaaattgttttcacatacaagatgtgatatgaataaatagctgctaattagtgagcactaccatgtgcttgtctttgttctaaacaaccttgaatgaaataatcttcacaaaaaccctatgaggaagttactgttgtctatttatacccattatatagctagaggctgagtcacagagtataagtaattgaccaaggtcacagactagaaagtgaaataatatccaagcattttatatccccataaatatcctcatagtagtaatggggagagggggcacatttatctcaatgaacctgccattgcactaattttttttggaactctgcttttggaaaaagttctaaacttttttgtgtaatcgtaccctttggcagtctggtgaggcctatgggctctttctcaacatagtttgttgttaaatgcataaaatacataggattataaaggaaaccaattaaattgaaatagttatcaaaatgtttaaaacaagatttgtgataaagtaatatgtgcttctctattaagatctaccgggggctattagtttcaatgcagtgatgaacacaaactatattttgagttctctgcagcaagtggaatgtggtatgaaaatatctgatatttacaaagatgatactgctaagtcagagtcacgtttattgctaatatgatggtggagtgttgtcttcattcataatgaaaggaaatgttatttttaatagaggttagtgaaaataaaaataaaactattttctaatcaaagtttatggtcctcctctccccagcactctacaattacctccaaagttgagaactctcaccttagacacacaactttataacgataccttatttccaaccccaaatctatgttcttatctcattttgctccaaattttaagttgcttcagaaatttaattagccctctgcttactctacaccatggaaaaaaggtaatatagtagaaattctgatagcaatttcaaaagatgtccaaaatagacattaatcattggaatgtctttcattgttaataagcacagtattaagtggtttaagttctagaatgattttaataaagtcatttatgatacttagctgtgcattccaaactgtaaaggaaaaggtaaaaaatgctacttaaaaataagctaaaaaccaagacagtcggtgaggtctgtggaaatggtagtattcatcttgggagaaacatgctactggaaaggcctggatttgtctagatgggagtcattaagactgtgggacctaaagtattcagcacaataaagcaacaggacatttcaatgttttccctggtagcctgagagagaagagggttggggttatgggacccaggggaagaccgaagacaaatctttaaagaaaaagataaatatgggtaagggtccctaaggcagtgacggcctaagcacactggtactatcttgactatcttgtggtcaaagttatttcctcttctgtgctataatcctctcctccactaatccactctgagtaaagatctgttacacaccatacccttgttcatggtgcccaggggaaatgaagaggagagtattacaggcaactggaagattaagcatcccagaccccattctgaggtatcagaaatattgaggaggatactggacttcctaagattatgtggaatgggggcctacaactttttgtgtataggaaaataatacctcagagggcagagggcaaagggaaatgaggacattcctaactggtctctctgttttaccttttatgctcctctaatccattttccatccagactgatgtccaaatttaaaggtctcatcgctcccctgcttaatatacttgaatgacttcttatgtaaactttgtcatgatctaaaagttcccgctagatctgcaantgccttcctccccccgtttcatctgtttagcagaccgagggcaccagtctctgtggtttaaacttgccaaacttttcttcacggaagttttgctgttcttttctccactagacagctgttccagaagttcttatgtctgattccttctcattcttcatgcctaagcttaaatataacacaagaagcccttccctgattatnctaaacaggggccttgcctattgatagtttctattacagtattatttatagttccttaattgccccataatgatgcagttattttacttgtatttttattatctgtttgccccataaatattactctcataaagacagagactgccctgttctcctttggagctcagtaaaacaaatatttgttgaataaatgaatatttgaagttagtctttatggaagcattataactttggttgtaagttttataatttaatattgtttataactctgaagataagtgagtctaaaccaggaaaatttacatttatactttaatgaataaaaatcatgaatacttacaaaacattcactattgccaagcattatatatacctagtattttacaaagccttctcttgtcactttcatagctactctaagtgatgggtcctgtaaccctgatctattggaggttaaactgagattcagagttaacttgtccagggtcacacagtaaattaattgtatcttaaccattaaaaatgtcatatgaggccgggtgtagtggctcatgcctataatcccagcactctgggaggctgaggcaggtggatcactttagcccaggagttggagatgagcctgggcaatatggcaaaactctgtctctacaaaaaaattaactgggcatggtggcatgtgcctgtagtctcaggtactaggaaggctgagttgggaggattgcttgagcctgggaggttaagcctgcagtgaaccgtaagcgagccactgtactccagcctgggtgacagagtgagagaccctgtctcaaaaaaaaaaaaaaaaagtcatgaaaagttaccactaactgaattatggctttgtctagttttttctgggttttctttattttccaactcttaagatattaagtcaaagctgtcatctt

SEQ ID NO: 351082 - DNA, 4928 bp, Homo sapiens
  misc_feature (3798)..(3798): n is a, c, g, or t
  misc_feature (3999)..(3999): n is a, c, g, or t
ctgtccggtccggaatcccggggaaaactttgcaaaagtacgactgtatgtaaagataagtattcaacattaaatgggaaggaggagagcaagcagtttaatatatagaattttataattttaggcctgcaagggaccttataaaacatgagcaatggaacacttttttccaaactaaatttcgtgcagtggaacttggccgactctgtccttcctctattctaagcaccctactctagcccggctgctctgagttcagtttgttacaaatatggacacgaaagtaccacaggctttgcacagcttaattgaagtttccccttcacaccatggtaaaaaaacatactgggatggaagggcttgtgtctagaacaagaacaagaaataaactcttggtcacttactaatatttcaaaatcacaaagcagaattttgcttggatgtttagtaaaacatccttggaaatttaactgcttgcagcttctacacttcttcattaaatgctgtctggctaataaaaagtgccatgttgcagctttattttattttcattttttggagatagaccctcactgtgtcacccaggctggagtgcagtggtacaatctctgctcactgcaacctccacctcctgggctcaggtgattgtcctgcctcagcctcctgagtagctggggttacgggcgtccaccaccacacccagctagtttttgtatttttagtagagggggtttttgccatgttggccaggctgggcatggtggcatggtaatctcagctacttgggaggctgaggcaggaggatcgcctgaacccgtgagatggaggttgcagtgagctgagatcacaccactgcactctagcatgggtgacagagcaagactctgtctcaaaaaaaaaaaaaaaaaaaaaaaacgaaaacagaattctgtttgtttggatgacctgttatacttatttttgatcttgctgaaataagcaaatcttaggaatcttagtctacagtttctgacagttttttttgttgttgttgtttgaccaattagaactaaataaaaagaacgtgattttcacatttaaatttctcttaagtgtattcctagaacagtaagccattggtttaattgctacttgatgccagtttccttgaagatagccgttaagataaaacatggtttcattgttaattctgtagaaagttacatgttactattatgttattctattggtgtattgttccttttactcaccacagagattgtccaaacacttgtcattattggggcaggcactgcaggtggctcctctcttatatggccaagttgggtaattccctctgtaaagcagaagaaggatgtccattagaagtttttcggttttttaaaattgcaatttactatgaatccttaactaaatccagaagaatagtggagtgaagtacaaaggtccagagagttggtaatagaagtgaagacaggaaggcagaaatggaaggctgctaatatttgcatagttcattctatgtacctgtgtctatgcacctgttttaatctgcatcccatttaattgtgacagctctgagaggaagttattcttgttttacagatgagacaaaagatgtaagagatacctttaatcacaatttatacacttcagagtcagaggaaacctggatttaactccagggctgtgctccctctctttacctaccctctggcctatatgattactgccattcaaaaaactgtccatcttagaaaagctatggtgacccacattcaatattctcagttggtcagccctccataattttcactggataggagccatttggctggtgccttccaaaaaaataataaataatggtatgggggaatttctaaagtacaaattgttttcacatacaagatgtgatatgaataaatagctgctaattagtgagcactaccatgtgcttgtctttgttctaaacaaccttgaatgaaataatcttcacaaaaaccctatgaggaagttactgttgtctatttatacccattatatagctagaggctgagtcacagagtataagtaattgaccaaggtcacagactagaaagtgaaataatatccaagcattttatatccccataaatatcctcatagtagtaatggggagagggggcacatttatctcaatgaacctgccattgcactaattttttttggaactctgcttttggaaaaagttctaaacttttttgtgtaatcgtaccctttggcagtctggtgaggcctatgggctctttctcaacatagtttgttgttaaatgcataaaatacataggattataaaggaaaccaattaaattgaaatagttatcaaaatgtttaaaacaagatttgtgataaagtaatatgtgcttctctattaagatctaccgggggctattagtttcaatgcagtgatgaacacaaactatattttgagttctctgcagcaagtggaatgtggtatgaaaatatctgatatttacaaagatgatactgctaagtcagagtcacgtttattgctaatatgatggtggagtgttgtcttcattcataatgaaaggaaatgttatttttaatagaggttagtgaaaataaaaataaaactattttctaatcaaagtttatggtcctcctctccccagcactctacaattacctccaaagttgagaactctcaccttagacacacaactttataacgataccttatttccaaccccaaatctatgttcttatctcattttgctccaaattttaagttgcttcagaaatttaattagccctctgcttactctacaccatggaaaaaaggtaatatagtagaaattctgatagcaatttcaaaagatgtccaaaatagacattaatcattggaatgtctttcattgttaataagcacagtattaagtggtttaagttctagaatgattttaataaagtcatttatgatacttagctgtgcattccaaactgtaaaggaaaaggtaaaaaatgctacttaaaaataagctaaaaaccaagacagtcggtgaggtctgtggaaatggtagtattcatcttgggagaaacatgctactggaaaggcctggatttgtctagatgggagtcattaagactgtgggacctaaagtattcagcacaataaagcaacaggacatttcaatgttttccctggtagcctgagagagaagagggttggggttatgggacccaggggaagaccgaagacaaatctttaaagaaaaagataaatatgggtaagggtccctaaggcagtgacggcctaagcacactggtactatcttgactatcttgtggtcaaagttatttcctcttctgtgctataatcctctcctccactaatccactctgagtaaagatctgttacacaccatacccttgttcatggtgcccaggggaaatgaagaggagagtattacaggcaactggaagattaagcatcccagaccccattctgaggtatcagaaatattgaggaggatactggacttcctaagattatgtggaatgggggcctacaactttttgtgtataggaaaataatacctcagagggcagagggcaaagggaaatgaggacattcctaactggtctctctgttttaccttttatgctcctctaatccattttccatccagactgatgtccaaatttaaaggtctcatcgctcccctgcttaatatacttgaatgacttcttatgtaaactttgtcatgatctaaaagttcccgctagatctgcaantgccttcctccccccgtttcatctgtttagcagaccgagggcaccagtctctgtggtttaaacttgccaaacttttcttcacggaagttttgctgttcttttctccactagacagctgttccagaagttcttatgtctgattccttctcattcttcatgcctaagcttaaatataacacaagaagcccttccctgattatnctaaacaggggccttgcctattgatagtttctattacagtattatttatagttccttaattgccccataatgatgcagttattttacttgtatttttattatctgtttgccccataaatattactctcataaagacagagactgccctgttctcctttggagctcagtaaaacaaatatttgttgaataaatgaatatttgaagttagtctttatggaagcattataactttggttgtaagttttataatttaatattgtttataactctgaagataagtgagtctaaaccaggaaaatttacatttatactttaatgaataaaaatcatgaatacttacaaaacattcactattgccaagcattatatatacctagtattttacaaagccttctcttgtcactttcatagctactctaagtgatgggtcctgtaaccctgatctattggaggttaaactgagattcagagttaacttgtccagggtcacacagtaaattaattgtatcttaaccattaaaaatgtcatatgaggccgggtgtagtggctcatgcctataatcccagcactctgggaggctgaggcaggtggatcactttagcccaggagttggagatgagcctgggcaatatggcaaaactctgtctctacaaaaaaattaactgggcatggtggcatgtgcctgtagtctcaggtactaggaaggctgagttgggaggattgcttgagcctgggaggttaagcctgcagtgaaccgtaagcgagccactgtactccagcctgggtgacagagtgagagaccctgtctcaaaaaaaaaaaaaaaaagtcatgaaaagttaccactaactgaattatggctttgtctagttttttctgggttttctttattttccaactcttaagatattaagtcaaagctgtcatctt

SEQ ID NO: 351083 - DNA, 2077 bp, Homo sapiens
  misc_feature (609)..(609): n is a, c, g, or t
  misc_feature (1357)..(1357): n is a, c, g, or t
tcagcacccccgaacaacctccccctcaacataggctagtcgaggcctcgtgttaatcggccgagcggaagcagcttgcaaatggcgtctccctcgctggagcggccagaaaaaggcgctggaaaaagtgaatttcgtaaccagaagccgaagccggagaaccaaggtgatgttatgtgggaaccgaagcctggggtttgtgtacgttgagttgcgatgtttttttctttcgttcctcgtggacttataaaaccacctggagcctgtactgtgtagttgagtacctgaataatcgctgataagattttggctgggcccacaggaacggctggccgatatggtgccacccaggtgttcctaattcattgcttttgctaaagggtccccaaagcgaagctgttgcggattacgtcttttgtaaaaggatgagtattaagaaaatgcctagggcgacgcagaaccttgtaagcctgcgggtggctgaaagtcactgacggaatgaggaatagggtgaggtgggaataggtagtcatgatatacaagagtggaccctgataatggggtgaggtatggggaaaggagctatccgacatgtccttagctctagtntgtcagtaaagacattttgaaagattatcaattcctgtttgtcagatgctaaaatattagacgacacagcccttactgtttaggttgtgttaccttttaattgttaactcctgcgttgtagtctggttttacccgttttcttcagtgtgaatgatagagaagtcataaatagcctggggatctgttcaaccaggcttataggaagtgttaaaaacattgaactctcaatttagatgcattgggaaagtattcaaagtttctttgttgttgctcattaaatgattatgtaacgtacatagcaggggatacaacttatatagagtttaataaaaccatgcgggaaactagcattcagactaagtaaaatagagcattaccatacccctcaaacccttacgtgcacctctcagatcatattctcttttcctgtatcagacgtaaccaccctgaattgtgttgcattctgttcctcttcttgtagtcatgaagtggcttaatttagcctgttttttaattttatatacatgaaagtggaccgtatgcatttttctgtgtcttcttagatttagctttttgtttttcaaacagggtgatacttgcgggtgtagttttagtcttttcactgttatgtggtgtttccttgtatgaatataccccaatttattttttcattttactatcggtggacatttggattgttcccaattgcttgcaattataaacaatactgctaaaacatctttgtacntgtcttctggttaacatgttcaagggtttctctaggttgtgaacataggattggaatcactgaagtgtagggtgtgtgtaagtaatgctaacttttttccaaagtgctagtgtcagttttgttcccactaggagtggacgaaagttgtcattgccttacattagtatgaatacatgttatctgaattttgaatttctgtcattttggtagttatgaaatggtatttggttgcagttttagtttgcattttctgatcacctatgaggttgcatatcttttcacatgttttgaggcttccttaattgtgaaactcctgagtatttcttttgtcagtttttttcctgaggttgtagtggggattttaaaaaaaattatccatagcctttgaagtgtttaaattggatagggacttcgtcaggtaaacattgtaagtaactagttgcagtgactcacacctgtaatcccagcactttggcaagctgaggaggggggattgcttgagcccaggagaccagtctggtcaacatggcaaaaccctttccctacaaaaaaaaaaaaaaaattagccggacatgatggcacatgcctgtagtaccagctacttgtgaggctgaggcaagagaatagatcgcttgagtccaggaggtccaggctgcagtgagctgggatggagccattgcactccagcctgggtgacagagcgaggccctgtctttaaaa

SEQ ID NO: 351084 - DNA, 861 bp, Homo sapiens
tcagcacccccgaacaacctccccctcaacataggctagtcgaggcctcgtgttaatcggccgagcggaagcagcttgcaaatggcgtctccctcgctggagcggccagaaaaaggcgctggaaaaagtgaatttcgtaaccagaagccgaagccggagaaccaagatgaatcagaactccttacggttcctgatggttggaaggaaccagctttttccaaagaggacaatcccagaggacttttggaggagagcagtttcgcaactttgttcccaaaatacagggaagcttacttgaaagagtgttggccattggtgcagaaagccttaaatgaacatcatgttaatgcaaccctggacctgatcgaaggcagcatgactgtttgtactacaaagaagacttttgatccatatatcatcattagggccagagatctgataaaactgttagcaaggagtgtttcatttgaacaggcagtacgaattcttcaggatgatgttgcatgtgacatcattaaaataggttctttagtaaggaataaagagagatttgtaaaacgaagacaacggcttattggtcccaaaggatctacattgaaggcattggaactcttaactaattgttacattatggttcagggaaacacagtttcagccattggaccttttagtggcttaaaagaggtgagaactatgtattatcttcgattcattttcagcagagaacaaataatttggttataatatagtttattggataatgctttataattttatttctttagaatgtgctttgatttcccattagtaaatactttttatgtcatataattcaagggaatcatcatatctggaccctaa

SEQ ID NO: 351085 - DNA, 4122 bp, Homo sapiens
agccggtagggtttaagaacagtttcatttccggagccaccggaagcagcttgcaaatggcgtctccctcgctggagcggccagaaaaaggcgctggaaaaagtgaatttcgtaaccagaagccgaagccggagaaccaagatgaatcagaactccttacggttcctgatggttggaaggaaccagctttttccaaagaggacaatcccagaggacttttggaggagagcagtttcgcaactttgttcccaaaatacagggaagcttacttgaaagagtgttggccattggtgcagaaagccttaaatgaacatcatgttaatgcaaccctggacctgatcgaaggcagcatgactgtttgtactacaaagaagacttttgatccatatatcatcattagggccagagatctgataaaactgttagcaaggagtgtttcatttgaacaggcagtacgaattcttcaggatgatgttgcatgtgacatcattaaaataggttctttagtaaggaataaagagagatttgtaaaacgaagacaacggcttattggtcccaaaggatctacattgaaggcattggaactcttaactaattgttacattatggttcagggaaacacagtttcagccattggaccttttagtggcttaaaagaggttagaaaagtagtccttgatactatgaagaatattcatccaatttataacattaaaagcttaatgattaagagagagttggcaaaagattctgaattacgatcacaaagttgggagagatttttgccacagttcaaacacaaaaatgtgaataaacgcaaggaaccaaagaaaaaaactgttaagaaagaatatacgccattcccaccaccacaaccagaaagtcagatcgataaagaattggctagtggtgaatactttttgaaggcaaatcagaagaagcggcagaaaatggaagcaataaaggctaaacaagcagaagccatcagtaagagacaagaggaaagaaacaaagcatttattccacctaaggaaaaaccaattgtgaaacctaaggaagcttctactgaaactaaaattgatgtggccagcatcaaggaaaaggttaagaaagcaaagaataagaaactgggagctcttacagctgaagaaattgcacttaagatggaggcagatgaaaagaaaaagaagaaaaaaaagtaacatacccaaaactccttgactagaactatctccttttgtaaaggattttgagatatcaggcattagttgccttatttgtgagaaattttctgagggcttttttttttttttggtggtggtggttgttcatagaagagtgttctttataaattatattattattgtattttttgaaaaatttatactagaaagtggtatatatgtctttgtatacattacgaccattgtgattatccattaaatccagtgtctgatgctattggttagtaatgatgtcccagcatttgatgttccctctctaatgataacaagtaaatatttaggtttatcccttttgaaagtttggttttacttttaacagtccatgaacagaaaattaaggcctctaaaatcagatcccctagttactcctctgttctgaatctggggaagtagtaaaccaaaaagacagggaaaaccagatatttagagtcgaagcagcatgcaaaaaataataatgtttttaactaatgaaggctactggagttactaagaatcacctaaaaatgtgctactgtaccttgctcattttgcagatttagaagctgaaacatgggttaggttacttactaaaagtccacctgtggcaacctgcaaataatgcttatttatactaaagatgagtttatctgatagagttaggaaatttcttcttttgagtaagagtattgctataacatatatttttttctgaaatgttttaaaatagaagtacacctaattgttattggttaaaaaaaaagccatatgtgaatgaggttggtttttgggttttttctttcctgaattgtattagtccaaaagaactaaattagggtacttgtgctgtaccaaaatggtaattataacagacagtattagaattactgaattaacaatgagaaagagagaagtgtatctgttacgtggatatatgggccagcctggatatacaacagagtagtaacctgtgaaacaaacatagaatatcctcttagacattgttcctcataatgcactgacagaattcacatagctcttaatgaaacaatttaagattgatgtacgtacgtttgacttggtctcgctgtcggttaactgtaaagttagggggaagaaagaaaaaaaattaaaagggtagacacagttgagagttttattttaaaaagctaagtcttataattatgaccattaacttgctttggctttattgcagtgactttccaagtttaattattcaaaactttttgaactgactgaattaacttggtatttttaagttgactttttacataaactttataaaccttttataaaaaggaaactataccattactataaatggaaaatcattttacacatcatacctagcaggtaataaaatttaaaaaataaaaattaaatattagaatgtgagaaatttattaaaatgtagttctaaaaataagtttcttcctgagaagaatgatactgtttatgatgaatccatagtgaaaagacagtgacctctctttcatccagtctagtatatcactaaatcatcattacgatgtttggctatcaagtcattaattactgtcctcctttcactgagctttattcaaattttgacaatcagagcactgggaagaaataaattccacaactgcctttagccttctggatactttcttttataaaatagaaaccttttccacaccagttctgcagcagtcgctattagatgctcgtggtagaacccatcaatcatctggtcctctgggtactggtgagcatccctggtcttcatacctgtgagtgggctttgtggtgaattactgtaaatatgctaccctcacttttcttggcagttatgtccatgaaatcaagagtgtgatgttctagttattttttcttatatatatttttaaatgttcaatattcaactattgaaacaaatgtacatctgtgaactagctaaaatcatcttatgtaccactaatatgcccagcacattttgtaaaacagtcctgatttggcctccaagggtatttattgaactaccagcagtatctaggagaccacgaaggaataccacgaaggaatttatgctccagtgcttgccataatttgtctgagaaggaatctgttaaataaaagcttttatcctctaacctttaccttcatcagaccttataaaaggtcaaatggtgattcttaagttttttagtcacaaatcttacttattcagtattagtgcgaagagtagaatactttcaagtaagcctaaacttacatgaaaacaaattacataaatctagctctgagaataggaaattagtgacaagatcaatctgtaagatgttgagcacttatctgaagtaaatgggtaatgagtttcacatcttataaatacaagttagcatgtgttttctcaagagtccaagggttttcattattggactacagctttaatcttctaaatgttattccccaagattaaagagcatctcaagttagatcaccaaagatcaaaagctaaaaccagaagtatttttgtcattgtggtggtggtagtgttactaattgcctagatttttaaagggaaacatttttttcactgggttgtttcgttgaaaaaaatagaagcagaaacttgcccaaagtcacagtggtcaaactggaaattgcaccaaaacttggcatactggttctgaaatccatagttttagcccttatgtatactggttaatttggaaggaagaaatatatacgttctgaagtgaagagtgagtgaaaggaagaattcagtgaatacattgataccttgatattatctgcattgtggctacatgttacttttcttcacaagagtgatataagtgaaataaagaatgattggactgggagaaaaatggctcag

SEQ ID NO: 351086 - DNA, 4420 bp, Homo sapiens
agccggtagggtttaagaacagtttcatttccggagccaccggaagcagcttgcaaatggcgtctccctcgctggagcggccagaaaaaggcgctggaaaaagtgaatttcgtaaccagaagccgaagccggagaaccaagatgaatcagaactccttacggttcctgatggttggaaggaaccagctttttccaaagaggacaatcccagaggacttttggaggagagcagtttcgcaactttgttcccaaaatacagggaagcttacttgaaagagtgttggccattggtgcagaaagccttaaatgaacatcatgttaatgcaaccctggacctgatcgaaggcagcatgactgtttgtactacaaagaagacttttgatccatatatcatcattagggccagagatctgataaaactgttagcaaggagtgtttcatttgaacaggcagtacgaattcttcaggatgatgttgcatgtgacatcattaaaataggttctttagtaaggaataaagagagatttgtaaaacgaagacaacggcttattggtcccaaaggatctacattgaaggcattggaactcttaactaattgttacattatggttcagggaaacacagtttcagccattggaccttttagtggcttaaaagaggttagaaaagtagtccttgatactatgaagaatattcatccaatttataacattaaaagcttaatgattaagagagagttggcaaaagattctgaattacgatcacaaagttgggagagatttttgccacagttcaaacacaaaaatgtgaataaacgcaaggaaccaaagaaaaaaactgttaagaaagaatatacgccattcccaccaccacaaccagaaagtcagatcgataaagaattggctagtggtgaatactttttgaaggcaaatcagaagaagcggcagaaaatggaagcaataaaggctaaacaagcagaagccatcagtaagagacaagaggaaagaaacaaagcatttattccacctaaggaaaaaccaattgtgaaacctaaggaagcttctactgaaactaaaattgatgtggccagcatcaaggaaaaggttaagaaagcaaagaataagaaactgggagctcttacagctgaagaaattgcacttaagatggaggcagatgaaaagaaaaagaagaaaaaaaagtaacatacccaaaactccttgactagaactatctccttttgtaaaggattttgagatatcaggcattagttgccttatttgtgagaaattttctgagggcttttttttttttttggtggtggtggttgttcatagaagagtgttctttataaattatattattattgtattttttgaaaaatttatactagaaagtggtatatatgtctttgtatacattacgaccattgtgattatccattaaatccagtgtctgatgctattggttagtaatgatgtcccagcatttgatgttccctctctaatgataacaagtaaatatttaggtttatcccttttgaaagtttggttttacttttaacagtccatgaacagaaaattaaggcctctaaaatcagatcccctagttactcctctgttctgaatctggggaagtagtaaaccaaaaagacagggaaaaccagatatttagagtcgaagcagcatgcaaaaaataataatgtttttaactaatgaaggctactggagttactaagaatcacctaaaaatgtgctactgtaccttgctcattttgcagatttagaagctgaaacatgggttaggttacttactaaaagtccacctgtggcaacctgcaaataatgcttatttatactaaagatgagtttatctgatagagttaggaaatttcttcttttgagtaagagtattgctataacatatatttttttctgaaatgttttaaaatagaagtacacctaattgttattggttaaaaaaaaagccatatgtgaatgaggttggtttttgggttttttctttcctgaattgtattagtccaaaagaactaaattagggtacttgtgctgtaccaaaatggtaattataacagacagtattagaattactgaattaacaatgagaaagagagaagtgtatctgttacgtggatatatgggccagcctggatatacaacagagtagtaacctgtgaaacaaacatagaatatcctcttagacattgttcctcataatgcactgacagaattcacatagctcttaatgaaacaatttaagattgatgtacgtacgtttgacttggtctcgctgtcggttaactgtaaagttagggggaagaaagaaaaaaaattaaaagggtagacacagttgagagttttattttaaaaagctaagtcttataattatgaccattaacttgctttggctttattgcagtgactttccaagtttaattattcaaaactttttgaactgactgaattaacttggtatttttaagttgactttttacataaactttataaaccttttataaaaaggaaactataccattactataaatggaaaatcattttacacatcatacctagcaggtaataaaatttaaaaaataaaaattaaatattagaatgtgagaaatttattaaaatgtagttctaaaaataagtttcttcctgagaagaatgatactgtttatgatgaatccatagtgaaaagacagtgacctctctttcatccagtctagtatatcactaaatcatcattacgatgtttggctatcaagtcattaattactgtcctcctttcactgagctttattcaaattttgacaatcagagcactgggaagaaataaattccacaactgcctttagccttctggatactttcttttataaaatagaaaccttttccacaccagttctgcagcagtcgctattagatgctcgtggtagaacccatcaatcatctggtcctctgggtactggtgagcatccctggtcttcatacctgtgagtgggctttgtggtgaattactgtaaatatgctaccctcacttttcttggcagttatgtccatgaaatcaagagtgtgatgttctagttattttttcttatatatatttttaaatgttcaatattcaactattgaaacaaatgtacatctgtgaactagctaaaatcatcttatgtaccactaatatgcccagcacattttgtaaaacagtcctgatttggcctccaagggtatttattgaactaccagcagtatctaggagaccacgaaggaataccacgaaggaatttatgctccagtgcttgccataatttgtctgagaaggaatctgttaaataaaagcttttatcctctaaaaaaaaaaaaaaaaaaaaaaaaaaaaaaaaaaaaaaaaaaaaaaaaaaaaaaaaaaaaaaaaaaaaaaaaaaaacaaaaaaaaaaaaaaaaaaaaaaacaaaaaaaaagaaaaaaaaaaagaaaagaaaaaacgagaagcgggcgagaaagaaagaacactccaagagacgagagagagaagaaaaagtaaagaaaaagaaaagagcagaaaaaaagaagtacaaatacacaagagaagccgaagaggagcaagaaaaaaacaaacaagcgacgacaaaagaaaacccaagagcacgtgcagggcatacgagcacagaacaagaaacacaccacaacagcgccaaggaacagaagaaaaaaaaggaacaaacacaagaaacagacacgagacgagagacgaaaacgaaggagcgacacaagaaaaacagaacaatgacaagagggaacggaagcagggaggggagagaaagagccggagatgggaaagaagagggtacgacgaccgacaccgaagaagaagacgcgagcacagaaaagacgtagaaaaaaagaaataaagaacaacaagacgagcgcagcaagaagacaaaaaaagctaagagaggacagggacggagagagaagagacaaggggagggaagacggaggagacaggcagacgagaagtacgagcgaggaacgtgaagagcaaagacgataacagaaggcggaaacaagggccaagacgcagagaagtagaagcaagaagaagagaggaacaggcagaagaccagagcagacaaagcccaagacagagagccagacaagaaaaagcaaaaaaagaaaaggaagagcaagacgacaacagacagacaggagaaaataaagcaacgaaaaggacgaagggaggaaaagatgaagcagaagaagatagaaaggaaagagacaacagaagaggaggcaaggagagagaaaagtagcagcgacaaacgagacataaggggagagaggcaagaggaggagagagggacaatcgagcgaaagaactagaaacaaggatgagaaaa

SEQ ID NO: 351087 - DNA, 1461 bp, Homo sapiens
agccggtagggtttaagaacagtttcatttccggagccaccggaagcagcttgcaaatggcgtctccctcgctggagcggccagaaaaaggcgctggaaaaagtgaatttcgtaaccagaagccgaagccggagaaccaagatgaatcagaactccttacggttcctgatggttggaaggaaccagctttttccaaagaggacaatcccagaggacttttggaggagagcagtttcgcaactttgttcccaaaatacagggaagcttacttgaaagagtgttggccattggtgcagaaagccttaaatgaacatcatgttaatgcaaccctggacctgatcgaaggcagcatgactgtttgtactacaaagaagacttttgatccatatatcatcattagggccagagatctgataaaactgttagcaaggagtgtttcatttgaacaggcagtacgaattcttcaggatgatgttgcatgtgacatcattaaaataggttctttagtaaggaataaagagagatttgtaaaacgaagacaacggcttattggtcccaaaggatctacattgaaggcattggaactcttaactaattgttacattatggttcagggaaacacagtttcagccattggaccttttagtggcttaaaagaggttagaaaagtagtccttgatactatgaagaatattcatccaatttataacattaaaagcttaatgattaagagagagttggcaaaagattctgaattacgatcacaaagttgggagagatttttgccacagttcaaacacaaaaatgtgaataaacgcaaggaaccaaagaaaaaaactgttaagaaagaatatacgccattcccaccaccacaaccagaaagtcagatcgataaagaattggctagtggtgaatactttttgaaggcaaatcagaagaagcggcagaaaatggaagcaataaaggctaaacaagcagaagccatcagtaagagacaagaggaaagaaacaaagcatttattccacctaaggaaaaaccaattgtgaaacctaaggaagcttctactgaaactaaaattgatgtggccagcatcaaggaaaaggttaagaaagcaaagaataagaaactgggagctcttacagctgaagaaattgcacttaagatggaggcagatgaaaagaaaaagaagaaaaaaaagtaacatacccaaaactccttgactagaactatctccttttgtaaaggattttgagatatcaggcattagttgccttatttgtgagaaattttctgagggcttttttttttttttggtggtggtggttgttcatagaagagtgttctttataaattatattattattgtattttttgaaaaatttatactagaaagtggtatatatgtctttgtatacattacgaccattgtgattatccattaaatccagtgtctgatgcta

SEQ ID NO: 351088 - DNA, 1340 bp, Homo sapiens
agccggtagggtttaagaacagtttcatttccggagccaccggaagcagcttgcaaatggcgtctccctcgctggagcggccagaaaaaggcgctggaaaaagtgaatttcgtaaccagaagccgaagccggagaaccaagatgaatcagaactccttacggttcctgatggttggaaggaaccagctttttccaaagaggacaatcccagaggacttttggaggagagcagtttcgcaactttgttcccaaaatacagggaagcttacttgaaagagtgttggccattggtgcagaaagccttaaatgaacatcatgttaatgcaaccctggacctgatcgaaggcagcatgactgtttgtactacaaagaagacttttgatccatatatcatcattagggccagagatctgataaaactgttagcaaggagtgtttcatttgaacaggcagtacgaattcttcaggatgatgttgcatgtgacatcattaaaataggttctttagtaaggaataaagagagatttgtaaaacgaagacaacggcttattggtcccaaaggatctacattgaaggcattggaactcttaactaattgttacattatggttcagggaaacacagtttcagccattggaccttttagtggcttaaaagaggttagaaaagtagtccttgatactatgaagaatattcatccaatttataacattaaaagcttaatgattaagagagagttggcaaaagattctgaattacgatcacaaagttgggagagatttttgccacagttcaaacacaaaaatgtgaataaacgcaaggaaccaaagaaaaaaactgttaagaaagaatatacgccattcccaccaccacaaccagaaagtcagatcgataaagaattggctagtggtgaatactttttgaaggcaaatcagaagaagcggcagaaaatggaagcaataaaggctaaacaagcagaagccatcagtaagagacaagaggaaagaaacaaagcatttattccacctaaggaaaaaccaattgtgaaacctaaggaagcttctactgaaactaaaattgatgtggccagcatcaaggaaaaggttaagaaagcaaagaataagaaactgggagctcttacagctgaagaaattgcacttaagatggaggcagatgaaaagaaaaagaagaaaaaaaagtaacatacccaaaactccttgactagaactatctccttttgtaaaggattttgagatatcaggcattagttgccttatttgtgagaaattttctgagggcttttttttttttgggatggcggggaggaggggtacggagct

SEQ ID NO: 351089 - DNA, 1383 bp, Homo sapiens
agccggtagggtttaagaacagtttcatttccggagccaccggaagcagcttgcaaatggcgtctccctcgctggagcggccagaaaaaggcgctggaaaaagtgaatttcgtaaccagaagccgaagccggagaaccaagatgaatcagaactccttacggttcctgatggttggaaggaaccagctttttccaaagaggacaatcccagaggacttttggaggagagcagtttcgcaactttgttcccaaaatacagggaagcttacttgaaagagtgttggccattggtgcagaaagccttaaatgaacatcatgttaatgcaaccctggacctgatcgaaggcagcatgactgtttgtactacaaagaagacttttgatccatatatcatcattagggccagagatctgataaaactgttagcaaggagtgtttcatttgaacaggcagtacgaattcttcaggatgatgttgcatgtgacatcattaaaataggttctttagtaaggaataaagagagatttgtaaaacgaagacaacggcttattggtcccaaaggatctacattgaaggcattggaactcttaactaattgttacattatggttcagggaaacacagtttcagccattggaccttttagtggcttaaaagaggttagaaaagtagtccttgatactatgaagaatattcatccaatttataacattaaaagcttaatgattaagagagagttggcaaaagattctgaattacgatcacaaagttgggagagatttttgccacagttcaaacacaaaaatgtgaataaacgcaaggaaccaaagaaaaaaactgttaagaaagaatatacgccattcccaccaccacaaccagaaagtcagatcgataaagaattggctagtggtgaatactttttgaaggcaaatcagaagaagcggcagaaaatggaagcaataaaggctaaacaagcagaagccatcagtaagagacaagaggaaagaaacaaagcatttattccacctaaggaaaaaccaattgtgaaacctaaggaaggtaatgctttctatgatgtaaaagtctttattaattaggaaaagtaaacccataataaatttgtctgaatctttttaagaaacagttgtatcttttcatcagttctcttagcatttcattaattactaatcctaaggacaagggatggctgagataatttataatttagaggcagctaatgcctatttcagtgcaaactggattgacagtcctctcctgacctctggtctgtgcttggaaaagactctttgttgtgaaagatacaaacccagggcagccagtgcatcttctgtagaaatgcaagaagatccctgagctctgctg

SEQ ID NO: 351090 - DNA, 945 bp, Homo sapiens
tcagcacccccgaacaacctccccctcaacataggctagtcgaggcctcgtgttaatcggccgagcggaagcagcttgcaaatggcgtctccctcgctggagcggccagaaaaaggcgctggaaaaagtgaatttcgtaaccagaagccgaagccggagaaccaagatgaatcagaactccttacggttcctgatggttggaaggaaccagctttttccaaagaggacaatcccagaggacttttggaggagagcagtttcgcaactttgttcccaaaatacagggaagcttacttgaaagagtgttggccattggtgcagaaagccttaaatgaacatcatgttaatgcaaccctggacctgatcgaaggcagcatgactgtttgtactacaaagaagacttttgatccatatatcatcattagggccagagatctgataaaactgttagcaaggagtgtttcatttgaacaggcagtacgaattcttcaggatgatgttgcatgtgacatcattaaaataggttctttagtaaggaataaagagagatttgtaaaacgaagacaacggcttattggtcccaaaggatctacattgaaggtattttttaattagtggaaaacttgagtctcttccttaatactttttcagagtaatgaattttaacttgatctcttgatacaggcattggaactcttaactaattgttacattatggttcagggaaacacagtttcagccattggaccttttagtggcttaaaagaggtgagaactatgtattatcttcgattcattttcagcagagaacaaataatttggttataatatagtttattggataatgctttataattttatttctttagaatgtgctttgatttcccattagtaaatactttttatgtcatataattcaagggaatcatcatatctggaccctaa

SEQ ID NO: 351091 - DNA, 351 bp, Homo sapiens
gatcccactggcttcccagaaagcagagaggcagctacatctcccagatcaggcctgacacaaggctttttgggagtagagtcctctctaggcttcaggggtgccctccagggtcacccagcctgacgtcccctccctcagttcccagaggacacttgccaccctccaaggcagctcagacaaaccaaagggggacgctccagctttcccaccaccatccatggggccactgtagtttcaggccagcacctccttcctggtccctgaggtgggaaaaggaaagacaatgagctctgtgtctgttggctggacctgcggcttctctcagccctcttctagtttcattcttta

SEQ ID NO: 351092 - DNA, 433 bp, Homo sapiens
ttctttggggtctttaactatttgtttttgcactattttatttcttagaggtgattttggagtcacaatacacatcctttctattgtactaccttatgtaaaatgtaagcacttgtagtcttttatgctacagttgtcatgttactgtatttacatgttataagccctacaatacagggttttgtgctttaagcagtctcatgtatattatggaagtaaagagggaaaaacagtgttttatatttatccaggtatatattaatatgatatctacagttcttttttcttttctggacactcagctttccacttgtggtatcactttcctttagctgcagaattttctttagcccagggatcagcaaactttggaagcctatgggccaaatgtggtccacctgtttttaatcaataaagctttattggaacactg

SEQ ID NO: 351093 - DNA, 772 bp, Homo sapiens
aattctgttaagatacaattcaagttgagatttgggtgaggacacagccaaacccatatcaggggctcttctgcctgttgtatcactcactgagtttgtgcctgcaaatggatataattatgcctgaaacagcgcatattgtatatctggtacaggttttgttttttttcccaagttttgccaaacactaaagtagaaagcatagttcatatgactattctatggacatctttagtgcttttatgagcatttttgatgaagaaattgaaagactaattggaggccacaattaagcattgactaatactaagttaggagaaccaataaaatctgtgattttacaaagtcaggtaccatatgttcatggaagttgtatatgaatgattatacatgtgcgtgcatgtatatgtattgtacgtatctgtgcctgtttcttgctatatatgttgtactcaaattacatttgcggtctttctttttgcattagattctgcatatacagactcatgaaaaattcatcagagatagtcaagaaaaaccaaaacctgtacctgataaggaaaataaaaaactgctctgcagaaagtgcaaagccttggcatgttacacagctgacgtaagagtgatagaggtaagctgcctttttacaaagtgcctggtcatgttttagcactagctacagcttactgttggtgaaatatttataataaaactactattatttccattgttactgtggccatgatctgtgtatttaaaaaaagctaagaag

SEQ ID NO: 351094 - DNA, 336 bp, Homo sapiens
aaaaagtcttagagattaaaccatatcaggttacagagatctatgccattttagttaattattacatagagttcaattccaaaatgctttttttctcaggtttgtcagtctgaaaactgtacgtgtactaactttaaatttttttctttttgcatgtatttcaatattgaattaatacaaatgatttataaggagtgtccaattgataattgcttttcattttcaggctttaaaaaattggattgaaggaaatcctaaactcagttttctaaaacctggcatattgactggacgtggcaaaacaaatcagaacacaggtatttatatatagtgaat

SEQ ID NO: 351095 - DNA, 410 bp, Homo sapiens
aaaaatttagtagttgattaaaagaggtctttaaggtgggctctaatttgatgtgactggtgtccttgtaaagaaaaggaaatttgtacacgcagacatgggacgaagcagtatttagggaaaagattctgcatatacagactcatgaaaaattcatcagagatagtcaagaaaaaccaaaacctgtacctgataaggaaaataaaaaactgctctgcagaaagtgcaaagccttggcatgttacacagctgacgtaagagtgatagaggtaagctgcctttttacaaagtgcctggtcatgttttagcactagctacagcttactgttggtgaaatatttataataaaactactattatttccattgttactgtggccatgatctgtgtatttaaaaaaagctaagaag

SEQ ID NO: 351096 - DNA, 4369 bp, Homo sapiens
gcactttcgattttccctttagttattaaagttcctatgcagctccgcctcgcgtccggcctcatttcctcaaaaaatccctgctttccccgctcgccacgccctcctgctacccggctttaaagctagtgaggcacagcctgcggggaacgtagctagctgcaagcagaggccggcatgaccaccgagcagcgacgcagcctgcaagccttccaggattatatccggaagaccctggaccctacctacatcctgagctacatggccccctggtttagggaggaagaggtgcagtatattcaggctgagaaaaacaacaagggcccaatggaggctgccacactttttctcaagttcctgttggagctccaggaggaaggctggttccgtggctttttggatgccctagaccatgcaggttattctggactttatgaagccattgaaagttgggatttcaaaaaaattgaaaagttggaggagtatagattacttttaaaacgtttacaaccagaatttaaaaccagaattatcccaaccgatatcatttctgatctgtctgaatgtttaattaatcaggaatgtgaagaaattctacagattgctctactaaggggatgatggcaggtgcagagaaattggtggaatgccttctcagatcagacaaggaaaactggcccaaaactttgaaacttgctttggagaaagaaaggaacaagttcagtgaactgtggattgtagagaaaggtataaaagatgttgaaacagaagatcttgaggataagatggaaacttctgacatacagattttctaccaagaagatccagaatgccagaatcttagtgagaattcatgtccaccttcagaagtgtctgatacaaacttgtacagcccatttaaaccaagaaattaccaattagagcttgctttgcctgctatgaaaggaaaaaacacaataatatgtgctcctacaggttgtggaaaaacctttgtttcactgcttatatgtgaacatcatcttaaaaaattcccacaaggacaaaaggggaaagttgtcttttttgcgaatcagatcccagtgtatgaacagcagaaatctgtattctcaaaatactttgaaagacatgggtatagagttacaggcatttctggagcaacagctgagaatgtcccagtggaacagattgttgagaacaatgacatcatcattttaactccacagattcttgtgaacaaccttaaaaagggaacgattccatcactatccatctttactttgatgatatttgatgaatgccacaacactagtaaacaacacccgtacaatatgatcatgtttaattatctagatcagaaacttggaggatcttcaggcccactgccccaggtcattgggctgactgcctcggttggtgttggggatgccaaaaacacagatgaagccttggattatatctgcaagctgtgtgcttctcttgatgcgtcagtgatagcaacagtcaaacacaatctggaggaactggagcaagttgtttataagccccagaagtttttcaggaaagtggaatcacggattagcgacaaatttaaatacatcatagctcagctgatgagggacacagagagtctggcaaagagaatctgcaaagacctcgaaaacttatctcaaattcaaaatagggaatttggaacacagaaatatgaacaatggattgttacagttcagaaagcatgcatggtgttccagatgccagacaaagatgaagagagcaggatttgtaaagccctgtttttatacacttcacatttgcggaaatataatgatgccctcattatcagtgagcatgcacgaatgaaagatgctctggattacttgaaagacttcttcagcaatgtccgagcagcaggattcgatgagattgagcaagatcttactcagagatttgaagaaaagctgcaggaactagaaagtgtttccagggatcccagcaatgagaatcctaaacttgaagacctctgcttcatcttacaagaagagtaccacttaaacccagagacaataacaattctctttgtgaaaaccagagcacttgtggacgctttaaaaaattggattgaaggaaatcctaaactcagttttctaaaacctggcatattgactggacgtggcaaaacaaatcagaacacaggaatgaccctcccggcacagaagtgtatattggatgcattcaaagccagtggagatcacaatattctgattgccacctcagttgctgatgaaggcattgacattgcacagtgcaatcttgtcatcctttatgagtatgtgggcaatgtcatcaaaatgatccaaaccagaggcagaggaagagcaagaggtagcaagtgcttccttctgactagtaatgctggtgtaattgaaaaagaacaaataaacatgtacaaagaaaaaatgatgaatgactctattttacgccttcagacatgggacgaagcagtatttagggaaaagattctgcatatacagactcatgaaaaattcatcagagatagtcaagaaaaaccaaaacctgtacctgataaggaaaataaaaaactgctctgcagaaagtgcaaagccttggcatgttacacagctgacgtaagagtgatagaggaatgccattacactgtgcttggagatgcttttaaggaatgctttgtgagtagaccacatcccaagccaaagcagttttcaagttttgaaaaaagagcaaagatattctgtgcccgacagaactgcagccatgactggggaatccatgtgaagtacaagacatttgagattccagttataaaaattgaaagttttgtggtggaggatattgcaactggagttcagacactgtactcgaagtggaaggactttcattttgagaagataccatttgatccagcagaaatgtccaaatgatatcaggtcctcaatcttcagctacagggaatgagtaactttgagtggagaagaaacaaacatagtgggtataatcatggatcgcttgtacccctgtgaaaatatattttttaaaaatatctttagcagtttgtactatattatatatgcaaagcacaaatgagtgaatcacagcactgagtattttgtaggccaacagagctcatagtacttgggaaaaattaaaaagcctcatttctagccttctttttagagtcaactgccaacaaacacacagtaatcactctgtacacactgggatagatgaatgaatggaatgttgggaatttttatctccctttgtctccttaacctactgtaaactggcttttgcccttaacaatctactgaaattgttcttttgaaggttaccagtgactctggttgccaaatccactgggcacttcttaaccttctatttgacctctgcgcatttggccctgttgagcactcttcttgaagctctccctgggcttctctctcttctagttctattctagtctttttttattgagtcctcctctttgctgatcccttccaagggttcaatatatatacatgtatatactgtacatatgtatatgtaactaatatacatacatacaggtatgtatatgtaatggttatatgtactcatgttcctggtgtagcaacgtgtggtatggctacacagagaacatgagaacataaagccatttttatgcttactactaaaagctgtccactgtagagttgctgtatgtagcaatgtgtatccactctacggtggtcagcttttagtagagagcataaaaatgataaaatacttcttgaaaacttagtttactatacatcttgccctattaatatgttctcttaacgtgtgccattgttctctttgaccattttcctataatgatgttgatgttcaacacctggactgaatgtctgttctcagatcccttggatgttacagatgaggcagtctgactgtcctttctacttgaaagattagaatatgtatccaaatggcattcacgtgtcacttagcaaggtttgctgatgcttcaaagagcttagtttgcggtttcctggacgtggaaacaagtatctgagttccctggagatcaacgggatgaggtgttacagctgcctccctcttcatgcaatctggtgagcagtggtgcaggcggggagccagagaaacttgccagttatataacttctctttggcttttcttcatctgtaaaacaaggataatactgaactgtaagggttagtggagagtttttaattaaaagaatgtgtgaaaagtacatgacacagtagttgcttgataatagttactagtagtagtattcttactaagacccaatacaaatggattatttaaacc

SEQ ID NO: 351097 - DNA, 4680 bp, Homo sapiens
gcactttcgattttccctttagttattaaagttcctatgcagctccgcctcgcgtccggcctcatttcctcaaaaaatccctgctttccccgctcgccacgccctcctgctacccggctttaaagctagtgaggcacagcctgcggggaacgtagctagctgcaagcagaggccggcatgaccaccgagcagcgacgcagcctgcaagccttccaggattatatccggaagaccctggaccctacctacatcctgagctacatggccccctggtttagggaggaagaggtgcagtatattcaggctgagaaaaacaacaagggcccaatggaggctgccacactttttctcaagttcctgttggagctccaggaggaaggctggttccgtggctttttggatgccctagaccatgcaggttattctggactttatgaagccattgaaagttgggatttcaaaaaaattgaaaagttggaggagtatagattacttttaaaacgtttacaaccagaatttaaaaccagaattatcccaaccgatatcatttctgatctgtctgaatgtttaattaatcaggaatgtgaagaaattctacagattgctctactaaggggatgatggcaggtgcagagaaattggtggaatgccttctcagatcagacaaggaaaactggcccaaaactttgaaacttgctttggagaaagaaaggaacaagttcagtgaactgtggattgtagagaaaggtataaaagatgttgaaacagaagatcttgaggataagatggaaacttctgacatacagattttctaccaagaagatccagaatgccagaatcttagtgagaattcatgtccaccttcagaagtgtctgatacaaacttgtacagcccatttaaaccaagaaattaccaattagagcttgctttgcctgctatgaaaggaaaaaacacaataatatgtgctcctacaggttgtggaaaaacctttgtttcactgcttatatgtgaacatcatcttaaaaaattcccacaaggacaaaaggggaaagttgtcttttttgcgaatcagatcccagtgtatgaacagcagaaatctgtattctcaaaatactttgaaagacatgggtatagagttacaggcatttctggagcaacagctgagaatgtcccagtggaacagattgttgagaacaatgacatcatcattttaactccacagattcttgtgaacaaccttaaaaagggaacgattccatcactatccatctttactttgatgatatttgatgaatgccacaacactagtaaacaacacccgtacaatatgatcatgtttaattatctagatcagaaacttggaggatcttcaggcccactgccccaggtatctccaaagtcagacgaatgcttcagaagagctataatcttcctaactcctattttcttactcttatggccacactgaagatgtccttctcaggtcccaagtccatattgtacaactcattatgaattttgtttcctttattcatttgttcacttagtaaatatgcattatgtgcctccatgtgccatacactgtgtgttagtaaaaacaaaaaaacgccctaccccagcaggaaagagttatatgaggggttgtggaaacattgtaccatttctcagacatctaatgattttgaatgctccttacaggtcattgggctgactgcctcggttggtgttggggatgccaaaaacacagatgaagccttggattatatctgcaagctgtgtgcttctcttgatgcgtcagtgatagcaacagtcaaacacaatctggaggaactggagcaagttgtttataagccccagaagtttttcaggaaagtggaatcacggattagcgacaaatttaaatacatcatagctcagctgatgagggacacagagagtctggcaaagagaatctgcaaagacctcgaaaacttatctcaaattcaaaatagggaatttggaacacagaaatatgaacaatggattgttacagttcagaaagcatgcatggtgttccagatgccagacaaagatgaagagagcaggatttgtaaagccctgtttttatacacttcacatttgcggaaatataatgatgccctcattatcagtgagcatgcacgaatgaaagatgctctggattacttgaaagacttcttcagcaatgtccgagcagcaggattcgatgagattgagcaagatcttactcagagatttgaagaaaagctgcaggaactagaaagtgtttccagggatcccagcaatgagaatcctaaacttgaagacctctgcttcatcttacaagaagagtaccacttaaacccagagacaataacaattctctttgtgaaaaccagagcacttgtggacgctttaaaaaattggattgaaggaaatcctaaactcagttttctaaaacctggcatattgactggacgtggcaaaacaaatcagaacacaggaatgaccctcccggcacagaagtgtatattggatgcattcaaagccagtggagatcacaatattctgattgccacctcagttgctgatgaaggcattgacattgcacagtgcaatcttgtcatcctttatgagtatgtgggcaatgtcatcaaaatgatccaaaccagaggcagaggaagagcaagaggtagcaagtgcttccttctgactagtaatgctggtgtaattgaaaaagaacaaataaacatgtacaaagaaaaaatgatgaatgactctattttacgccttcagacatgggacgaagcagtatttagggaaaagattctgcatatacagactcatgaaaaattcatcagagatagtcaagaaaaaccaaaacctgtacctgataaggaaaataaaaaactgctctgcagaaagtgcaaagccttggcatgttacacagctgacgtaagagtgatagaggaatgccattacactgtgcttggagatgcttttaaggaatgctttgtgagtagaccacatcccaagccaaagcagttttcaagttttgaaaaaagagcaaagatattctgtgcccgacagaactgcagccatgactggggaatccatgtgaagtacaagacatttgagattccagttataaaaattgaaagttttgtggtggaggatattgcaactggagttcagacactgtactcgaagtggaaggactttcattttgagaagataccatttgatccagcagaaatgtccaaatgatatcaggtcctcaatcttcagctacagggaatgagtaactttgagtggagaagaaacaaacatagtgggtataatcatggatcgcttgtacccctgtgaaaatatattttttaaaaatatctttagcagtttgtactatattatatatgcaaagcacaaatgagtgaatcacagcactgagtattttgtaggccaacagagctcatagtacttgggaaaaattaaaaagcctcatttctagccttctttttagagtcaactgccaacaaacacacagtaatcactctgtacacactgggatagatgaatgaatggaatgttgggaatttttatctccctttgtctccttaacctactgtaaactggcttttgcccttaacaatctactgaaattgttcttttgaaggttaccagtgactctggttgccaaatccactgggcacttcttaaccttctatttgacctctgcgcatttggccctgttgagcactcttcttgaagctctccctgggcttctctctcttctagttctattctagtctttttttattgagtcctcctctttgctgatcccttccaagggttcaatatatatacatgtatatactgtacatatgtatatgtaactaatatacatacatacaggtatgtatatgtaatggttatatgtactcatgttcctggtgtagcaacgtgtggtatggctacacagagaacatgagaacataaagccatttttatgcttactactaaaagctgtccactgtagagttgctgtatgtagcaatgtgtatccactctacggtggtcagcttttagtagagagcataaaaatgataaaatacttcttgaaaacttagtttactatacatcttgccctattaatatgttctcttaacgtgtgccattgttctctttgaccattttcctataatgatgttgatgttcaacacctggactgaatgtctgttctcagatcccttggatgttacagatgaggcagtctgactgtcctttctacttgaaagattagaatatgtatccaaatggcattcacgtgtcacttagcaaggtttgctgatgcttcaaagagcttagtttgcggtttcctggacgtggaaacaagtatctgagttccctggagatcaacgggatgaggtgttacagctgcctccctcttcatgcaatctggtgagcagtggtgcaggcggggagccagagaaacttgccagttatataacttctctttggcttttcttcatctgtaaaacaaggataatactgaactgtaagggttagtggagagtttttaattaaaagaatgtgtgaaaagtacatgacacagtagttgcttgataatagttactagtagtagtattcttactaagacccaatacaaatggattatttaaacc

SEQ ID NO: 351098 - DNA, 2751 bp, Homo sapiens
aattctgttaagatacaattcaagttgagatttgggtgaggacacagccaaacccatatcaggggctcttctgcctgttgtatcactcactgagtttgtgcctgcaaatggatataattatgcctgaaacagcgcatattgtatatctggtacaggttttgttttttttcccaagttttgccaaacactaaagtagaaagcatagttcatatgactattctatggacatctttagtgcttttatgagcatttttgatgaagaaattgaaagactaattggaggccacaattaagcattgactaatactaagttaggagaaccaataaaatctgtgattttacaaagtcaggtaccatatgttcatggaagttgtatatgaatgattatacatgtgcgtgcatgtatatgtattgtacgtatctgtgcctgtttcttgctatatatgttgtactcaaattacatttgcggtctttctttttgcattagattctgcatatacagactcatgaaaaattcatcagagatagtcaagaaaaaccaaaacctgtacctgataaggaaaataaaaaactgctctgcagaaagtgcaaagccttggcatgttacacagctgacgtaagagtgatagaggaatgccattacactgtgcttggagatgcttttaaggaatgctttgtgagtagaccacatcccaagccaaagcagttttcaagttttgaaaaaagagcaaagatattctgtgcccgacagaactgcagccatgactggggaatccatgtgaagtacaagacatttgagattccagttataaaaattgaaagttttgtggtggaggatattgcaactggagttcagacactgtactcgaagtggaaggactttcattttgagaagataccatttgatccagcagaaatgtccaaatgatatcaggtcctcaatcttcagctacagggaatgagtaactttgagtggagaagaaacaaacatagtgggtataatcatggatcgcttgtacccctgtgaaaatatattttttaaaaatatctttagcagtttgtactatattatatatgcaaagcacaaatgagtgaatcacagcactgagtattttgtaggccaacagagctcatagtacttgggaaaaattaaaaagcctcatttctagccttctttttagagtcaactgccaacaaacacacagtaatcactctgtacacactgggatagatgaatgaatggaatgttgggaatttttatctccctttgtctccttaacctactgtaaactggcttttgcccttaacaatctactgaaattgttcttttgaaggttaccagtgactctggttgccaaatccactgggcacttcttaaccttctatttgacctctgcgcatttggccctgttgagcactcttcttgaagctctccctgggcttctctctcttctagttctattctagtctttttttattgagtcctcctctttgctgatcccttccaagggttcaatatatatacatgtatatactgtacatatgtatatgtaactaatatacatacatacaggtatgtatatgtaatggttatatgtactcatgttcctggtgtagcaacgtgtggtatggctacacagagaacatgagaacataaagccatttttatgcttactactaaaagctgtccactgtagagttgctgtatgtagcaatgtgtatccactctacggtggtcagcttttagtagagagcataaaaatgataaaatacttcttgaaaacttagtttactatacatcttgccctattaatatgttctcttaacgtgtgccattgttctctttgaccattttcctataatgatgttgatgttcaacacctggactgaatgtctgttctcagatcccttggatgttacagatgaggcagtctgactgtcctttctacttgaaagattagaatatgtatccaaatggcattcacgtgtcacttagcaaggtttgctgatgcttcaaagagcttagtttgcggtttcctggacgtggaaacaagtatctgagttccctggagatcaacgggatgaggtgttacagctgcctccctcttcatgcaatctggtgagcagtggtgcaggcggggagccagagaaacttgccagttatataacttctctttggcttttcttcatctgtaaaacaaggataatactgaactgtaagggttagtggagagtttttaattaaaagaatgtgtgaaaagtacatgacacagtagttgcttgataatagttactagtagtagtattcttactaagacccaatacaaatggattatttaaaccaagtttatgagttggttttttttcattttccatttgtattttattaagagtgtcttttcttatgtgattttttttaattgctatttgatatggtttggctatatgtccccacccaaatctcatcttgaattataatccccatgtgtcaagggagggacctgatgggaggtgattggatcacgggggcagttgtccccatgctgttcttgggatagtgagttagttctcatgagatctgatggttttataagtgtttgacaattcctcctttacacacactctctctctcatctgctgccatgtaagacttgcctgcttccccttctgccatgattgtaagtttcctgaggcctcctcagccatgtggaactgtgaatctattaaacctcttttctttataaatgaaaa

SEQ ID NO: 351099 - DNA, 2196 bp, Homo sapiens
tttttttttttaaatcacaattatgtactggttctaacgttctcttttgtgtgttattccatcccttcatctgtaggaatgccattacactgtgcttggagatgcttttaaggaatgctttgtgagtagaccacatcccaagccaaagcagttttcaagttttgaaaaaagagcaaagatattctgtgcccgacagaactgcagccatgactggggaatccatgtgaagtacaagacatttgagattccagttataaaaattgaaagttttgtggtggaggatattgcaactggagttcagacactgtactcgaagtggaaggactttcattttgagaagataccatttgatccagcagaaatgtccaaatgatatcaggtcctcaatcttcagctacagggaatgagtaactttgagtggagaagaaacaaacatagtgggtataatcatggatcgcttgtacccctgtgaaaatatattttttaaaaatatctttagcagtttgtactatattatatatgcaaagcacaaatgagtgaatcacagcactgagtattttgtaggccaacagagctcatagtacttgggaaaaattaaaaagcctcatttctagccttctttttagagtcaactgccaacaaacacacagtaatcactctgtacacactgggatagatgaatgaatggaatgttgggaatttttatctccctttgtctccttaacctactgtaaactggcttttgcccttaacaatctactgaaattgttcttttgaaggttaccagtgactctggttgccaaatccactgggcacttcttaaccttctatttgacctctgcgcatttggccctgttgagcactcttcttgaagctctccctgggcttctctctcttctagttctattctagtctttttttattgagtcctcctctttgctgatcccttccaagggttcaatatatatacatgtatatactgtacatatgtatatgtaactaatatacatacatacaggtatgtatatgtaatggttatatgtactcatgttcctggtgtagcaacgtgtggtatggctacacagagaacatgagaacataaagccatttttatgcttactactaaaagctgtccactgtagagttgctgtatgtagcaatgtgtatccactctacggtggtcagcttttagtagagagcataaaaatgataaaatacttcttgaaaacttagtttactatacatcttgccctattaatatgttctcttaacgtgtgccattgttctctttgaccattttcctataatgatgttgatgttcaacacctggactgaatgtctgttctcagatcccttggatgttacagatgaggcagtctgactgtcctttctacttgaaagattagaatatgtatccaaatggcattcacgtgtcacttagcaaggtttgctgatgcttcaaagagcttagtttgcggtttcctggacgtggaaacaagtatctgagttccctggagatcaacgggatgaggtgttacagctgcctccctcttcatgcaatctggtgagcagtggtgcaggcggggagccagagaaacttgccagttatataacttctctttggcttttcttcatctgtaaaacaaggataatactgaactgtaagggttagtggagagtttttaattaaaagaatgtgtgaaaagtacatgacacagtagttgcttgataatagttactagtagtagtattcttactaagacccaatacaaatggattatttaaaccaagtttatgagttggttttttttcattttccatttgtattttattaagagtgtcttttcttatgtgattttttttaattgctatttgatatggtttggctatatgtccccacccaaatctcatcttgaattataatccccatgtgtcaagggagggacctgatgggaggtgattggatcacgggggcagttgtccccatgctgttcttgggatagtgagttagttctcatgagatctgatggttttataagtgtttgacaattcctcctttacacacactctctctctcatctgctgccatgtaagacttgcctgcttccccttctgccatgattgtaagtttcctgaggcctcctcagccatgtggaactgtgaatctattaaacctcttttctttataaatgaaaa

SEQ ID NO: 351100 - DNA, 3019 bp, Homo sapiens
  misc_feature (2961)..(2961): n is a, c, g, or t
gcactttcgattttccctttagttattaaagttcctatgcagctccgcctcgcgtccggcctcatttcctcaaaaaatccctgctttccccgctcgccacgccctcctgctacccggctttaaagctagtgaggcacagcctgcggggaacgtagctagctgcaagcagaggccggcatgaccaccgagcagcgacgcagcctgcaagccttccaggattatatccggaagaccctggaccctacctacatcctgagctacatggccccctggtttagggaggaagaggtgcagtatattcaggctgagaaaaacaacaagggcccaatggaggctgccacactttttctcaagttcctgttggagctccaggaggaaggctggttccgtggctttttggatgccctagaccatgcaggttattctggactttatgaagccattgaaagttgggatttcaaaaaaattgaaaagttggaggagtatagattacttttaaaacgtttacaaccagaatttaaaaccagaattatcccaaccgatatcatttctgatctgtctgaatgtttaattaatcaggaatgtgaagaaattctacagattgctctactaaggggatgatggcaggtgcagagaaattggtggaatgccttctcagatcagacaaggaaaactggcccaaaactttgaaacttgctttggagaaagaaaggaacaagttcagtgaactgtggattgtagagaaaggtataaaagatgttgaaacagaagatcttgaggataagatggaaacttctgacatacagattttctaccaagaagatccagaatgccagaatcttagtgagaattcatgtccaccttcagaagtgtctgatacaaacttgtacagcccatttaaaccaagaaattaccaattagagcttgctttgcctgctatgaaaggaaaaaacacaataatatgtgctcctacaggttgtggaaaaacctttgtttcactgcttatatgtgaacatcatcttaaaaaattcccacaaggacaaaaggggaaagttgtcttttttgcgaatcagatcccagtgtatgaacagcagaaatctgtattctcaaaatactttgaaagacatgggtatagagttacaggcatttctggagcaacagctgagaatgtcccagtggaacagattgttgagaacaatgacatcatcattttaactccacagattcttgtgaacaaccttaaaaagggaacgattccatcactatccatctttactttgatgatatttgatgaatgccacaacactagtaaacaacacccgtacaatatgatcatgtttaattatctagatcagaaacttggaggatcttcaggcccactgccccaggtcattgggctgactgcctcggttggtgttggggatgccaaaaacacagatgaagccttggattatatctgcaagctgtgtgcttctcttgatgcgtcagtgatagcaacagtcaaacacaatctggaggaactggagcaagttgtttataagccccagaagtttttcaggaaagtggaatcacggattagcgacaaatttaaatacatcatagctcagctgatgagggacacagagagtctggcaaagagaatctgcaaagacctcgaaaacttatctcaaattcaaaatagggaatttggaacacagaaatatgaacaatggattgttacagttcagaaagcatgcatggtgttccagatgccagacaaagatgaagagagcaggatttgtaaagccctgtttttatacacttcacatttgcggaaatataatgatgccctcattatcagtgagcatgcacgaatgaaagatgctctggattacttgaaagacttcttcagcaatgtccgagcagcaggattcgatgagattgagcaagatcttactcagagatttgaagaaaagctgcaggaactagaaagtgtttccagggatcccagcaatgagaatcctaaacttgaagacctctgcttcatcttacaagaagagtaccacttaaacccagagacaataacaattctctttgtgaaaaccagagcacttgtggacgctttaaaaaattggattgaaggaaatcctaaactcagttttctaaaacctggcatattgactggacgtggcaaaacaaatcagaacacaggaatgaccctcccggcacagaagtgtatattggatgcattcaaagccagtggagatcacaatattctgattgccacctcagttgctgatgaaggcattgacattgcacagtgcaatcttgtcatcctttatgagtatgtgggcaatgtcatcaaaatgatccaaaccagaggcagaggaagagcaagaggtagcaagtgcttccttctgactagtaatgctggtgtaattgaaaaagaacaaataaacatgtacaaagaaaaaatgatgaatgactctattttacgccttcagacatgggacgaagcagtatttagggaaaagattctgcatatacagactcatgaaaaattcatcagagatagtcaagaaaaaccaaaacctgtacctgataaggaaaataaaaaactgctctgcagaaagtgcaaagccttggcatgttacacagctgacgtaagagtgatagaggaatgccattacactgtgcttggagatgcttttaaggaatgctttgtgagtagaccacatcccaagccaaagcagttttcaagttttgaaaaaagagcaaagatattctgtgcccgacagaactgcagccatgactggggaatccatgtgaagtacaagacatttgagattccagttataaaaattgaaagttttgtggtggaggatattgcaactggagttcagacactgtactcgaagtggaaggactttcattttgagaagataccatttgatccagcagaaatgtccaaatgatattggncgcaactaatctcacacaggatgacgtaactttaagggacaaatcctgggtacacgac

SEQ ID NO: 351101 - DNA, 1425 bp, Homo sapiens
  misc_feature (1401)..(1401): n is a, c, g, or t
gcactttcgattttccctttagttattaaagttcctatgcagctccgcctcgcgtccggcctcatttcctcaaaaaatccctgctttccccgctcgccacgccctcctgctacccggctttaaagctagtgaggcacagcctgcggggaacgtagctagctgcaagcagaggccggcatgaccaccgagcagcgacgcagcctgcaagccttccaggattatatccggaagaccctggaccctacctacatcctgagctacatggccccctggtttagggaggaagaggtgcagtatattcaggctgagaaaaacaacaagggcccaatggaggctgccacactttttctcaagttcctgttggagctccaggaggaaggctggttccgtggctttttggatgccctagaccatgcaggttattctggactttatgaagccattgaaagttgggatttcaaaaaaattgaaaagttggaggagtatagattacttttaaaacgtttacaaccagaatttaaaaccagaattatcccaaccgatatcatttctgatctgtctgaatgtttaattaatcaggaatgtgaagaaattctacagattgctctactaaggggatgatggcaggtgcagagaaattggtggaatgccttctcagatcagacaaggaaaactggcccaaaactttgaaacttgctttggagaaagaaaggaacaagttcagtgaactgtggattgtagagaaaggtataaaagatgttgaaacagaagatcttgaggataagatggaaacttctgacatacagattttctaccaagaagatccagaatgccagaatcttagtgagaattcatgtccaccttcagaagtgtctgatacaaacttgtacagcccatttaaaccaagaaattaccaattagagcttgctttgcctgctatgaaaggaaaaaacacaataatatgtgctcctacaggttgtggaaaaacctttgtttcactgcttatatgtgaacatcatcttaaaaaattcccacaaggacaaaaggggaaagttgtcttttttgcgaatcagatcccagtgtatgaacagcagaaatctgtattctcaaaatactttgaaagacatgggtatagagttacaggcatttctggagcaacagctgagaatgtcccagtggaacagattgttgagaacaatgacatcatcattttaactccacagattcttgtgaacaaccttaaaaagggaacgattccatcactatccatctttactttgatgatatttgatgaatgccacaacactagtaaacaacacccgtacaatatgatcatgtttaattatctagatcagaaacttggaggatcttcaggcccactgccccagtcattggctgctncctcgttgtgttgggataacatca

SEQ ID NO: 351102 - DNA, 362 bp, Homo sapiens
tgagataggtcttgctctgtcacccaggctagagtgcagtggtgtaatcctagctcactgcagcttcaaactcctgggttcaagcaatcctgcctcatgagttcactctttaacagctcaactttcctgggaagtgggattcagtgaaccaaagttgaattttaggagtacctctatttgtttacctatttgcagattatatcagagctttaagtcaaaaacaccaactaaaatatttattttctaataggcagaggaagagcaagaggtagcaagtgcttccttctgactagtaatgctggtgtaattgaaaaagaacaaataaacatgtacaaagaaaaaatgatgaatgactctatttt

SEQ ID NO: 351103 - DNA, 242 bp, Homo sapiens
gattgttacagttcagaaagcatgcatggtgttccagatgccagacaaagatgaagagagcaggatttgtaaagccctgtttttatacacttcacatttgcgggtacgttcctctttttaagagtcgtattctggtcacagcacctactgggagtggcaccgtggaagccaagataacatcaacttctcatcctgtcctcaagagctcacttaggaacctttccagaaagttcttatgaagc

SEQ ID NO: 351104 - DNA, 348 bp, Homo sapiens
ttttcaggaaagtggaatcacggattagcgacaaatttaaatacatcatagctcagctgatgagggacacagagagtctggcaaagagaatctgcaaagacctcggtgagataaatctcatattttgtgttctctctactggggaatagccatttattgttcactatcgtctttttgtgttctccttagttcagacaatgtcaagaccatatccagaggttgtcttccttgattataggttatttaggagccttatatgtcctcctctattctttctttcttcctttttttccttttaaatccaaagtaagttcatccagacacatgcacctgaaaaataaccatact

SEQ ID NO: 351105 - DNA, 287 bp, Homo sapiens
gatatgacccactgagctgtaatgtacaatggctttaaatcagatagtacatgactgacatttcttcagtaaaaattgataaagggaaaacttttgagataattgatcaataaactacagttaccttgcttagatttgctattgctctactaaggggatgatggcaggtgcagagaaattggtggaatgccttctcagatcagacaaggaaaactggcccaaaactttgaaacttgctttggagaaagaaaggaacaagttcagtgaactgtggattgtagagaaag

SEQ ID NO: 351106 - DNA, 479 bp, Homo sapiens
tgcatgtatttcaatattgaattaatacaaatgatttataaggagtgtccaattgataattgcttttcattttcaggctttaaaaaattggattgaaggaaatcctaaactcagttttctaaaacctggcatattgactggacgtggcaaaacaaatcagaacacaggtatttatatatagtgaattagatttagtggattatgcatttaagaatatgtgtgtgtgtgtatgtatatgtgtgtgtgtatatatataatatatatttcaaattctgttttaatatatatttcaagttctgttttaatgcttctatcagtcaaggtttaaccacagaagcaaaagcagtaggtgattatacatatatatgagaggtgtgtgttgtatatgtgtccacatatgcatatatacagagatttcttgcaaggaattttacacaattgggctggcaaagcaagtctgaagcgtgtagggcaggtag

SEQ ID NO: 351107 - DNA, 4777 bp, Homo sapiens
gcactttcgattttccctttagttattaaagttcctatgcagctccgcctcgcgtccggcctcatttcctcaaaaaatccctgctttccccgctcgccacgccctcctgctacccggctttaaagctagtgaggcacagcctgcggggaacgtagctagctgcaagcagaggccggcatgaccaccgagcagcgacgcagcctgcaagccttccaggattatatccggaagaccctggaccctacctacatcctgagctacatggccccctggtttagggaggaagaggtgcagtatattcaggctgagaaaaacaacaagggcccaatggaggctgccacactttttctcaagttcctgttggagctccaggaggaaggctggttccgtggctttttggatgccctagaccatgcaggttattctggactttatgaagccattgaaagttgggatttcaaaaaaattgaaaagttggaggagtatagattacttttaaaacgtttacaaccagaatttaaaaccagaattatcccaaccgatatcatttctgatctgtctgaatgtttaattaatcaggaatgtgaagaaattctacagattgctctactaaggggatgatggcaggtgcagagaaattggtggaatgccttctcagatcagacaaggaaaactggcccaaaactttgaaacttgctttggagaaagaaaggaacaagttcagtgaactgtggattgtagagaaaggtataaaagatgttgaaacagaagatcttgaggataagatggaaacttctgacatacagattttctaccaagaagatccagaatgccagaatcttagtgagaattcatgtccaccttcagaagtgtctgatacaaacttgtacagcccatttaaaccaagaaattaccaattagagcttgctttgcctgctatgaaaggaaaaaacacaataatatgtgctcctacaggttgtggaaaaacctttgtttcactgcttatatgtgaacatcatcttaaaaaattcccacaaggacaaaaggggaaagttgtcttttttgcgaatcagatcccagtgtatgaacagcagaaatctgtattctcaaaatactttgaaagacatgggtatagagttacaggcatttctggagcaacagctgagaatgtcccagtggaacagattgttgagaacaatgacatcatcattttaactccacagattcttgtgaacaaccttaaaaagggaacgattccatcactatccatctttactttgatgatatttgatgaatgccacaacactagtaaacaacacccgtacaatatgatcatgtttaattatctagatcagaaacttggaggatcttcaggcccactgccccaggtcattgggctgactgcctcggttggtgttggggatgccaaaaacacagatgaagccttggattatatctgcaagctgtgtgcttctcttgatgcgtcagtgatagcaacagtcaaacacaatctggaggaactggagcaagttgtttataagccccagaagtttttcaggaaagtggaatcacggattagcgacaaatttaaatacatcatagctcagctgatgagggacacagagagtctggcaaagagaatctgcaaagacctcgaaaacttatctcaaattcaaaatagggaatttggaacacagaaatatgaacaatggattgttacagttcagaaagcatgcatggtgttccagatgccagacaaagatgaagagagcaggatttgtaaagccctgtttttatacacttcacatttgcggaaatataatgatgccctcattatcagtgagcatgcacgaatgaaagatgctctggattacttgaaagacttcttcagcaatgtccgagcagcaggattcgatgagattgagcaagatcttactcagagatttgaagaaaagctgcaggaactagaaagtgtttccagggatcccagcaatgagaatcctaaacttgaagacctctgcttcatcttacaagaagagtaccacttaaacccagagacaataacaattctctttgtgaaaaccagagcacttgtggacgctttaaaaaattggattgaaggaaatcctaaactcagttttctaaaacctggcatattgactggacgtggcaaaacaaatcagaacacaggaatgaccctcccggcacagaagtgtatattggatgcattcaaagccagtggagatcacaatattctgattgccacctcagttgctgatgaaggcattgacattgcacagtgcaatcttgtcatcctttatgagtatgtgggcaatgtcatcaaaatgatccaaaccagaggcagaggaagagcaagaggtagcaagtgcttccttctgactagtaatgctggtgtaattgaaaaagaacaaataaacatgtacaaagaaaaaatgatgaatgactctattttacgccttcagacatgggacgaagcagtatttagggaaaagattctgcatatacagactcatgaaaaattcatcagagatagtcaagaaaaaccaaaacctgtacctgataaggaaaataaaaaactgctctgcagaaagtgcaaagccttggcatgttacacagctgacgtaagagtgatagaggaatgccattacactgtgcttggagatgcttttaaggaatgctttgtgagtagaccacatcccaagccaaagcagttttcaagttttgaaaaaagagcaaagatattctgtgcccgacagaactgcagccatgactggggaatccatgtgaagtacaagacatttgagattccagttataaaaattgaaagttttgtggtggaggatattgcaactggagttcagacactgtactcgaagtggaaggactttcattttgagaagataccatttgatccagcagaaatgtccaaatgatatcaggtcctcaatcttcagctacagggaatgagtaactttgagtggagaagaaacaaacatagtgggtataatcatggatcgcttgtacccctgtgaaaatatattttttaaaaatatctttagcagtttgtactatattatatatgcaaagcacaaatgagtgaatcacagcactgagtattttgtaggccaacagagctcatagtacttgggaaaaattaaaaagcctcatttctagccttctttttagagtcaactgccaacaaacacacagtaatcactctgtacacactgggatagatgaatgaatggaatgttgggaatttttatctccctttgtctccttaacctactgtaaactggcttttgcccttaacaatctactgaaattgttcttttgaaggttaccagtgactctggttgccaaatccactgggcacttcttaaccttctatttgacctctgcgcatttggccctgttgagcactcttcttgaagctctccctgggcttctctctcttctagttctattctagtctttttttattgagtcctcctctttgctgatcccttccaagggttcaatatatatacatgtatatactgtacatatgtatatgtaactaatatacatacatacaggtatgtatatgtaatggttatatgtactcatgttcctggtgtagcaacgtgtggtatggctacacagagaacatgagaacataaagccatttttatgcttactactaaaagctgtccactgtagagttgctgtatgtagcaatgtgtatccactctacggtggtcagcttttagtagagagcataaaaatgataaaatacttcttgaaaacttagtttactatacatcttgccctattaatatgttctcttaacgtgtgccattgttctctttgaccattttcctataatgatgttgatgttcaacacctggactgaatgtctgttctcagatcccttggatgttacagatgaggcagtctgactgtcctttctacttgaaagattagaatatgtatccaaatggcattcacgtgtcacttagcaaggtttgctgatgcttcaaagagcttagtttgcggtttcctggacgtggaaacaagtatctgagttccctggagatcaacgggatgaggtgttacagctgcctccctcttcatgcaatctggtgagcagtggtgcaggcggggagccagagaaacttgccagttatataacttctctttggcttttcttcatctgtaaaacaaggataatactgaactgtaagggttagtggagagtttttaattaaaagaatgtgtgaaaagtacatgacacagtagttgcttgataatagttactagtagtagtattcttactaagacccaatacaaatggattatttaaaccaagtttatgagttggttttttttcattttccatttgtattttattaagagtgtcttttcttatgtgattttttttaattgctatttgatatggtttggctatatgtccccacccaaatctcatcttgaattataatccccatgtgtcaagggagggacctgatgggaggtgattggatcacgggggcagttgtccccatgctgttcttgggatagtgagttagttctcatgagatctgatggttttataagtgtttgacaattcctcctttacacacactctctctctcatctgctgccatgtaagacttgcctgcttccccttctgccatgattgtaagtttcctgaggcctcctcagccatgtggaactgtgaatctattaaacctcttttctttataaatgaaaa

SEQ ID NO: 351108 - DNA, 4222 bp, Homo sapiens
gcactttcgattttccctttagttattaaagttcctatgcagctccgcctcgcgtccggcctcatttcctcaaaaaatccctgctttccccgctcgccacgccctcctgctacccggctttaaagctagtgaggcacagcctgcggggaacgtagctagctgcaagcagaggccggcatgaccaccgagcagcgacgcagcctgcaagccttccaggattatatccggaagaccctggaccctacctacatcctgagctacatggccccctggtttagggaggaagaggtgcagtatattcaggctgagaaaaacaacaagggcccaatggaggctgccacactttttctcaagttcctgttggagctccaggaggaaggctggttccgtggctttttggatgccctagaccatgcaggttattctggactttatgaagccattgaaagttgggatttcaaaaaaattgaaaagttggaggagtatagattacttttaaaacgtttacaaccagaatttaaaaccagaattatcccaaccgatatcatttctgatctgtctgaatgtttaattaatcaggaatgtgaagaaattctacaggtataaaagatgttgaaacagaagatcttgaggataagatggaaacttctgacatacagattttctaccaagaagatccagaatgccagaatcttagtgagaattcatgtccaccttcagaagtgtctgatacaaacttgtacagcccatttaaaccaagaaattaccaattagagcttgctttgcctgctatgaaaggaaaaaacacaataatatgtgctcctacaggttgtggaaaaacctttgtttcactgcttatatgtgaacatcatcttaaaaaattcccacaaggacaaaaggggaaagttgtcttttttgcgaatcagatcccagtgtatgaacagcagaaatctgtattctcaaaatactttgaaagacatgggtatagagttacaggcatttctggagcaacagctgagaatgtcccagtggaacagattgttgagaacaatgacatcatcattttaactccacagattcttgtgaacaaccttaaaaagggaacgattccatcactatccatctttactttgatgatatttgatgaatgccacaacactagtaaacaacacccgtacaatatgatcatgtttaattatctagatcagaaacttggaggatcttcaggcccactgccccaggtcattgggctgactgcctcggttggtgttggggatgccaaaaacacagatgaagccttggattatatctgcaagctgtgtgcttctcttgatgcgtcagtgatagcaacagtcaaacacaatctggaggaactggagcaagttgtttataagccccagaagtttttcaggaaagtggaatcacggattagcgacaaatttaaatacatcatagctcagctgatgagggacacagagagtctggcaaagagaatctgcaaagacctcgaaaacttatctcaaattcaaaatagggaatttggaacacagaaatatgaacaatggattgttacagttcagaaagcatgcatggtgttccagatgccagacaaagatgaagagagcaggatttgtaaagccctgtttttatacacttcacatttgcggaaatataatgatgccctcattatcagtgagcatgcacgaatgaaagatgctctggattacttgaaagacttcttcagcaatgtccgagcagcaggattcgatgagattgagcaagatcttactcagagatttgaagaaaagctgcaggaactagaaagtgtttccagggatcccagcaatgagaatcctaaacttgaagacctctgcttcatcttacaagaagagtaccacttaaacccagagacaataacaattctctttgtgaaaaccagagcacttgtggacgctttaaaaaattggattgaaggaaatcctaaactcagttttctaaaacctggcatattgactggacgtggcaaaacaaatcagaacacaggaatgaccctcccggcacagaagtgtatattggatgcattcaaagccagtggagatcacaatattctgattgccacctcagttgctgatgaaggcattgacattgcacagtgcaatcttgtcatcctttatgagtatgtgggcaatgtcatcaaaatgatccaaaccagaggcagaggaagagcaagaggtagcaagtgcttccttctgactagtaatgctggtgtaattgaaaaagaacaaataaacatgtacaaagaaaaaatgatgaatgactctattttacgccttcagacatgggacgaagcagtatttagggaaaagattctgcatatacagactcatgaaaaattcatcagagatagtcaagaaaaaccaaaacctgtacctgataaggaaaataaaaaactgctctgcagaaagtgcaaagccttggcatgttacacagctgacgtaagagtgatagaggaatgccattacactgtgcttggagatgcttttaaggaatgctttgtgagtagaccacatcccaagccaaagcagttttcaagttttgaaaaaagagcaaagatattctgtgcccgacagaactgcagccatgactggggaatccatgtgaagtacaagacatttgagattccagttataaaaattgaaagttttgtggtggaggatattgcaactggagttcagacactgtactcgaagtggaaggactttcattttgagaagataccatttgatccagcagaaatgtccaaatgatatcaggtcctcaatcttcagctacagggaatgagtaactttgagtggagaagaaacaaacatagtgggtataatcatggatcgcttgtacccctgtgaaaatatattttttaaaaatatctttagcagtttgtactatattatatatgcaaagcacaaatgagtgaatcacagcactgagtattttgtaggccaacagagctcatagtacttgggaaaaattaaaaagcctcatttctagccttctttttagagtcaactgccaacaaacacacagtaatcactctgtacacactgggatagatgaatgaatggaatgttgggaatttttatctccctttgtctccttaacctactgtaaactggcttttgcccttaacaatctactgaaattgttcttttgaaggttaccagtgactctggttgccaaatccactgggcacttcttaaccttctatttgacctctgcgcatttggccctgttgagcactcttcttgaagctctccctgggcttctctctcttctagttctattctagtctttttttattgagtcctcctctttgctgatcccttccaagggttcaatatatatacatgtatatactgtacatatgtatatgtaactaatatacatacatacaggtatgtatatgtaatggttatatgtactcatgttcctggtgtagcaacgtgtggtatggctacacagagaacatgagaacataaagccatttttatgcttactactaaaagctgtccactgtagagttgctgtatgtagcaatgtgtatccactctacggtggtcagcttttagtagagagcataaaaatgataaaatacttcttgaaaacttagtttactatacatcttgccctattaatatgttctcttaacgtgtgccattgttctctttgaccattttcctataatgatgttgatgttcaacacctggactgaatgtctgttctcagatcccttggatgttacagatgaggcagtctgactgtcctttctacttgaaagattagaatatgtatccaaatggcattcacgtgtcacttagcaaggtttgctgatgcttcaaagagcttagtttgcggtttcctggacgtggaaacaagtatctgagttccctggagatcaacgggatgaggtgttacagctgcctccctcttcatgcaatctggtgagcagtggtgcaggcggggagccagagaaacttgccagttatataacttctctttggcttttcttcatctgtaaaacaaggataatactgaactgtaagggttagtggagagtttttaattaaaagaatgtgtgaaaagtacatgacacagtagttgcttgataatagttactagtagtagtattcttactaagacccaatacaaatggattatttaaacc

SEQ ID NO: 351109 - DNA, 2598 bp, Homo sapiens
tttgtcataaatagctctttattattctgagatacattccatcaatacctagtttattgagagtttttagcatgaagggctgttgaattttatcaacggcgttttctgcatctattgagataatcatgtggtttttgtcattagttctgtttataatgtcatcaaaatgatccaaaccagaggcagaggaagagcaagaggtagcaagtgcttccttctgactagtaatgctggtgtaattgaaaaagaacaaataaacatgtacaaagaaaaaatgatgaatgactctattttacgccttcagacatgggacgaagcagtatttagggaaaagattctgcatatacagactcatgaaaaattcatcagagatagtcaagaaaaaccaaaacctgtacctgataaggaaaataaaaaactgctctgcagaaagtgcaaagccttggcatgttacacagctgacgtaagagtgatagaggaatgccattacactgtgcttggagatgcttttaaggaatgctttgtgagtagaccacatcccaagccaaagcagttttcaagttttgaaaaaagagcaaagatattctgtgcccgacagaactgcagccatgactggggaatccatgtgaagtacaagacatttgagattccagttataaaaattgaaagttttgtggtggaggatattgcaactggagttcagacactgtactcgaagtggaaggactttcattttgagaagataccatttgatccagcagaaatgtccaaatgatatcaggtcctcaatcttcagctacagggaatgagtaactttgagtggagaagaaacaaacatagtgggtataatcatggatcgcttgtacccctgtgaaaatatattttttaaaaatatctttagcagtttgtactatattatatatgcaaagcacaaatgagtgaatcacagcactgagtattttgtaggccaacagagctcatagtacttgggaaaaattaaaaagcctcatttctagccttctttttagagtcaactgccaacaaacacacagtaatcactctgtacacactgggatagatgaatgaatggaatgttgggaatttttatctccctttgtctccttaacctactgtaaactggcttttgcccttaacaatctactgaaattgttcttttgaaggttaccagtgactctggttgccaaatccactgggcacttcttaaccttctatttgacctctgcgcatttggccctgttgagcactcttcttgaagctctccctgggcttctctctcttctagttctattctagtctttttttattgagtcctcctctttgctgatcccttccaagggttcaatatatatacatgtatatactgtacatatgtatatgtaactaatatacatacatacaggtatgtatatgtaatggttatatgtactcatgttcctggtgtagcaacgtgtggtatggctacacagagaacatgagaacataaagccatttttatgcttactactaaaagctgtccactgtagagttgctgtatgtagcaatgtgtatccactctacggtggtcagcttttagtagagagcataaaaatgataaaatacttcttgaaaacttagtttactatacatcttgccctattaatatgttctcttaacgtgtgccattgttctctttgaccattttcctataatgatgttgatgttcaacacctggactgaatgtctgttctcagatcccttggatgttacagatgaggcagtctgactgtcctttctacttgaaagattagaatatgtatccaaatggcattcacgtgtcacttagcaaggtttgctgatgcttcaaagagcttagtttgcggtttcctggacgtggaaacaagtatctgagttccctggagatcaacgggatgaggtgttacagctgcctccctcttcatgcaatctggtgagcagtggtgcaggcggggagccagagaaacttgccagttatataacttctctttggcttttcttcatctgtaaaacaaggataatactgaactgtaagggttagtggagagtttttaattaaaagaatgtgtgaaaagtacatgacacagtagttgcttgataatagttactagtagtagtattcttactaagacccaatacaaatggattatttaaaccaagtttatgagttggttttttttcattttccatttgtattttattaagagtgtcttttcttatgtgattttttttaattgctatttgatatggtttggctatatgtccccacccaaatctcatcttgaattataatccccatgtgtcaagggagggacctgatgggaggtgattggatcacgggggcagttgtccccatgctgttcttgggatagtgagttagttctcatgagatctgatggttttataagtgtttgacaattcctcctttacacacactctctctctcatctgctgccatgtaagacttgcctgcttccccttctgccatgattgtaagtttcctgaggcctcctcagccatgtggaactgtgaatctattaaacctcttttctttataaatgaaaa

SEQ ID NO: 351110 - DNA, 2420 bp, Homo sapiens
gcactttcgattttccctttagttattaaagttcctatgcagctccgcctcgcgtccggcctcatttcctcaaaaaatccctgctttccccgctcgccacgccctcctgctacccggctttaaagctagtgaggcacagcctgcggggaacgtagctagctgcaagcagaggccggcatgaccaccgagcagcgacgcagcctgcaagccttccaggattatatccggaagaccctggaccctacctacatcctgagctacatggccccctggtttagggaggaagaggtgcagtatattcaggctgagaaaaacaacaagggcccaatggaggctgccacactttttctcaagttcctgttggagctccaggaggaaggctggttccgtggctttttggatgccctagaccatgcaggttattctggactttatgaagccattgaaagttgggatttcaaaaaaattgaaaagttggaggagtatagattacttttaaaacgtttacaaccagaatttaaaaccagaattatcccaaccgatatcatttctgatctgtctgaatgtttaattaatcaggaatgtgaagaaattctacagattgctctactaaggggatgatggcaggtgcagagaaattggtggaatgccttctcagatcagacaaggaaaactggcccaaaactttgaaacttgctttggagaaagaaaggaacaagttcagtgaactgtggattgtagagaaaggtataaaagatgttgaaacagaagatcttgaggataagatggaaacttctgacatacagattttctaccaagaagatccagaatgccagaatcttagtgagaattcatgtccaccttcagaagtgtctgatacaaacttgtacagcccatttaaaccaagaaattaccaattagagcttgctttgcctgctatgaaaggaaaaaacacaataatatgtgctcctacaggttgtggaaaaacctttgtttcactgcttatatgtgaacatcatcttaaaaaattcccacaaggacaaaaggggaaagttgtcttttttgcgaatcagatcccagtgtatgaacagcagaaatctgtattctcaaaatactttgaaagacatgggtatagagttacaggcatttctggagcaacagctgagaatgtcccagtggaacagattgttgagaacaatgacatcatcattttaactccacagattcttgtgaacaaccttaaaaagggaacgattccatcactatccatctttactttgatgatatttgatgaatgccacaacactagtaaacaacacccgtacaatatgatcatgtttaattatctagatcagaaacttggaggatcttcaggcccactgccccaggtcattgggctgactgcctcggttggtgttggggatgccaaaaacacagatgaagccttggattatatctgcaagctgtgtgcttctcttgatgcgtcagtgatagcaacagtcaaacacaatctggaggaactggagcaagttgtttataagccccagaagtttttcaggaaagtggaatcacggattagcgacaaatttaaatacatcatagctcagctgatgagggacacagagagtctggcaaagagaatctgcaaagacctcgaaaacttatctcaaattcaaaatagggaatttggaacacagaaatatgaacaatggattgttacagttcagaaagcatgcatggtgttccagatgccagacaaagatgaagagagcaggatttgtaaagccctgtttttatacacttcacatttgcggaaatataatgatgccctcattatcagtgagcatgcacgaatgaaagatgctctggattacttgaaagacttcttcagcaatgtccgagcagcaggattcgatgagattgagcaagatcttactcagagatttgaagaaaagctgcaggaactagaaagtgtttccagggatcccagcaatgagaatcctaaacttgaagacctctgcttcatcttacaagaagagtaccacttaaacccagagacaataacaattctctttgtgaaaaccagagcacttgtggacgtaagctttttttctccttgtagataacaaatggacccagcactattcattgaaaagattgggctgggtatggtgtctcacgcctgtaatcccagaagtttgggaaatcaaggcaggagaattgcttggggccaagagttcaagacctgcctgggcaacatagtgagacctcatctcttaaaaaagaaaaattagctggtgctgtgcacctgtagttccagttacttgggaggctaaggctagaggattgattgaggctgcagtgatcatgacagcgtactctgcactccagcctgagcaacagaggtagaacctgtgtct

SEQ ID NO: 351111 - DNA, 3256 bp, Homo sapiens
cggcggcgggcgaggcgcctgcagccgggcgcaagatgatgaagtttcggttccggcggcagggcgccgacccgcagcgcgagaagctcaagcaggagcttttcgccttcaacaagactgtggagcatggcttccccaatcagcccagcgccctggccttcgacccggaacttcgcatcatggccatcggcaccaggtctggggctgtcaagatctatggtgcacctggcgtggagttcacaggcctgcaccgggatgcagccactgtcacacagatgcacttcttgaccggccagggccgcctcctgtccctgcttgatgacagcagtctgcatctctgggagattgtccaccataatggctgtgcccacctggaagaagcactcagtttccagctgcccagccggcccggctttgatggtgccagtgctccgctcagccttacccgagtcacagtggtcctgctggtggctgccggcgacatagcagccctgggcactgagggcagcagtgtcttcttcctggatgttaccaccctgaccctgctcgaggggcagacgcttgccccaggcgaggttctgcgcagcgtgccagacgactaccgctgtgggaaggcactgggccccgtggagtcactccagggacacctgcgggaccccacaaagattctcattggctacagccggggcctgctggtcatctggaaccaggcctcgcagtgtgtggaccacatcttcctggggaaccagcagctggagagcctatgctgggggcgtgatagcagcactgtggtcagctcacacagcgatggcagctatgctgtctggtctgtggatgccggcagcttcccaacgctgcagcccacggtagccaccacaccttacggcccctttccctgcaaggccattaacaagattctgtggcggaactgtgaatctgggggccactttatcatcttcagcggtggcatgccccgtgccagctatggtgaccgccactgtgtaagtgtgcttcgagccgagacattggtgacgctggacttcacttcccgcatcatcgacttcttcacagtgcacagcacacggcccgaggatgaatttgatgacccccaggccctggctgtgctgctggaagaggagctggtggtgctggacctgcagactcctggctggccagctgtgcctgccccatacctggccccgctgcactcctctgcaatcacttgctcggcccacgtggccagtgtccccgccaagctgtgggcccgcattgtgagcgctggcgagcagcagagcccccagcctgtctccagtgccttgagctggcccatcactgggggccgaaacctggcccaggagccgtcacagcgagggctgctgctgacgggccatgaggacggcaccgtgaggttctgggatgcctcgggtgtggcgctgcggccgctctataagctgagcacagctggcctcttccagacagactgtgagcacgctgacagcctggcccaggctgccgaggacgactggccacccttccgcaaggtgggctgcttcgatccctacagtgacgatccccggcttggcgtgcagaaggttgctctctgcaagtatacagcccagatggtggtggctggcactgcaggccaggtgctggtactggagcttagtgatgtgccggtggagcaggcggtcagcgtggccatcatagacctcctccaggaccgcgagggcttcacatggaagggccacgagcggctgagcccacgcacggggccgctgccctggcctgctggcttccagccccgtgtcctggtgcagtgcctgccgccagctgctgtaaccgctgtcacactccacaccgagtggagcctcgtggcttttggcaccagtcatggctttggcctcttcgagccctgtgctggccaggtgcactcttcaccccaatgactccctggccatggagggtccgctctcccgggtgaagtctctcaagaagtcactgcgccagtctttccggcgcattcgcaagagtcgtgtctctggcaagaagcgggctgctaatgccagcagcaagttgcaggaagccaatgcacagctggctgagcaggcctgcccccacgacgtggagatgacgcccgtgcagcgccgcattgagccccgctctgccgatgactccttgtcgggtgtcgtgcgttgcctatactttgccgacacattccttcgagatggggcccaccacgggcccaccatgtgggctggcaccaactcaggctctgtgttcgcctatgcactggaggtgccggcagcagcagtgggtggtgagaagcggcctgagcaagcggtggaggccgtgctgggcaaggaggtgcagctgatgcaccgggcgcctgtggtggccattgccgtgttggacgggcgtggccgcccactgcccgagccctacgaggcctcacgggacctggcgcaggcacctgacatgcagggtggtcacgctgtgctcatcgcatctgaggagcagttcaaggtgttcacactgcccaaggtgagcgcgaagaccaagttcaagctgacggcccatgagggctgtcgtgtgcgcaaggtggcactggccacgtttgccagtgtggcctgcgaggactatgctgagacctgcctggcctgcctcaccaacctgggtgacgtccacgtcttctcggtgcctggcctgcggccccaggtgcactattcctgcatccggaaggaggacatcagcggcatcgcttcgtgcgtctttacgcgccatggccagggcttttacctgatatccccatcagaatttgaacgcttctccctaagtgcccggaacatcacagagccgctctgctctctggacattaactggccccgcgatgccacccaggccagttacaggatccgagagtcacccaagctgagccaggctaacgggaccccaagcatcctgctggccccacagagccttgatggaagccctgatccagcccacagcatgggacctgacaccccggagccacccgaggctgcactctcacccatgtccatcgactcagccaccagtgctgacaccacgctggacacgacaggggacgtcacagtggaagatgtgaaggatttcctgggctcctctgaggagtcagagaagaacctgaggaacctggcagaagacgaggcccacgcctgtgccatcctgatcaaatgagaaggcagaactatccgctgaggaacctggcagaagacga

SEQ ID NO: 351112 - DNA, 4625 bp, Homo sapiens
  misc_feature (4573)..(4573): n is a, c, g, or t
  misc_feature (4590)..(4590): n is a, c, g, or t
cggcggcgggcgaggcgcctgcagccgggcgcaagatgatgaagtttcggttccggcggcagggcgccgacccgcagcgcgagaagctcaagcaggagcttttcgccttcaacaagactgtggagcatggcttccccaatcagcccagcgccctggccttcgacccggaacttcgcatcatggccatcggcaccaggtctggggctgtcaagatctatggtgcacctggcgtggagttcacaggcctgcaccgggatgcagccactgtcacacagatgcacttcttgaccggccagggccgcctcctgtccctgcttgatgacagcagtctgcatctctgggagattgtccaccataatggctgtgcccacctggaagaagcactcagtttccagctgcccagccggcccggctttgatggtgccagtgctccgctcagccttacccgagtcacagtggtcctgctggtggctgccggcgacatagcagccctgggcactgagggcagcagtgtcttcttcctggatgttaccaccctgaccctgctcgaggggcagacgcttgccccaggcgaggttctgcgcagcgtgccagacgactaccgctgtgggaaggcactgggccccgtggagtcactccagggacacctgcgggaccccacaaagattctcattggctacagccggggcctgctggtcatctggaaccaggcctcgcagtgtgtggaccacatcttcctggggaaccagcagctggagagcctatgctgggggcgtgatagcagcactgtggtcagctcacacagcgatggcagctatgctgtctggtctgtggatgccggcagcttcccaacgctgcagcccacggtagccaccacaccttacggcccctttccctgcaaggccattaacaagattctgtggcggaactgtgaatctgggggccactttatcatcttcagcggtggcatgccccgtgccagctatggtgaccgccactgtgtaagtgtgcttcgagccgagacattggtgacgctggacttcacttcccgcatcatcgacttcttcacagtgcacagcacacggcccgaggatgaatttgatgacccccaggccctggctgtgctgctggaagaggagctggtggtgctggacctgcagactcctggctggccagctgtgcctgccccatacctggccccgctgcactcctctgcaatcacttgctcggcccacgtggccagtgtccccgccaagctgtgggcccgcattgtgagcgctggcgagcagcagagcccccagcctgtctccagtgccttgagctggcccatcactgggggccgaaacctggcccaggagccgtcacagcgagggctgctgctgacgggccatgaggacggcaccgtgaggttctgggatgcctcgggtgtggcgctgcggccgctctataagctgagcacagctggcctcttccagacagactgtgagcacgctgacagcctggcccaggctgccgaggacgactggccacccttccgcaaggtgggctgcttcgatccctacagtgacgatccccggcttggcgtgcagaaggttgctctctgcaagtatacagcccagatggtggtggctggcactgcaggccaggtgctggtactggagcttagtgatgtgccggtggagcaggcggtcagcgtggccatcatagacctcctccaggaccgcgagggcttcacatggaagggccacgagcggctgagcccacgcacggggccgctgccctggcctgctggcttccagccccgtgtcctggtgcagtgcctgccgccagctgctgtaaccgctgtcacactccacaccgagtggagcctcgtggcttttggcaccagtcatggctttggcctcttcgactaccagcgcaagagccctgtgctggccaggtgcactcttcaccccaatgactccctggccatggagggtccgctctcccgggtgaagtctctcaagaagtcactgcgccagtctttccggcgcattcgcaagagtcgtgtctctggcaagaagcgggctgctaatgccagcagcaagttgcaggaagccaatgcacagctggctgagcaggcctgcccccacgacgtggagatgacgcccgtgcagcgccgcattgagccccgctctgccgatgactccttgtcgggtgtcgtgcgttgcctatactttgccgacacattccttcgagatggggcccaccacgggcccaccatgtgggctggcaccaactcaggctctgtgttcgcctatgcactggaggtgccggcagcagcagtgggtggtgagaagcggcctgagcaagcggtggaggccgtgctgggcaaggaggtgcagctgatgcaccgggcgcctgtggtggccattgccgtgttggacgggcgtggccgcccactgcccgagccctacgaggcctcacgggacctggcgcaggcacctgacatgcagggtggtcacgctgtgctcatcgcatctgaggagcagttcaaggtgttcacactgcccaaggtgagcgcgaagaccaagttcaagctgacggcccatgagggctgtcgtgtgcgcaaggtggcactggccacgtttgccagtgtggcctgcgaggactatgctgagacctgcctggcctgcctcaccaacctgggtgacgtccacgtcttctcggtgcctggcctgcggccccaggtgcactattcctgcatccggaaggaggacatcagcggcatcgcttcgtgcgtctttacgcgccatggccagggcttttacctgatatccccatcagaatttgaacgcttctccctaagtgcccggaacatcacagagccgctctgctctctggacattaactggccccgcgatgccacccaggccagttacaggatccgagagtcacccaagctgagccaggctaacgggaccccaagcatcctgctggccccacagagccttgatggaagccctgatccagcccacagcatgggacctgacaccccggagccacccgaggctgcactctcacccatgtccatcgactcagccaccagtgctgacaccacgctggacacgacaggggacgtcacagtggaagatgtgaaggatttcctgggctcctctgaggagtcagagaagaacctgaggaacctggcagaagacgaggcccacgcctgtgccatcctgatcaaatgaggaaggccagaactatcccgacctccacctgccctgctcggagctggagtgctggatccctggcacctgcctggccccttaacatagaaccacgcctgctaacctgtaggctccactgggacctgctgtcctgtcccgcctgaccctgggccctggagcagcaccagccccagggtgtgggcctgggacctgggccagaactgagccctcctgcaggcatttggctgccctgggggcccactgcctagggaagaggacaggtggggcccagcacctgtgccacctccccccctccacacaccatccttccccctcactttgcagagtatttttccttttttttttttttcttaaagacggagtcttgctctgtcgcccaggctggagtgcagtggccccatctctgctcactgcaagccccgccttctgggttcccgccattcttctgcctcagcctcccaagtagctgggactacaggcgcccaccaccacgcccagctaattttttctgtatttttagtagagatggggtttcaccatgttagccaggatggtctcgatctcctgacctcgtgatccacccacctcagcctcccaaagtgctgggattacaggcgtgagccaccatgcccagccctgcaaagagtatttttctagcgcctgggctggacagttgtttctaaaactaaactattttggtacctgcttctgggccagtccccagcctgtcatgagtgtgtgtgtgcgggcatggatgtgactgggagctctgctgggcacccacatctggggcctagtcaggtgtgtgtgtccggcgggggggggggggggggggggtcaagatgagtttccctgtagattgtaccttggggtttttttctgtcgttttgttaaaattagcgccattttaatattaaaaatactgatttttaatattgaaaataaaagcatttaatatctcttaaagggcatccacatctgctttatccctagcggaagagtgagggggcttcacacgtgcactcacactgtggagagagttggatttcccagacccctgagggcacctgtcagggtcatccccattggtgctgcttgaggctactggggactgtggcactggacgtggctggagcaggtggtgtcacctgagtacattctttgctagcagacagtggatgaggccccttcctcttcctcaccaagcctggggctgtgccagcctgtcttaggccagggccttgcagaaggcgctccaggcgtggaagcagcgggtaaaggcgtgctgctcattgcccttgcggaccaggcgcagccggcgcggccgcaaagtttatttcccntttagttgaagggttanttttagcttttggcatttggccttctttttacaaa

SEQ ID NO: 351113 - DNA, 4083 bp, Homo sapiens
  misc_feature (4031)..(4031): n is a, c, g, or t
  misc_feature (4048)..(4048): n is a, c, g, or t
cggcggcgggcgaggcgcctgcagccgggcgcaagatgatgaagtttcggttccggcggcagggcgccgacccgcagcgcgagaagctcaagcaggagcttttcgccttcaacaagactgtggagcatggcttccccaatcagcccagcgccctggccttcgacccggaacttcgcatcatggccatcggcaccaggtctggggctgtcaagatctatggtgcacctggcgtggagttcacaggcctgcaccgggatgcagccactgtcacacagatgcacttcttgaccggccagggccgcctcctgtccctgcttgatgacagcagtctgcatctctgggagattgtccaccataatggctgtgcccacctggaagaagcactcagtttccagctgcccagccggcccggctttgatggtgccagtgctccgctcagccttacccgagtcacagtggtcctgctggtggctgccggcgacatagcagccctgggcactgagggcagcagtgtcttcttcctggatgttaccaccctgaccctgctcgaggggcagacgcttgccccaggcgaggttctgcgcagcgtgccagacgactaccgctgtgggaaggcactgggccccgtggagtcactccagggacacctgcgggaccccacaaagattctcattggctacagccggggcctgctggtcatctggaaccaggcctcgcagtgtgtggaccacatcttcctggggaaccagcagctggagagcctatgctgggggcgtgatagcagcactgtggtcagctcacacagcgatggcagctatgctgtctggtctgtggatgccggcagcttcccaacgctgcagcccacggtagccaccacaccttacggcccctttccctgcaaggccattaacaagattctgtggcggaactgtgaatctgggggccactttatcatcttcagcggtggcatgccccgtgccagctatggtgaccgccactgtgtaagtgtgcttcgagccgagacattggtgacgctggacttcacttcccgcatcatcgacttcttcacagtgcacagcacacggcccgaggatgaatttgatgacccccaggccctggctgtgctgctggaagaggagctggtggtgctggacctgcagactcctggctggccagctgtgcctgccccatacctggccccgctgcactcctctgcaatcacttgctcggcccacgtggccagtgtccccgccaagctgtgggcccgcattgtgagcgctggcgagcagcagagcccccagcctgtctccagtgccttgagctggcccatcactgggggccgaaacctggcccaggagccgtcacagcgagggctgctgctgacgggccatgaggacggcaccgtgaggttctgggatgcctcgggtgtggcgctgcggccgctctataagctgagcacagctggcctcttccagacagactgtgagcacgctgacagcctggcccaggctgccgaggacgactggccacccttccgcaaggtgggctgcttcgatccctacagtgacgatccccggcttggcgtgcagaaggttgctctctgcaagtatacagcccagatggtggtggctggcactgcaggccaggtgctggtactggagcttagtgatgtgccggtggagcaggcggtcagcgtggccatcatagacctcctccaggaccgcgagggcttcacatggaagggccacgagcggctgagcccacgcacggggccgctgccctggcctgctggcttccagccccgtgtcctggtgcagtgcctgccgccagctgctgtaaccgctgtcacactccacaccgagtggagcctcgtggcttttggcaccagtcatggctttggcctcttcgactaccagcgcaagagccctgtgctggccaggtgcactcttcaccccaatgactccctggccatggagggtccgctctcccgggtgaagtctctcaagaagtcactgcgccagtctttccggcgcattcgcaagagtcgtgtctctggcaagaagcgggctgctaatgccagcagcaagttgcaggaagccaatgcacagctggctgagcaggcctgcccccacgacgtggagatgacgcccgtgcagcgccgcattgagccccgctctgccgatgactccttgtcgggtgtcgtgcgttgcctatactttgccgacacattccttcgagatggggcccaccacgggcccaccatgtgggctggcaccaactcaggctctgtgttcgcctatgcactggaggtgccggcagcagcagtgggtggtgagaagcggcctgagcaagcggtggaggccgtgctgggcaaggaggtgcagctgatgcaccgggcgcctgtggtggccattgccgtgttggacgggcgtggccgcccactgcccgagccctacgaggcctcacgggacctggcgcaggcacctgacatgcagggtggtcacgctgtgctcatcgcatctgaggagcagttcaaggtgttcacactgcccaaggtgagcgcgaagaccaagttcaagctgacggcccatgagggctgtcgtgtgcgcaaggtggcactggccacgtttgccagtgtggcctgcgaggactatgctgagacctgcctggcctgcctcaccaacctgggtgacgtccacgtcttctcggtgcctggcctgcggccccaggtgcactattcctgcatccggaaggaggacatcagcggcatcgcttcgtgcgtctttacgcgccatggccagggcttttacctgatatccccatcagaatttgaacgcttctccctaagtgcccggaacatcacagagccgctctgctctctggacattaactggccccgcgatgccacccaggccagttacaggatccgagagtcacccaagctgagccaggctaacgggaccccaagcatcctgctggccccacagagccttgatggaagccctgatccagcccacagcatgggacctgacaccccggagccacccgaggctgcactctcacccatgtccatcgactcagccaccagtgctgacaccacgctggacacgacaggggacgtcacagtggaagatgtgaaggatttcctggggaaggccagaactatcccgacctccacctgccctgctcggagctggagtgctggatccctggcacctgcctggccccttaacatagaaccacgcctgctaacctgtaggctccactgggacctgctgtcctgtcccgcctgaccctgggccctggagcagcaccagccccagggtgtgggcctgggacctgggccagaactgagccctcctgcaggcatttggctgccctgggggcccactgcctagggaagaggacaggtggggcccagcacctgtgtgtgcgggcatggatgtgactgggagctctgctgggcacccacatctggggcctagtcaggtgtgtgtgtccggcgggggggggggggggggggggtcaagatgagtttccctgtagattgtaccttggggtttttttctgtcgttttgttaaaattagcgccattttaatattaaaaatactgatttttaatattgaaaataaaagcatttaatatctcttaaagggcatccacatctgctttatccctagcggaagagtgagggggcttcacacgtgcactcacactgtggagagagttggatttcccagacccctgagggcacctgtcagggtcatccccattggtgctgcttgaggctactggggactgtggcactggacgtggctggagcaggtggtgtcacctgagtacattctttgctagcagacagtggatgaggccccttcctcttcctcaccaagcctggggctgtgccagcctgtcttaggccagggccttgcagaaggcgctccaggcgtggaagcagcgggtaaaggcgtgctgctcattgcccttgcggaccaggcgcagccggcgcggccgcaaagtttatttcccntttagttgaagggttanttttagcttttggcatttggccttctttttacaaa

SEQ ID NO: 351114 - DNA, 4140 bp, Homo sapiens
  misc_feature (4088)..(4088): n is a, c, g, or t
  misc_feature (4105)..(4105): n is a, c, g, or t
cccagcccctcacaccccacctgagcaggtggatgggcttgtaccctcactcccttccccttgttccctgcagtgctccgctcagccttacccgagtcacagtggtcctgctggtcatctggaaccaggcctcgcagtgtgtggaccacatcttcctggggaaccaggtatgtaggtgaggcctgtgtcccctcagcctgggccccttgtgcatgcccaccatggctcatgcctgcctgcctgcctgcccctgcctgcccgcagcagctggagagcctatgctgggggcgtgatagcagcactgtggtcagctcacacagcgatggcagctatgctgtctggtctgtggatgccggcagcttcccaacgctgcagcccacggtagccaccacaccttacggcccctttccctgcaaggccattaacaagattctgtggcggaactgtgaatctgggggccactttatcatcttcagcggtggcatgccccgtgccagctatggtgaccgccactgtgtaagtgtgcttcgagccgagacattggtgacgctggacttcacttcccgcatcatcgacttcttcacagtgcacagcacacggcccgaggatgaatttgatgacccccaggccctggctgtgctgctggaagaggagctggtggtgctggacctgcagactcctggctggccagctgtgcctgccccatacctggccccgctgcactcctctgcaatcacttgctcggcccacgtggccagtgtccccgccaagctgtgggcccgcattgtgagcgctggcgagcagcagagcccccagcctgtctccagtgccttgagctggcccatcactgggggccgaaacctggcccaggagccgtcacagcgagggctgctgctgacgggccatgaggacggcaccgtgaggttctgggatgcctcgggtgtggcgctgcggccgctctataagctgagcacagctggcctcttccagacagactgtgagcacgctgacagcctggcccaggctgccgaggacgactggccacccttccgcaaggtgggctgcttcgatccctacagtgacgatccccggcttggcgtgcagaaggttgctctctgcaagtatacagcccagatggtggtggctggcactgcaggccaggtgctggtactggagcttagtgatgtgccggtggagcaggcggtcagcgtggccatcatagacctcctccaggaccgcgagggcttcacatggaagggccacgagcggctgagcccacgcacggggccgctgccctggcctgctggcttccagccccgtgtcctggtgcagtgcctgccgccagctgctgtaaccgctgtcacactccacaccgagtggagcctcgtggcttttggcaccagtcatggctttggcctcttcgactaccagcgcaagagccctgtgctggccaggtgcactcttcaccccaatgactccctggccatggagggtccgctctcccgggtgaagtctctcaagaagtcactgcgccagtctttccggcgcattcgcaagagtcgtgtctctggcaagaagcgggctgctaatgccagcagcaagttgcaggaagccaatgcacagctggctgagcaggcctgcccccacgacgtggagatgacgcccgtgcagcgccgcattgagccccgctctgccgatgactccttgtcgggtgtcgtgcgttgcctatactttgccgacacattccttcgagatggggcccaccacgggcccaccatgtgggctggcaccaactcaggctctgtgttcgcctatgcactggaggtgccggcagcagcagtgggtggtgagaagcggcctgagcaagcggtggaggccgtgctgggcaaggaggtgcagctgatgcaccgggcgcctgtggtggccattgccgtgttggacgggcgtggccgcccactgcccgagccctacgaggcctcacgggacctggcgcaggcacctgacatgcagggtggtcacgctgtgctcatcgcatctgaggagcagttcaaggtgttcacactgcccaaggtgagcgcgaagaccaagttcaagctgacggcccatgagggctgtcgtgtgcgcaaggtggcactggccacgtttgccagtgtggcctgcgaggactatgctgagacctgcctggcctgcctcaccaacctgggtgacgtccacgtcttctcggtgcctggcctgcggccccaggtgcactattcctgcatccggaaggaggacatcagcggcatcgcttcgtgcgtctttacgcgccatggccagggcttttacctgatatccccatcagaatttgaacgcttctccctaagtgcccggaacatcacagagccgctctgctctctggacattaactggccccgcgatgccacccaggccagttacaggatccgagagtcacccaagctgagccaggctaacgggaccccaagcatcctgctggccccacagagccttgatggaagccctgatccagcccacagcatgggacctgacaccccggagccacccgaggctgcactctcacccatgtccatcgactcagccaccagtgctgacaccacgctggacacgacaggggacgtcacagtggaagatgtgaaggatttcctgggctcctctgaggagtcagagaagaacctgaggaacctggcagaagacgaggcccacgcctgtgccatcctgatcaaatgaggaaggccagaactatcccgacctccacctgccctgctcggagctggagtgctggatccctggcacctgcctggccccttaacatagaaccacgcctgctaacctgtaggctccactgggacctgctgtcctgtcccgcctgaccctgggccctggagcagcaccagccccagggtgtgggcctgggacctgggccagaactgagccctcctgcaggcatttggctgccctgggggcccactgcctagggaagaggacaggtggggcccagcacctgtgccacctccccccctccacacaccatccttccccctcactttgcagagtatttttccttttttttttttttcttaaagacggagtcttgctctgtcgcccaggctggagtgcagtggccccatctctgctcactgcaagccccgccttctgggttcccgccattcttctgcctcagcctcccaagtagctgggactacaggcgcccaccaccacgcccagctaattttttctgtatttttagtagagatggggtttcaccatgttagccaggatggtctcgatctcctgacctcgtgatccacccacctcagcctcccaaagtgctgggattacaggcgtgagccaccatgcccagccctgcaaagagtatttttctagcgcctgggctggacagttgtttctaaaactaaactattttggtacctgcttctgggccagtccccagcctgtcatgagtgtgtgtgtgcgggcatggatgtgactgggagctctgctgggcacccacatctggggcctagtcaggtgtgtgtgtccggcgggggggggggggggggggggtcaagatgagtttccctgtagattgtaccttggggtttttttctgtcgttttgttaaaattagcgccattttaatattaaaaatactgatttttaatattgaaaataaaagcatttaatatctcttaaagggcatccacatctgctttatccctagcggaagagtgagggggcttcacacgtgcactcacactgtggagagagttggatttcccagacccctgagggcacctgtcagggtcatccccattggtgctgcttgaggctactggggactgtggcactggacgtggctggagcaggtggtgtcacctgagtacattctttgctagcagacagtggatgaggccccttcctcttcctcaccaagcctggggctgtgccagcctgtcttaggccagggccttgcagaaggcgctccaggcgtggaagcagcgggtaaaggcgtgctgctcattgcccttgcggaccaggcgcagccggcgcggccgcaaagtttatttcccntttagttgaagggttanttttagcttttggcatttggccttctttttacaaa

SEQ ID NO: 351115 - DNA, 4060 bp, Homo sapiens
  misc_feature (4008)..(4008): n is a, c, g, or t
  misc_feature (4025)..(4025): n is a, c, g, or t
atactatactatactattcaattctttcaattctagtaatccaagatgatgaagtttcggttccggcggcagggcgccgacccgcagcgcgagaagctcaagcaggagcttttcgccttcaacaagactgtggagcatggcttccccaatcagcccagcgccctggccttcgacccggaacttcgcatcatggccatcggcaccaggtctggggctgtcaagatctatggtgcacctggcgtggagttcacaggcctgcaccgggatgcagccactgtcacacagatgcacttcttgaccggccagggccgcctcctgtccctgcttgatgacagcagtctgcatctctgggagattgtccaccataatggctgtgcccacctggaagaagcactcagtttccagctgcccagccggcccggctttgatggtgccagtgctccgctcagccttacccgagtcacagtggtcctgctggtggctgccggcgacatagcagccctgggcactgagggcagcagtgtcttcttcctggatgttaccaccctgaccctgctcgaggggcagacgcttgccccaggcgaggttctgcgcagcgtgccagacgactaccgctgtgggaaggcactgggccccgctgcactcctctgcaatcacttgctcggcccacgtggccagtgtccccgccaagctgtgggcccgcattgtgagcgctggcgagcagcagagcccccagcctgtctccagtgccttgagctggcccatcactgggggccgaaacctggcccaggagccgtcacagcgagggctgctgctgacgggccatgaggacggcaccgtgaggttctgggatgcctcgggtgtggcgctgcggccgctctataagctgagcacagctggcctcttccagacagactgtgagcacgctgacagcctggcccaggctgccgaggacgactggccacccttccgcaaggtgggctgcttcgatccctacagtgacgatccccggcttggcgtgcagaaggttgctctctgcaagtatacagcccagatggtggtggctggcactgcaggccaggtgctggtactggagcttagtgatgtgccggtggagcaggcggtcagcgtggccatcatagacctcctccaggaccgcgagggcttcacatggaagggccacgagcggctgagcccacgcacggggccgctgccctggcctgctggcttccagccccgtgtcctggtgcagtgcctgccgccagctgctgtaaccgctgtcacactccacaccgagtggagcctcgtggcttttggcaccagtcatggctttggcctcttcgactaccagcgcaagagccctgtgctggccaggtgcactcttcaccccaatgactccctggccatggagggtccgctctcccgggtgaagtctctcaagaagtcactgcgccagtctttccggcgcattcgcaagagtcgtgtctctggcaagaagcgggctgctaatgccagcagcaagttgcaggaagccaatgcacagctggctgagcaggcctgcccccacgacgtggagatgacgcccgtgcagcgccgcattgagccccgctctgccgatgactccttgtcgggtgtcgtgcgttgcctatactttgccgacacattccttcgagatggggcccaccacgggcccaccatgtgggctggcaccaactcaggctctgtgttcgcctatgcactggaggtgccggcagcagcagtgggtggtgagaagcggcctgagcaagcggtggaggccgtgctgggcaaggaggtgcagctgatgcaccgggcgcctgtggtggccattgccgtgttggacgggcgtggccgcccactgcccgagccctacgaggcctcacgggacctggcgcaggcacctgacatgcagggtggtcacgctgtgctcatcgcatctgaggagcagttcaaggtgttcacactgcccaaggtgagcgcgaagaccaagttcaagctgacggcccatgagggctgtcgtgtgcgcaaggtggcactggccacgtttgccagtgtggcctgcgaggactatgctgagacctgcctggcctgcctcaccaacctgggtgacgtccacgtcttctcggtgcctggcctgcggccccaggtgcactattcctgcatccggaaggaggacatcagcggcatcgcttcgtgcgtctttacgcgccatggccagggcttttacctgatatccccatcagaatttgaacgcttctccctaagtgcccggaacatcacagagccgctctgctctctggacattaactggccccgcgatgccacccaggccagttacaggatccgagagtcacccaagctgagccaggctaacgggaccccaagcatcctgctggccccacagagccttgatggaagccctgatccagcccacagcatgggacctgacaccccggagccacccgaggctgcactctcacccatgtccatcgactcagccaccagtgctgacaccacgctggacacgacaggggacgtcacagtggaagatgtgaaggatttcctgggctcctctgaggagtcagagaagaacctgaggaacctggcagaagacgaggcccacgcctgtgccatcctgatcaaatgaggaaggccagaactatcccgacctccacctgccctgctcggagctggagtgctggatccctggcacctgcctggccccttaacatagaaccacgcctgctaacctgtaggctccactgggacctgctgtcctgtcccgcctgaccctgggccctggagcagcaccagccccagggtgtgggcctgggacctgggccagaactgagccctcctgcaggcatttggctgccctgggggcccactgcctagggaagaggacaggtggggcccagcacctgtgccacctccccccctccacacaccatccttccccctcactttgcagagtatttttccttttttttttttttcttaaagacggagtcttgctctgtcgcccaggctggagtgcagtggccccatctctgctcactgcaagccccgccttctgggttcccgccattcttctgcctcagcctcccaagtagctgggactacaggcgcccaccaccacgcccagctaattttttctgtatttttagtagagatggggtttcaccatgttagccaggatggtctcgatctcctgacctcgtgatccacccacctcagcctcccaaagtgctgggattacaggcgtgagccaccatgcccagccctgcaaagagtatttttctagcgcctgggctggacagttgtttctaaaactaaactattttggtacctgcttctgggccagtccccagcctgtcatgagtgtgtgtgtgcgggcatggatgtgactgggagctctgctgggcacccacatctggggcctagtcaggtgtgtgtgtccggcgggggggggggggggggggggtcaagatgagtttccctgtagattgtaccttggggtttttttctgtcgttttgttaaaattagcgccattttaatattaaaaatactgatttttaatattgaaaataaaagcatttaatatctcttaaagggcatccacatctgctttatccctagcggaagagtgagggggcttcacacgtgcactcacactgtggagagagttggatttcccagacccctgagggcacctgtcagggtcatccccattggtgctgcttgaggctactggggactgtggcactggacgtggctggagcaggtggtgtcacctgagtacattctttgctagcagacagtggatgaggccccttcctcttcctcaccaagcctggggctgtgccagcctgtcttaggccagggccttgcagaaggcgctccaggcgtggaagcagcgggtaaaggcgtgctgctcattgcccttgcggaccaggcgcagccggcgcggccgcaaagtttatttcccntttagttgaagggttanttttagcttttggcatttggccttctttttacaaa

SEQ ID NO: 351116 - DNA, 1213 bp, Homo sapiens
  misc_feature (1161)..(1161): n is a, c, g, or t
  misc_feature (1178)..(1178): n is a, c, g, or t
acagcaggtcccagtggagcctacaggttagcaggcatttggctgccctgggggcccactgcctagggaagaggacaggtggggcccagcacctgtgccacctccccccctccacacaccatccttccccctcactttgcagagtatttttccttttttttttttttcttaaagacggagtcttgctctgtcgcccaggctggagtgcagtggccccatctctgctcactgcaagccccgccttctgggttcccgccattcttctgcctcagcctcccaagtagctgggactacaggcgcccaccaccacgcccagctaattttttctgtatttttagtagagatggggtttcaccatgttagccaggatggtctcgatctcctgacctcgtgatccacccacctcagcctcccaaagtgctgggattacaggcgtgagccaccatgcccagccctgcaaagagtatttttctagcgcctgggctggacagttgtttctaaaactaaactattttggtacctgcttctgggccagtccccagcctgtcatgagtgtgtgtgtgcgggcatggatgtgactgggagctctgctgggcacccacatctggggcctagtcaggtgtgtgtgtccggcgggggggggggggggggggggtcaagatgagtttccctgtagattgtaccttggggtttttttctgtcgttttgttaaaattagcgccattttaatattaaaaatactgatttttaatattgaaaataaaagcatttaatatctcttaaagggcatccacatctgctttatccctagcggaagagtgagggggcttcacacgtgcactcacactgtggagagagttggatttcccagacccctgagggcacctgtcagggtcatccccattggtgctgcttgaggctactggggactgtggcactggacgtggctggagcaggtggtgtcacctgagtacattctttgctagcagacagtggatgaggccccttcctcttcctcaccaagcctggggctgtgccagcctgtcttaggccagggccttgcagaaggcgctccaggcgtggaagcagcgggtaaaggcgtgctgctcattgcccttgcggaccaggcgcagccggcgcggccgcaaagtttatttcccntttagttgaagggttanttttagcttttggcatttggccttctttttacaaa

SEQ ID NO: 351117 - DNA, 1944 bp, Homo sapiens
cggcggcgggcgaggcgcctgcagccgggcgcaagatgatgaagtttcggttccggcggcagggcgccgacccgcagcgcgagaagctcaagcaggagcttttcgccttcaacaagactgtggagcatggcttccccaatcagcccagcgccctggccttcgacccggaacttcgcatcatggccatcggcaccaggtctggggctgtcaagatctatggtgcacctggcgtggagttcacaggcctgcaccgggatgcagccactgtcacacagatgcacttcttgaccggccagggccgcctcctgtccctgcttgatgacagcagtctgcatctctgggagattgtccaccataatggctgtgcccacctggaagaagcactcagtttccagctgcccagccggcccggctttgatggtgccagtgctccgctcagccttacccgagtcacagtggtcctgctggtggctgccggcgacatagcagccctgggcactgagggcagcagtgtcttcttcctggatgttaccaccctgaccctgctcgaggggcagacgcttgccccaggcgaggttctgcgcagcgtgccagacgactaccgctgtgggaaggcactgggccccgtggagtcactccagggacacctgcgggaccccacaaagattctcattggctacagccggggcctgctggtcatctggaaccaggcctcgcagtgtgtggaccacatcttcctggggaaccagcagctggagagcctatgctgggggcgtgatagcagcactgtggtcagctcacacagcgatggcagctatgctgtctggtctgtggatgccggcagcttcccaacgctgcagcccacggtagccaccacaccttacggcccctttccctgcaaggccattaacaagattctgtggcggaactgtgaatctgggggccactttatcatcttcagcggtggcatgccccgtgccagctatggtgaccgccactgtgtaagtgtgcttcgagccgagacattggtgacgctggacttcacttcccgcatcatcgacttcttcacagtgcacagcacacggcccgaggatgaatttgatgacccccaggccctggctgtgctgctggaagaggagctggtggtgctggacctgcagactcctggctggccagctgtgcctgccccatacctggccccgctgcactcctctgcaatcacttgctcggcccacgtggccagtgtccccgccaagctgtgggcccgcattgtgagcgctggcgagcagcagagcccccagcctgtctccagtgccttgagctggcccatcactgggggccgaaacctggcccaggagccgtcacagcgagggctgctgctgacgggccatgaggacggcaccgtgaggttctgggatgcctcgggtgtggcgctgcggccgctctataagctgagcacagctggcctcttccagacagactgtgagcacgctgacagcctggcccaggctgccgaggacgactggccacccttccgcaaggtgggctgcttcgatccctacagtgacgatccccggcttggcgtgcagaaggttgctctctgcaagtatacagcccagatggtggtggctggcactgcaggccaggtagggctgggtgtcccctgggttggagatgtcagggagggctttctggaagagatgagctggagggtctggtggaaagggagatggactggcacaggcaaaagccaaggtgggaatagggctctgggtggggctggctggggtgaggacagatgggaagtgggcctgtcgctgggggaaccacagtgttgaggggagggaactcatgtcagtgctgtgctccggcactcacatgacatacaggaggtgctcaatgtgtccttattgctaaatgggagatagaggctcagggtaaggg

SEQ ID NO: 351118 - DNA, 4635 bp, Homo sapiens
  misc_feature (4583)..(4583): n is a, c, g, or t
  misc_feature (4600)..(4600): n is a, c, g, or t
atactatactatactattcaattctttcaattctagtaatccaagatgatgaagtttcggttccggcggcagggcgccgacccgcagcgcgagaagctcaagcaggagcttttcgccttcaacaagactgtggagcatggcttccccaatcagcccagcgccctggccttcgacccggaacttcgcatcatggccatcggcaccaggtctggggctgtcaagatctatggtgcacctggcgtggagttcacaggcctgcaccgggatgcagccactgtcacacagatgcacttcttgaccggccagggccgcctcctgtccctgcttgatgacagcagtctgcatctctgggagattgtccaccataatggctgtgcccacctggaagaagcactcagtttccagctgcccagccggcccggctttgatggtgccagtgctccgctcagccttacccgagtcacagtggtcctgctggtggctgccggcgacatagcagccctgggcactgagggcagcagtgtcttcttcctggatgttaccaccctgaccctgctcgaggggcagacgcttgccccaggcgaggttctgcgcagcgtgccagacgactaccgctgtgggaaggcactgggccccgtggagtcactccagggacacctgcgggaccccacaaagattctcattggctacagccggggcctgctggtcatctggaaccaggcctcgcagtgtgtggaccacatcttcctggggaaccagcagctggagagcctatgctgggggcgtgatagcagcactgtggtcagctcacacagcgatggcagctatgctgtctggtctgtggatgccggcagcttcccaacgctgcagcccacggtagccaccacaccttacggcccctttccctgcaaggccattaacaagattctgtggcggaactgtgaatctgggggccactttatcatcttcagcggtggcatgccccgtgccagctatggtgaccgccactgtgtaagtgtgcttcgagccgagacattggtgacgctggacttcacttcccgcatcatcgacttcttcacagtgcacagcacacggcccgaggatgaatttgatgacccccaggccctggctgtgctgctggaagaggagctggtggtgctggacctgcagactcctggctggccagctgtgcctgccccatacctggccccgctgcactcctctgcaatcacttgctcggcccacgtggccagtgtccccgccaagctgtgggcccgcattgtgagcgctggcgagcagcagagcccccagcctgtctccagtgccttgagctggcccatcactgggggccgaaacctggcccaggagccgtcacagcgagggctgctgctgacgggccatgaggacggcaccgtgaggttctgggatgcctcgggtgtggcgctgcggccgctctataagctgagcacagctggcctcttccagacagactgtgagcacgctgacagcctggcccaggctgccgaggacgactggccacccttccgcaaggtgggctgcttcgatccctacagtgacgatccccggcttggcgtgcagaaggttgctctctgcaagtatacagcccagatggtggtggctggcactgcaggccaggtgctggtactggagcttagtgatgtgccggtggagcaggcggtcagcgtggccatcatagacctcctccaggaccgcgagggcttcacatggaagggccacgagcggctgagcccacgcacggggccgctgccctggcctgctggcttccagccccgtgtcctggtgcagtgcctgccgccagctgctgtaaccgctgtcacactccacaccgagtggagcctcgtggcttttggcaccagtcatggctttggcctcttcgactaccagcgcaagagccctgtgctggccaggtgcactcttcaccccaatgactccctggccatggagggtccgctctcccgggtgaagtctctcaagaagtcactgcgccagtctttccggcgcattcgcaagagtcgtgtctctggcaagaagcgggctgctaatgccagcagcaagttgcaggaagccaatgcacagctggctgagcaggcctgcccccacgacgtggagatgacgcccgtgcagcgccgcattgagccccgctctgccgatgactccttgtcgggtgtcgtgcgttgcctatactttgccgacacattccttcgagatggggcccaccacgggcccaccatgtgggctggcaccaactcaggctctgtgttcgcctatgcactggaggtgccggcagcagcagtgggtggtgagaagcggcctgagcaagcggtggaggccgtgctgggcaaggaggtgcagctgatgcaccgggcgcctgtggtggccattgccgtgttggacgggcgtggccgcccactgcccgagccctacgaggcctcacgggacctggcgcaggcacctgacatgcagggtggtcacgctgtgctcatcgcatctgaggagcagttcaaggtgttcacactgcccaaggtgagcgcgaagaccaagttcaagctgacggcccatgagggctgtcgtgtgcgcaaggtggcactggccacgtttgccagtgtggcctgcgaggactatgctgagacctgcctggcctgcctcaccaacctgggtgacgtccacgtcttctcggtgcctggcctgcggccccaggtgcactattcctgcatccggaaggaggacatcagcggcatcgcttcgtgcgtctttacgcgccatggccagggcttttacctgatatccccatcagaatttgaacgcttctccctaagtgcccggaacatcacagagccgctctgctctctggacattaactggccccgcgatgccacccaggccagttacaggatccgagagtcacccaagctgagccaggctaacgggaccccaagcatcctgctggccccacagagccttgatggaagccctgatccagcccacagcatgggacctgacaccccggagccacccgaggctgcactctcacccatgtccatcgactcagccaccagtgctgacaccacgctggacacgacaggggacgtcacagtggaagatgtgaaggatttcctgggctcctctgaggagtcagagaagaacctgaggaacctggcagaagacgaggcccacgcctgtgccatcctgatcaaatgaggaaggccagaactatcccgacctccacctgccctgctcggagctggagtgctggatccctggcacctgcctggccccttaacatagaaccacgcctgctaacctgtaggctccactgggacctgctgtcctgtcccgcctgaccctgggccctggagcagcaccagccccagggtgtgggcctgggacctgggccagaactgagccctcctgcaggcatttggctgccctgggggcccactgcctagggaagaggacaggtggggcccagcacctgtgccacctccccccctccacacaccatccttccccctcactttgcagagtatttttccttttttttttttttcttaaagacggagtcttgctctgtcgcccaggctggagtgcagtggccccatctctgctcactgcaagccccgccttctgggttcccgccattcttctgcctcagcctcccaagtagctgggactacaggcgcccaccaccacgcccagctaattttttctgtatttttagtagagatggggtttcaccatgttagccaggatggtctcgatctcctgacctcgtgatccacccacctcagcctcccaaagtgctgggattacaggcgtgagccaccatgcccagccctgcaaagagtatttttctagcgcctgggctggacagttgtttctaaaactaaactattttggtacctgcttctgggccagtccccagcctgtcatgagtgtgtgtgtgcgggcatggatgtgactgggagctctgctgggcacccacatctggggcctagtcaggtgtgtgtgtccggcgggggggggggggggggggggtcaagatgagtttccctgtagattgtaccttggggtttttttctgtcgttttgttaaaattagcgccattttaatattaaaaatactgatttttaatattgaaaataaaagcatttaatatctcttaaagggcatccacatctgctttatccctagcggaagagtgagggggcttcacacgtgcactcacactgtggagagagttggatttcccagacccctgagggcacctgtcagggtcatccccattggtgctgcttgaggctactggggactgtggcactggacgtggctggagcaggtggtgtcacctgagtacattctttgctagcagacagtggatgaggccccttcctcttcctcaccaagcctggggctgtgccagcctgtcttaggccagggccttgcagaaggcgctccaggcgtggaagcagcgggtaaaggcgtgctgctcattgcccttgcggaccaggcgcagccggcgcggccgcaaagtttatttcccntttagttgaagggttanttttagcttttggcatttggccttctttttacaaa

SEQ ID NO: 351119 - DNA, 4545 bp, Homo sapiens
  misc_feature (4493)..(4493): n is a, c, g, or t
  misc_feature (4510)..(4510): n is a, c, g, or t
cggcggcgggcgaggcgcctgcagccgggcgcaagatgatgaagtttcggttccggcggcagggcgccgacccgcagcgcgagaagctcaagcaggagcttttcgccttcaacaagactgtggagcatggcttccccaatcagcccagcgccctggccttcgacccggaacttcgcatcatggccatcggcaccaggtctggggctgtcaagatctatggtgcacctggcgtggagttcacaggcctgcaccgggatgcagccactgtcacacagatgcacttcttgaccggccagggccgcctcctgtccctgcttgatgacagcagtctgcatctctgggagattgtccaccataatggctgtgcccacctggaagaagcactcagtttccagctgcccagccggcccggctttgatggtgccagtgctccgctcagccttacccgagtcacagtggtcctgctggtggctgccggcgacatagcagccctgggcactgagggcagcagtgtcttcttcctggatgttaccaccctgaccctgctcgaggggcagacgcttgccccaggcgaggttctgcgcagcgtgccagacgactaccgctgtgggaaggcactgggccccgtggagtcactccagggacacctgcgggaccccacaaagattctcattggctacagccggggcctgctggtcatctggaaccaggcctcgcagtgtgtggaccacatcttcctggggaaccagcagctggagagcctatgctgggggcgtgatagcagcactgtggtcagctcacacagcgatggcagctatgctgtctggtctgtggatgccggcagcttcccaacgctgcagcccacggtagccaccacaccttacggcccctttccctgcaaggccattaacaagattctgtggcggaactgtgaatctgggggccactttatcatcttcagcggtggcatgccccgtgccagctatggtgaccgccactgtgtaagtgtgcttcgagccgagacattggtgacgctggacttcacttcccgcatcatcgacttcttcacagtgcacagcacacggcccgaggatgaatttgatgacccccaggccctggctgtgctgctggaagaggagctggtggtgctggacctgcagactcctggctggccagctgtgcctgccccatacctggccccgctgcactcctctgcaatcacttgctcggcccacgtggccagtgtccccgccaagctgtgggcccgcattgtgagcgctggcgagcagcagagcccccagcctgtctccagtgccttgagctggcccatcactgggggccgaaacctggcccaggagccgtcacagcgagggctgctgctgacgggccatgaggacggcaccgtgaggttctgggatgcctcgggtgtggcgctgcggccgctctataagctgagcacagctggcctcttccagacagactgtgagcacgctgacagcctggcccaggctgccgaggacgactggccacccttccgcaaggtgggctgcttcgatccctacagtgacgatccccggcttggcgtgcagaaggttgctctctgcaagtatacagcccagatggtggtggctggcactgcaggccaggtgctggtactggagcttagtgatgtgccggtggagcaggcggtcagcgtggccatcatagacctcctccaggaccgcgagggcttcacatggaagggccacgagcggctgagcccacgcacggggccgctgccctggcctgctggcttccagccccgtgtcctggtgcagtgcctgccgccagctgctgtaaccgctgtcacactccacaccgagtggagcctcgtggcttttggcaccagtcatggctttggcctcttcgactaccagcgcaagagccctgtgctggccaggtgcactcttcaccccaatgactccctggccatggagggtccgctctcccgggtgaagtctctcaagaagtcactgcgccagtctttccggcgcattcgcaagagtcgtgtctctggcaagaagcgggctgctaatgccagcagcaagttgcaggaagccaatgcacagctggctgagcaggcctgcccccacgacgtggagatgacgcccgtgcagcgccgcattgagccccgctctgccgatgactccttgtcgggtgtcgtgcgttgcctatactttgccgacacattccttcgagatggggcccaccacgggcccaccatgtgggctggcaccaactcaggctctgtgttcgcctatgcactggaggtgccggcagcagcagtgggtggtgagaagcggcctgagcaagcggtggaggccgtgctgggcaaggaggtgcagctgatgcaccgggcgcctgtggtggccattgccgtgttggacgggcgtggccgcccactgcccgagccctacgaggcctcacgggacctggcgcaggcacctgacatgcagggtggtcacgctgtgctcatcgcatctgaggagcagttcaaggtgttcacactgcccaaggtgagcgcgaagaccaagttcaagctgacggcccatgagggctgtcgtgtgcgcaaggtggcactggccacgtttgccagtgtggcctgcgaggactatgctgagacctgcctggcctgcctcaccaacctgggtgacgtccacgtcttctcggtgcctggcctgcggccccaggtgcactattcctgcatccggaaggaggacatcagcggcatcgcttcgtgcgtctttacgcgccatggccagggcttttacctgatatccccatcagaatttgaacgcttctccctaagtgcccggaacatcacagagccgctctgctctctggacattaactggccccgcgatgccacccaggccagttacaggatccgagagtcacccaagctgagccaggctaacgggaccccaagcatcctgctggccccacagagccttgatggaagccctgatccagcccacagcatgggacctgacaccccggagccacccgaggctgcactctcacccatgtccatcgactcagccaccagtgctgacaccacgctggacacgacaggggacgtcacagtggaagatgtgaaggatttcctggggaaggccagaactatcccgacctccacctgccctgctcggagctggagtgctggatccctggcacctgcctggccccttaacatagaaccacgcctgctaacctgtaggctccactgggacctgctgtcctgtcccgcctgaccctgggccctggagcagcaccagccccagggtgtgggcctgggacctgggccagaactgagccctcctgcaggcatttggctgccctgggggcccactgcctagggaagaggacaggtggggcccagcacctgtgccacctccccccctccacacaccatccttccccctcactttgcagagtatttttccttttttttttttttcttaaagacggagtcttgctctgtcgcccaggctggagtgcagtggccccatctctgctcactgcaagccccgccttctgggttcccgccattcttctgcctcagcctcccaagtagctgggactacaggcgcccaccaccacgcccagctaattttttctgtatttttagtagagatggggtttcaccatgttagccaggatggtctcgatctcctgacctcgtgatccacccacctcagcctcccaaagtgctgggattacaggcgtgagccaccatgcccagccctgcaaagagtatttttctagcgcctgggctggacagttgtttctaaaactaaactattttggtacctgcttctgggccagtccccagcctgtcatgagtgtgtgtgtgcgggcatggatgtgactgggagctctgctgggcacccacatctggggcctagtcaggtgtgtgtgtccggcgggggggggggggggggggggtcaagatgagtttccctgtagattgtaccttggggtttttttctgtcgttttgttaaaattagcgccattttaatattaaaaatactgatttttaatattgaaaataaaagcatttaatatctcttaaagggcatccacatctgctttatccctagcggaagagtgagggggcttcacacgtgcactcacactgtggagagagttggatttcccagacccctgagggcacctgtcagggtcatccccattggtgctgcttgaggctactggggactgtggcactggacgtggctggagcaggtggtgtcacctgagtacattctttgctagcagacagtggatgaggccccttcctcttcctcaccaagcctggggctgtgccagcctgtcttaggccagggccttgcagaaggcgctccaggcgtggaagcagcgggtaaaggcgtgctgctcattgcccttgcggaccaggcgcagccggcgcggccgcaaagtttatttcccntttagttgaagggttanttttagcttttggcatttggccttctttttacaaa

SEQ ID NO: 351120 - DNA, 4075 bp, Homo sapiens
  misc_feature (162)..(162): n is a, c, g, or t
  misc_feature (179)..(180): n is a, c, g, or t
  misc_feature (193)..(193): n is a, c, g, or t
  misc_feature (4023)..(4023): n is a, c, g, or t
  misc_feature (4040)..(4040): n is a, c, g, or t
gggaaggcactggtgccccgtggagtcactccagtggacacctcgcggtgaccccgacaaatgattgcggtcattgttgctacatcgccgtgtgtgccctggcttggatacgatcgtgggaaagccatgtgccatcgtcaagttgttgatgtgaccccacantcgtatccttgtgtggnnaaccctagacagncgtgggcagctggagagcctatgctgggggcgtgatagcagcactgtggtcagctcacacagcgatggcagctatgctgtctggtctgtggatgccggcagcttcccaacgctgcagcccacggtagccaccacaccttacggcccctttccctgcaaggccattaacaagattctgtggcggaactgtgaatctgggggccactttatcatcttcagcggtggcatgccccgtgccagctatggtgaccgccactgtgtaagtgtgcttcgagccgagacattggtgacgctggacttcacttcccgcatcatcgacttcttcacagtgcacagcacacggcccgaggatgaatttgatgacccccaggccctggctgtgctgctggaagaggagctggtggtgctggacctgcagactcctggctggccagctgtgcctgccccatacctggccccgctgcactcctctgcaatcacttgctcggcccacgtggccagtgtccccgccaagctgtgggcccgcattgtgagcgctggcgagcagcagagcccccagcctgtctccagtgccttgagctggcccatcactgggggccgaaacctggcccaggagccgtcacagcgagggctgctgctgacgggccatgaggacggcaccgtgaggttctgggatgcctcgggtgtggcgctgcggccgctctataagctgagcacagctggcctcttccagacagactgtgagcacgctgacagcctggcccaggctgccgaggacgactggccacccttccgcaaggtgggctgcttcgatccctacagtgacgatccccggcttggcgtgcagaaggttgctctctgcaagtatacagcccagatggtggtggctggcactgcaggccaggtgctggtactggagcttagtgatgtgccggtggagcaggcggtcagcgtggccatcatagacctcctccaggaccgcgagggcttcacatggaagggccacgagcggctgagcccacgcacggggccgctgccctggcctgctggcttccagccccgtgtcctggtgcagtgcctgccgccagctgctgtaaccgctgtcacactccacaccgagtggagcctcgtggcttttggcaccagtcatggctttggcctcttcgactaccagcgcaagagccctgtgctggccaggtgcactcttcaccccaatgactccctggccatggagggtccgctctcccgggtgaagtctctcaagaagtcactgcgccagtctttccggcgcattcgcaagagtcgtgtctctggcaagaagcgggctgctaatgccagcagcaagttgcaggaagccaatgcacagctggctgagcaggcctgcccccacgacgtggagatgacgcccgtgcagcgccgcattgagccccgctctgccgatgactccttgtcgggtgtcgtgcgttgcctatactttgccgacacattccttcgagatggggcccaccacgggcccaccatgtgggctggcaccaactcaggctctgtgttcgcctatgcactggaggtgccggcagcagcagtgggtggtgagaagcggcctgagcaagcggtggaggccgtgctgggcaaggaggtgcagctgatgcaccgggcgcctgtggtggccattgccgtgttggacgggcgtggccgcccactgcccgagccctacgaggcctcacgggacctggcgcaggcacctgacatgcagggtggtcacgctgtgctcatcgcatctgaggagcagttcaaggtgttcacactgcccaaggtgagcgcgaagaccaagttcaagctgacggcccatgagggctgtcgtgtgcgcaaggtggcactggccacgtttgccagtgtggcctgcgaggactatgctgagacctgcctggcctgcctcaccaacctgggtgacgtccacgtcttctcggtgcctggcctgcggccccaggtgcactattcctgcatccggaaggaggacatcagcggcatcgcttcgtgcgtctttacgcgccatggccagggcttttacctgatatccccatcagaatttgaacgcttctccctaagtgcccggaacatcacagagccgctctgctctctggacattaactggccccgcgatgccacccaggccagttacaggatccgagagtcacccaagctgagccaggctaacgggaccccaagcatcctgctggccccacagagccttgatggaagccctgatccagcccacagcatgggacctgacaccccggagccacccgaggctgcactctcacccatgtccatcgactcagccaccagtgctgacaccacgctggacacgacaggggacgtcacagtggaagatgtgaaggatttcctgggctcctctgaggagtcagagaagaacctgaggaacctggcagaagacgaggcccacgcctgtgccatcctgatcaaatgaggaaggccagaactatcccgacctccacctgccctgctcggagctggagtgctggatccctggcacctgcctggccccttaacatagaaccacgcctgctaacctgtaggctccactgggacctgctgtcctgtcccgcctgaccctgggccctggagcagcaccagccccagggtgtgggcctgggacctgggccagaactgagccctcctgcaggcatttggctgccctgggggcccactgcctagggaagaggacaggtggggcccagcacctgtgccacctccccccctccacacaccatccttccccctcactttgcagagtatttttccttttttttttttttcttaaagacggagtcttgctctgtcgcccaggctggagtgcagtggccccatctctgctcactgcaagccccgccttctgggttcccgccattcttctgcctcagcctcccaagtagctgggactacaggcgcccaccaccacgcccagctaattttttctgtatttttagtagagatggggtttcaccatgttagccaggatggtctcgatctcctgacctcgtgatccacccacctcagcctcccaaagtgctgggattacaggcgtgagccaccatgcccagccctgcaaagagtatttttctagcgcctgggctggacagttgtttctaaaactaaactattttggtacctgcttctgggccagtccccagcctgtcatgagtgtgtgtgtgcgggcatggatgtgactgggagctctgctgggcacccacatctggggcctagtcaggtgtgtgtgtccggcgggggggggggggggggggggtcaagatgagtttccctgtagattgtaccttggggtttttttctgtcgttttgttaaaattagcgccattttaatattaaaaatactgatttttaatattgaaaataaaagcatttaatatctcttaaagggcatccacatctgctttatccctagcggaagagtgagggggcttcacacgtgcactcacactgtggagagagttggatttcccagacccctgagggcacctgtcagggtcatccccattggtgctgcttgaggctactggggactgtggcactggacgtggctggagcaggtggtgtcacctgagtacattctttgctagcagacagtggatgaggccccttcctcttcctcaccaagcctggggctgtgccagcctgtcttaggccagggccttgcagaaggcgctccaggcgtggaagcagcgggtaaaggcgtgctgctcattgcccttgcggaccaggcgcagccggcgcggccgcaaagtttatttcccntttagttgaagggttanttttagcttttggcatttggccttctttttacaaa

SEQ ID NO: 351121 - DNA, 3807 bp, Homo sapiens
cggcggcgggcgaggcgcctgcagccgggcgcaagatgatgaagtttcggttccggcggcagggcgccgacccgcagcgcgagaagctcaagcaggagcttttcgccttcaacaagactgtggagcatggcttccccaatcagcccagcgccctggccttcgacccggaacttcgcatcatggccatcggcaccaggtctggggctgtcaagatctatggtgcacctggcgtggagttcacaggcctgcaccgggatgcagccactgtcacacagatgcacttcttgaccggccagggccgcctcctgtccctgcttgatgacagcagtctgcatctctgggagattgtccaccataatggctgtgcccacctggaagaagcactcagtttccagctgcccagccggcccggctttgatggtgccagtgctccgctcagccttacccgagtcacagtggtcctgctggtggctgccggcgacatagcagccctgggcactgagggcagcagtgtcttcttcctggatgttaccaccctgaccctgctcgaggggcagacgcttgccccaggcgaggttctgcgcagcgtgccagacgactaccgctgtgggaaggcactgggccccgtggagtcactccagggacacctgcgggaccccacaaagattctcattggctacagccggggcctgctggtcatctggaaccaggcctcgcagtgtgtggaccacatcttcctggggaaccagcagctggagagcctatgctgggggcgtgatagcagcactgtggtcagctcacacagcgatggcagctatgctgtctggtctgtggatgccggcagcttcccaacgctgcagcccacggtagccaccacaccttacggcccctttccctgcaaggccattaacaagattctgtggcggaactgtgaatctgggggccactttatcatcttcagcggtggcatgccccgtgccagctatggtgaccgccactgtgtaagtgtgcttcgagccgagacattggtgacgctggacttcacttcccgcatcatcgacttcttcacagtgcacagcacacggcccgaggatgaatttgatgacccccaggccctggctgtgctgctggaagaggagctggtggtgctggacctgcagactcctggctggccagctgtgcctgccccatacctggccccgctgcactcctctgcaatcacttgctcggcccacgtggccagtgtccccgccaagctgtgggcccgcattgtgagcgctggcgagcagcagagcccccagcctgtctccagtgccttgagctggcccatcactgggggccgaaacctggcccaggagccgtcacagcgagggctgctgctgacgggccatgaggacggcaccgtgaggttctgggatgcctcgggtgtggcgctgcggccgctctataagctgagcacagctggcctcttccagacagactgtgagcacgctgacagcctggcccaggctgccgaggacgactggccacccttccgcaaggtgggctgcttcgatccctacagtgacgatccccggcttggcgtgcagaaggttgctctctgcaagtatacagcccagatggtggtggctggcactgcaggccaggtgctggtactggagcttagtgatgtgccggtggagcaggcggtcagcgtggccatcatagacctcctccaggaccgcgagggcttcacatggaagggccacgagcggctgagcccacgcacggggccgctgccctggcctgctggcttccagccccgtgtcctggtgcagtgcctgccgccagctgctgtaaccgctgtcacactccacaccgagtggagcctcgtggcttttggcaccagtcatggctttggcctcttcgactaccagcgcaagagccctgtgctggccaggtgcactcttcaccccaatgactccctggccatggagggtccgctctcccgggtgaagtctctcaagaagtcactgcgccagtctttccggcgcattcgcaagagtcgtgtctctggcaagaagcgggctgctaatgccagcagcaagttgcaggaagccaatgcacagctggctgagcaggcctgcccccacgacgtggagatgacgcccgtgcagcgccgcattgagccccgctctgccgatgactccttgtcgggtgtcgtgcgttgcctatactttgccgacacattccttcgagatggggcccaccacgggcccaccatgtgggctggcaccaactcaggctctgtgttcgcctatgcactggaggtgccggcagcagcagtgggtggtgagaagcggcctgagcaagcggtggaggccgtgctgggcaaggaggtgcagctgatgcaccgggcgcctgtggtggccattgccgtgttggacgggcgtggccgcccactgcccgagccctacgaggcctcacgggacctggcgcaggcacctgacatgcagggtggtcacgctgtgctcatcgcatctgaggagcagttcaaggtgttcacactgcccaaggtgagcgcgaagaccaagttcaagctgacggcccatgagggctgtcgtgtgcgcaaggtggcactggccacgtttgccagtgtggcctgcgaggactatgctgagacctgcctggcctgcctcaccaacctgggtgacgtccacgtcttctcggtgcctggcctgcggccccaggtgcactattcctgcatccggaaggaggacatcagcggcatcgcttcgtgcgtctttacgcgccatggccagggcttttacctgatatccccatcagaatttgaacgcttctccctaagtgcccggaacatcacagagccgctctgctctctggacattaactggccccgcgatgccacccaggccagttacaggatccgagagtcacccaagctgagccaggctaacgggaccccaagcatcctgctggccccacagagccttgatggaagccctgatccagcccacagcatgggacctgacaccccggagccacccgaggctgcactctcacccatgtccatcgactcagccaccagtgctgacaccacgctggacacgacaggggacgtcacagtggaagatgtgaaggatttcctgggctcctctgaggagtcagagaagaacctgaggaacctggcagaagacgaggcccacgcctgtgccatcctgatcaaatgaggaaggccagaactatcccgacctccacctgccctgctcggagctggagtgctggatccctggcacctgcctggccccttaacatagaaccacgcctgctaacctgtaggctccactgggacctgctgtcctgtcccgcctgaccctgggccctggagcagcaccagccccagggtgtgggcctgggacctgggccagaactgagccctcctgcaggcatttggctgccctgggggcccactgcctagggaagaggacaggtggggcccagcacctgtgccacctccccccctccacacaccatccttccccctcactttgcagagtatttttccttttttttttttttcttaaagacggagtcttgctctgtcgcccaggctggagtgcagtggccccatctctgctcactgcaagccccgccttctgggttcccgccattcttctgcctcagctacttgggaggctgaggcaggagaattgcttgaacccgggaggcggaggttgtggtgagctgagatcgtgccagtgcactccagcctaggcaacaagagtgaaactctgtctcaaaataaaa

SEQ ID NO: 351122 - DNA, 587 bp, Homo sapiens
gttacaattcaagatgagatttgagtggggacacagccagatcatatcaccgtgcaatactttcttccccataccagatacagacactttaaatacatgtttacccttgtttcttttaactgaactgtgagaaattttgctcccatagtcattttaaatgttactgttgaaataagtatgtcagtgatcactgtcagtatgtggcccccaaggagtagatttggaatatattaagtcatttagtgcctaaaagtatgtttggcactggtttgctactgaaatacgtggcaaggtaactgcatcaagttgttccctatgtgtcatctgaatattcacgtagtgatgtatttcatactagagattttttttcagggggtacaggcataccacggagatattgcaggttcagtttcaaactgctgcaataaaacaagtatcacaataaagttagtctcatgagttttttggtttcccactgcatataaaagttttattcacacaatactgtagtctatcatgtgtacaataagattctatctaaaaaacagtgtacataccttaaataaaaaaatactttattgctaaaa

SEQ ID NO: 351123 - DNA, 2919 bp, Homo sapiens
caattttaatagttttacaactgtcaaaactcatttctaaaatgatcacaactaaaagccatattatttaaaatgcttttgaactgaaattttattataacattgacaataatgtatttttttccttaatccacctacctaattttctgaaggaaagtagtactattttgtgtattctgtggaaatcaactgtaataatatgttacttgaaactaacaataaatgaggtaagaagctttatgtgtgtctgtaagccaataaggtttcttaaagaatcaaaatttttaataatgtgagcagccaacctccagatagactgacagagatcttacatcagtgtctctcattgtcccttgctattccattttgaggtttagtaaagataaaaatcttagaatattgttgcccgttctgggattagtcagatcccttgaaggtccaaaaattagtcatgatgcttgtaagctgttttcaaagcctattagaatttatgctactgcagtttacagtttttaatgtatagtctgtatctttaccagcctcattccttaacaacggaggaatgcaatttcaatggtaaaatgtttttaaacattgaaaagaaaagtaacaaaaggattgggtgaaggtagggacctgtcgatgggacctatggctgagcttgatgccgagctacacgttgacaaggtgtgacagtgcactgcacagaggttctgctctccctgcccccatctttgttattaggactaggtttctcgagtttgtacctcttggtcttcacaagttgacaaaaatgctctttgacagccaggtgtgtatgtgtatgtgcatgcacatgcacatatgtgtacatgtatcatgttttttcccctagacctctgcatgttgctgcccgaaatgggctaacaatggtggttcaggaacttttgggaaaaggagcaagtgtgcttgcagtagatgaaaatggctataccccagctttggcctgtgctcccaataaggatgtggctgattgcctggctctcattttggccaccatgatgcctgtctcatcaagtagtcctttatcatccttaacattcaatgccattaaccgttataccaacacctcaaaaacagtcagctttgaagctttgcccatcatgaggaatgaacctagctcctattgcagtttcaataacattggaggggaacaggagtacttatacactgacgtggatgagctcaacgactccgattctgagacctactgagaggctgaggaggagggagttctcacagtaaagcttcaaactgtgctttttcaggaaaaaggcactttgatattcacgtagaaattcaacctaagaggaaagatcccacagtgagccaatgttaagagatctgatggcattaggaggaagagttttaaaggcaagttttacaaaaggaacttctagaatcttgaaatagacctgactgaggaaaacacattgatgtcagaattctttgtggaattgtttaatttggttttgcagtgccaggaacaattggggacactgtgcactctaacctgcttacacaagcaacactattgtaacagaagaaataaagacactagatttaaattttatcaataaaattacaactaaatttaaaggcaataaaagtttggtacagtaggcattatgtgcacagcaaattgcaaaaggaccaaataactgaaaggtttttttaataaaatgccattttgtggaaactggagtagattaaatgaaacattacctaaaccaaactgcaatatttctggaaatgaagctgagatttggttttaaatgttgagtttttttgggttttgttttttttttaagaaaacatctgaaagccttccaatgctgtattaaaccatgagagaaagcagatgtatttttacatttttttcttttacagaactatttcaaatttccaatttttatactattagaattaaaaaccagctgactgggtgcaatacgggtgaaaatacttgtgacatagacattgagatggattggggtcaggctgttgccctgttttgaatggtttgggtttaaaatagtactatttttgtttgaaaatgtaaagaatttcctagaaaaaaattcatgaaatcaaaaagtagactatttcaccctattgcagctaagtggtcctggggcatggagtcttcaacctctctatgaatggcacaccttagtcacttatgttacttttgtgtccccaccatgggttgggggatttttgtttattctgatctatgagttttgaaaaagtgaataatcaaaaggaaaataattccttgttgttcataaattaagcatcactaaagtctcttgaaaggcatttctgtattgggcaagatttaaaatactaaagccttaggtcctattcatatttaaagtagcatgtttgtaacctgttactatttggagagagaagcagttgcctgccaaattgaagactacctttcaaatagcaaaagagagagagaaggctgatatttcggcttttaaataaagatttgtgtggttctgcttttactgtaactgtcactttcccagtgaaaatgatttcatatacattgagggtcttacaggtatgggtaaagttctataaattgcaacaaaatgatacccaatttcattttatcctttttgtattgtgaaactggaaactttatgacattgtaaattatcagctggtttttctgaatataaagtgtgaaaacacagaacagtattttgatctatttgataattttgtgggttttttgaagaattaatgagcatgtacatagaaatagtgactgcttgaatactgtatttacttgcactctttcagtacatcaagattcctgtatattttagagtataataaaacacagatgtgagttgtatttaa

SEQ ID NO: 351124 - DNA, 2413 bp, Homo sapiens
atgttaattgatacattaggtgccagcattgtgaacgccacagattcaaaaggaagaactcctctccatgcagccgccttcacagaccatgtagagtgtttacagctgctgctcagccataatgctcaagtcaattctgtggactctacagggaaaacacctcttatgatggctgcagaaaatggacaaacaaatacagttgagatgctggttagcagtgctagtgcagaactgactttacaagataacagtaaaaatactgccctccatttggcttgtagcaagggtcatgaaactagtgccttgttaatactggaaaagataacagatagaaacctcatcaatgcaaccaacgcagccttgcaaacacctctgcatgttgctgcccgaaatgggctaacaatggtggttcaggaacttttgggaaaaggagcaagtgtgcttgcagtagatgaaaatggctataccccagctttggcctgtgctcccaataaggatgtggctgattgcctggctctcattttggccaccatgatgcctgtctcatcaagtagtcctttatcatccttaacattcaatgccattaaccgttataccaacacctcaaaaacagtcagctttgaagctttgcccatcatgaggaatgaacctagctcctattgcagtttcaataacattggaggggaacaggagtacttatacactgacgtggatgagctcaacgactccgattctgagacctactgagaggctgaggaggagggagttctcacagtaaagcttcaaactgtgctttttcaggaaaaaggcactttgatattcacgtagaaattcaacctaagaggaaagatcccacagtgagccaatgttaagagatctgatggcattaggaggaagagttttaaaggcaagttttacaaaaggaacttctagaatcttgaaatagacctgactgaggaaaacacattgatgtcagaattctttgtggaattgtttaatttggttttgcagtgccaggaacaattggggacactgtgcactctaacctgcttacacaagcaacactattgtaacagaagaaataaagacactagatttaaattttatcaataaaattacaactaaatttaaaggcaataaaagtttggtacagtaggcattatgtgcacagcaaattgcaaaaggaccaaataactgaaaggtttttttaataaaatgccattttgtggaaactggagtagattaaatgaaacattacctaaaccaaactgcaatatttctggaaatgaagctgagatttggttttaaatgttgagtttttttgggttttgttttttttttaagaaaacatctgaaagccttccaatgctgtattaaaccatgagagaaagcagatgtatttttacatttttttcttttacagaactatttcaaatttccaatttttatactattagaattaaaaaccagctgactgggtgcaatacgggtgaaaatacttgtgacatagacattgagatggattggggtcaggctgttgccctgttttgaatggtttgggtttaaaatagtactatttttgtttgaaaatgtaaagaatttcctagaaaaaaattcatgaaatcaaaaagtagactatttcaccctattgcagctaagtggtcctggggcatggagtcttcaacctctctatgaatggcacaccttagtcacttatgttacttttgtgtccccaccatgggttgggggatttttgtttattctgatctatgagttttgaaaaagtgaataatcaaaaggaaaataattccttgttgttcataaattaagcatcactaaagtctcttgaaaggcatttctgtattgggcaagatttaaaatactaaagccttaggtcctattcatatttaaagtagcatgtttgtaacctgttactatttggagagagaagcagttgcctgccaaattgaagactacctttcaaatagcaaaagagagagagaaggctgatatttcggcttttaaataaagatttgtgtggttctgcttttactgtaactgtcactttcccagtgaaaatgatttcatatacattgagggtcttacaggtatgggtaaagttctataaattgcaacaaaatgatacccaatttcattttatcctttttgtattgtgaaactggaaactttatgacattgtaaattatcagctggtttttctgaatataaagtgtgaaaacacagaacagtattttgatctatttgataattttgtgggttttttgaagaattaatgagcatgtacatagaaatagtgactgcttgaatactgtatttacttgcactctttcagtacatcaagattcctgtatattttagagtataataaaacacagatgtgagttgtatttaa

SEQ ID NO: 351125 - DNA, 3892 bp, Homo sapiens
caattttaatagttttacaactgtcaaaactcatttctaaaatgatcacaactaaaagccatattatttaaaatgcttttgaactgaaattttattataacattgacaataatgtatttttttccttaatccacctacctaattttctgaaggaaagtagtactattttgtgtattctgtggaaatcaactgtaataatatgttacttgaaactaacaataaatgaggtaagaagctttatgtgtgtctgtaagccaataaggtttcttaaagaatcaaaatttttaataatgtgagcagccaacctccagatagactgacagagatcttacatcagtgtctctcattgtcccttgctattccattttgaggtttagtaaagataaaaatcttagaatattgttgcccgttctgggattagtcagatcccttgaaggtccaaaaattagtcatgatgcttgtaagctgttttcaaagcctattagaatttatgctactgcagtttacagtttttaatgtatagtctgtatctttaccagcctcattccttaacaacggaggaatgcaatttcaatggtaaaatgtttttaaacattgaaaagaaaagtaacaaaaggattgggtgaaggtagggacctgtcgatgggacctatggctgagcttgatgccgagctacacgttgacaaggtgtgacagtgcactgcacagaggttctgctctccctgcccccatctttgttattaggactaggtttctcgagtttgtacctcttggtcttcacaagttgacaaaaatgctctttgacagccaggtgtgtatgtgtatgtgcatgcacatgcacatatgtgtacatgtatcatgttttttcccctagacctctgcatgttgctgcccgaaatgggctaacaatggtggttcaggaacttttgggaaaaggagcaagtgtgcttgcagtagatgaaaatggctataccccagctttggcctgtgctcccaataaggatgtggctgattgcctggctctcattttggccaccatgatgcctgtctcatcaagtagtcctttatcatccttaacattcaatgccattaaccgttataccaacacctcaaaaacagtcagctttgaagctttgcccatcatgaggaatgaacctagctcctattgcagtttcaataacattggaggggaacaggagtacttatacactgacgtggatgagctcaacgactccgattctgagacctactgagaggctgaggaggagggagttctcacagtaaagcttcaaactgtgctttttcaggaaaaaggcactttgatattcacgtagaaattcaacctaagaggaaagatcccacagtgagccaatgttaagagatctgatggcattaggaggaagagttttaaaggcaagttttacaaaaggaacttctagaatcttgaaatagacctgactgaggaaaacacattgatgtcagaattctttgtggaattgtttaatttggttttgcagtgccaggaacaattggggacactgtgcactctaacctgcttacacaagcaacactattgtaacagaagaaataaagacactagatttaaattttatcaataaaattacaactaaatttaaaggcaataaaagtttggtacagtaggcattatgtgcacagcaaattgcaaaaggaccaaataactgaaaggtttttttaataaaatgccattttgtggaaactggagtagattaaatgaaacattacctaaaccaaactgcaatatttctggaaatgaagctgagatttggttttaaatgttgagtttttttgggttttgttttttttttaagaaaacatctgaaagccttccaatgctgtattaaaccatgagagaaagcagatgtatttttacatttttttcttttacagaactatttcaaatttccaatttttatactattagaattaaaaaccagctgactgggtgcaatacgggtgaaaatacttgtgacatagacattgagatggattggggtcaggctgttgccctgttttgaatggtttgggtttaaaatagtactatttttgtttgaaaatgtaaagaatttcctagaaaaaaattcatgaaatcaaaaagtagactatttcaccctattgcagctaagtggtcctggggcatggagtcttcaacctctctatgaatggcacaccttagtcacttatgttacttttgtgtccccaccatgggttgggggatttttgtttattctgatctatgagttttgaaaaagtgaataatcaaaaggaaaataattccttgttgttcataaattaagcatcactaaagtctcttgaaaggcatttctgtattgggcaagatttaaaatactaaagccttaggtcctattcatatttaaagtagcatgtttgtaacctgttactatttggagagagaagcagttgcctgccaaattgaagactacctttcaaatagcaaaagagagagagaaggctgatatttcggcttttaaataaagatttgtgtggttctgcttttactgtaactgtcactttcccagtgaaaatgatttcatatacattgagggtcttacaggtatgggtaaagttctataaattgcaacaaaatgatacccaatttcattttatcctttttgtattgtgaaactggaaactttatgacattgtaaattatcagctggtttttctgaatataaagtgtgaaaacacagaacagtattttgatctatttgataattttgtgggttttttgaagaattaatgagcatgtacatagaaatagtgactgcttgaatactgtatttacttgcactctttcagtacatcaagattcctgtatattttagagtataataaaacacagatgtgagttgtatttaatgaataatgtatttgtatctgtgcatattatctacaaatctataaagtttctagggcattgactactagattttaagcattttttctaaaatatttacagaaattataaatctaatcccccatcttttctttataatataaagaagtcataatgaacccttcctaattattagtagtaggaaggtgaatatgcattttaatgacagtggactacattttctattgtaccttttgaaaaaaaaaaaaatcaagcagattctaaaagtatacatatgtgtgctttctctttccttttaggaattctcttctgaattccctgagggaattttctagaatctcagaattgaaagagacctgaggttcatccagtctctaacctcttaacaaatgcaggagtcccttctacaagggtgatctttccaccttgaacacttccaagtgactctacctcaccaagcagtccattcagttgttgagcagctctaactgttagaaaggtcttccttagatggagttgaagcctccctcccggtaacttctgtctttgggcctgggtctgtcctccaagagaaccctgagaatgttggaaggatgaatctcgcacattctgccatgtcttctcttttacaggctgtttgacttctctgctgaagtgatttccagaaggactcatttgacacactattagatttaccacatctaatgaaatccaaggtgtagctataaagtgacaagctgtttttaatttatcacatacaccagaacttctatcctgcatcacttatatgtaaatgatgctgttaccaaaaacattaaggtagttcttgcgaatgccaccccactaagaaaactatttcattacttttgtaatccatctgtgagagtctgccccccagcttaaccacttcctttggtctgcacccaatgaagggaaaccccaaagtactgtctcaaatggtatttgaactacgcc

SEQ ID NO: 351126 - DNA, 3360 bp, Homo sapiens
  misc_feature (3335)..(3335): n is a, c, g, or t
caattttaatagttttacaactgtcaaaactcatttctaaaatgatcacaactaaaagccatattatttaaaatgcttttgaactgaaattttattataacattgacaataatgtatttttttccttaatccacctacctaattttctgaaggaaagtagtactattttgtgtattctgtggaaatcaactgtaataatatgttacttgaaactaacaataaatgaggtaagaagctttatgtgtgtctgtaagccaataaggtttcttaaagaatcaaaatttttaataatgtgagcagccaacctccagatagactgacagagatcttacatcagtgtctctcattgtcccttgctattccattttgaggtttagtaaagataaaaatcttagaatattgttgcccgttctgggattagtcagatcccttgaaggtccaaaaattagtcatgatgcttgtaagctgttttcaaagcctattagaatttatgctactgcagtttacagtttttaatgtatagtctgtatctttaccagcctcattccttaacaacggaggaatgcaatttcaatggtaaaatgtttttaaacattgaaaagaaaagtaacaaaaggattgggtgaaggtagggacctgtcgatgggacctatggctgagcttgatgccgagctacacgttgacaaggtgtgacagtgcactgcacagaggttctgctctccctgcccccatctttgttattaggactaggtttctcgagtttgtacctcttggtcttcacaagttgacaaaaatgctctttgacagccaggtgtgtatgtgtatgtgcatgcacatgcacatatgtgtacatgtatcatgttttttcccctagacctctgcatgttgctgcccgaaatgggctaacaatggtggttcaggaacttttgggaaaaggagcaagtgtgcttgcagtagatgaaaatggctataccccagctttggcctgtgctcccaataaggatgtggctgattgcctggctctcattttggccaccatgatgcctgtctcatcaagtagtcctttatcatccttaacattcaatgccattaaccgttataccaacacctcaaaaacagtcagctttgaagctttgcccatcatgaggaatgaacctagctcctattgcagtttcaataacattggaggggaacaggagtacttatacactgacgtggatgagctcaacgactccgattctgagacctactgagaggctgaggaggagggagttctcacagtaaagcttcaaactgtgctttttcaggaaaaaggcactttgatattcacgtagaaattcaacctaagaggaaagatcccacagtgagccaatgttaagagatctgatggcattaggaggaagagttttaaaggcaagttttacaaaaggaacttctagaatcttgaaatagacctgactgaggaaaacacattgatgtcagaattctttgtggaattgtttaatttggttttgcagtgccaggaacaattggggacactgtgcactctaacctgcttacacaagcaacactattgtaacagaagaaataaagacactagatttaaattttatcaataaaattacaactaaatttaaaggcaataaaagtttggtacagtaggcattatgtgcacagcaaattgcaaaaggaccaaataactgaaaggtttttttaataaaatgccattttgtggaaactggagtagattaaatgaaacattacctaaaccaaactgcaatatttctggaaatgaagctgagatttggttttaaatgttgagtttttttgggttttgttttttttttaagaaaacatctgaaagccttccaatgctgtattaaaccatgagagaaagcagatgtatttttacatttttttcttttacagaactatttcaaatttccaatttttatactattagaattaaaaaccagctgactgggtgcaatacgggtgaaaatacttgtgacatagacattgagatggattggggtcaggctgttgccctgttttgaatggtttgggtttaaaatagtactatttttgtttgaaaatgtaaagaatttcctagaaaaaaattcatgaaatcaaaaagtagactatttcaccctattgcagctaagtggtcctggggcatggagtcttcaacctctctatgaatggcacaccttagtcacttatgttacttttgtgtccccaccatgggttgggggatttttgtttattctgatctatgagttttgaaaaagtgaataatcaaaaggaaaataattccttgttgttcataaattaagcatcactaaagtctcttgaaaggcatttctgtattgggcaagatttaaaatactaaagccttaggtcctattcatatttaaagtagcatgtttgtaacctgttactatttggagagagaagcagttgcctgccaaattgaagactacctttcaaatagcaaaagagagagagaaggctgatatttcggcttttaaataaagatttgtgtggttctgcttttactgtaactgtcactttcccagtgaaaatgatttcatatacattgagggtcttacaggtatgggtaaagttctataaattgcaacaaaatgatacccaatttcattttatcctttttgtattgtgaaactggaaactttatgacattgtaaattatcagctggtttttctgaatataaagtgtgaaaacacagaacagtattttgatctatttgataattttgtgggttttttgaagaattaatgagcatgtacatagaaatagtgactgcttgaatactgtatttacttgcactctttcagtacatcaagattcctgtatattttagagtataataaaacacagatgtgagttgtatttaaaaaaaaaaaaaaaaaaaaaaaaaaaaaaaaaaaaaaaaaaaaaaaaaaaaaaaaaaaaaaaaaaaaaaaaaaaacaaaaaaaaaaaaaaaaaaaaaaaaaaaaaaagagaagagcggagaagaaacagaagagagaatcgagaatacaataagagagagaaggagcaacatagaagagaagagacgaaaagaagagagaggcaggaggaaagaagagcagagggacagagggaggcgggcgcgccattcataatagcagcacttagacgagagcgcagatcagacgcatggcaaagaaatcagataggaacaaatcagagcgcgagacaacagacagatcgagatcgcacggaaagcaaccaccaacaggagagagacaagaacgtgagaagagaatgagactagcagagagaganagatcctaagacgaacaacgacgca

SEQ ID NO: 351127 - DNA, 2563 bp, Homo sapiens
caattttaatagttttacaactgtcaaaactcatttctaaaatgatcacaactaaaagccatattatttaaaatgcttttgaactgaaattttattataacattgacaataatgtatttttttccttaatccacctacctaattttctgaaggaaagtagtactattttgtgtattctgtggaaatcaactgtaataatatgttacttgaaactaacaataaatgaggtaagaagctttatgtgtgtctgtaagccaataaggtttcttaaagaatcaaaatttttaataatgtgagcagccaacctccagatagactgacagagatcttacatcagtgtctctcattgtcccttgctattccattttgaggtttagtaaagataaaaatcttagaatattgttgcccgttctgggattagtcagatcccttgaaggtccaaaaattagtcatgatgcttgtaagctgttttcaaagcctattagaatttatgctactgcagtttacagtttttaatgtatagtctgtatctttaccagcctcattccttaacaacggaggaatgcaatttcaatggtaaaatgtttttaaacattgaaaagaaaagtaacaaaaggattgggtgaaggtagggacctgtcgatgggacctatggctgagcttgatgccgagctacacgttgacaaggtgtgacagtgcactgcacagaggttctgctctccctgcccccatctttgttattaggactaggtttctcgagtttgtacctcttggtcttcacaagttgacaaaaatgctctttgacagccaggtgtgtatgtgtatgtgcatgcacatgcacatatgtgtacatgtatcatgttttttcccctagacctctgcatgttgctgcccgaaatgggctaacaatggtggttcaggaacttttgggaaaaggagcaagtgtgcttgcagtagatgaaaatggctataccccagctttggcctgtgctcccaataaggatgtggctgattgcctggctctcattttggccaccatgatgcctgtctcatcaagtagtcctttatcatccttaacattcaatgccattaaccgttataccaacacctcaaaaacagtcagctttgaagctttgcccatcatgaggaatgaacctagctcctattgcagtttcaataacattggaggggaacaggagtacttatacactgacgtggatgagctcaacgactccgattctgagacctactgagaggctgaggaggagggagttctcacagtaaagcttcaaactgtgctttttcaggaaaaaggcactttgatattcacgtagaaattcaacctaagaggaaagatcccacagtgagccaatgttaagagatctgatggcattaggaggaagagttttaaaggcaagttttacaaaaggaacttctagaatcttgaaatagacctgactgaggaaaacacattgatgtcagaattctttgtggaattgtttaatttggttttgcagtgccaggaacaattggggacactgtgcactctaacctgcttacacaagcaacactattgtaacagaagaaataaagacactagatttaaattttatcaataaaattacaactaaatttaaaggcaataaaagtttggtacagtaggcattatgtgcacagcaaattgcaaaaggaccaaataactgaaaggtttttttaataaaatgccattttgtggaaactggagtagattaaatgaaacattacctaaaccaaactgcaatatttctggaaatgaagctgagatttggttttaaatgttgagtttttttgggttttgttttttttttaagaaaacatctgaaagccttccaatgctgtattaaaccatgagagaaagcagatgtatttttacatttttttcttttacagaactatttcaaatttccaatttttatactattagaattaaaaaccagctgactgggtgcaatacgggtgaaaatacttgtgacatagacattgagatggattggggtcaggctgttgccctgttttgaatggtttgggtttaaaatagtactatttttgtttgaaaatgtaaagaatttcctagaaaaaaattcatgaaatcaaaaagtagactatttcaccctattgcagctaagtggtcctggggcatggagtcttcaacctctctatgaatggcacaccttagtcacttatgttacttttgtgtccccaccatgggttgggggatttttgtttattctgatctatgagttttgaaaaagtgaataatcaaaaggaaaataattccttgttgttcataaattaagcatcactaaagtctcttgaaaggcatttctgtattgggcaagatttaaaatactaaagccttaggtcctattcatatttaaagtagcatgtttgtaacctgttactatttggagagagaagcagttgcctgccaatgagatacttcaattggaagagaagaaagggaaattcggttaataacgatggtgggccgcttagaagttttccgagaaaggttattattggg

SEQ ID NO: 351128 - DNA, 2156 bp, Homo sapiens
caattttaatagttttacaactgtcaaaactcatttctaaaatgatcacaactaaaagccatattatttaaaatgcttttgaactgaaattttattataacattgacaataatgtatttttttccttaatccacctacctaattttctgaaggaaagtagtactattttgtgtattctgtggaaatcaactgtaataatatgttacttgaaactaacaataaatgaggtaagaagctttatgtgtgtctgtaagccaataaggtttcttaaagaatcaaaatttttaataatgtgagcagccaacctccagatagactgacagagatcttacatcagtgtctctcattgtcccttgctattccattttgaggtttagtaaagataaaaatcttagaatattgttgcccgttctgggattagtcagatcccttgaaggtccaaaaattagtcatgatgcttgtaagctgttttcaaagcctattagaatttatgctactgcagtttacagtttttaatgtatagtctgtatctttaccagcctcattccttaacaacggaggaatgcaatttcaatggtaaaatgtttttaaacattgaaaagaaaagtaacaaaaggattgggtgaaggtagggacctgtcgatgggacctatggctgagcttgatgccgagctacacgttgacaaggtgtgacagtgcactgcacagaggttctgctctccctgcccccatctttgttattaggactaggtttctcgagtttgtacctcttggtcttcacaagttgacaaaaatgctctttgacagccaggtgtgtatgtgtatgtgcatgcacatgcacatatgtgtacatgtatcatgttttttcccctagacctctgcatgttgctgcccgaaatgggctaacaatggtggttcaggaacttttgggaaaaggagcaagtgtgcttgcagtagatgaaaatggctataccccagctttggcctgtgctcccaataaggatgtggctgattgcctggctctcattttggccaccatgatgcctgtctcatcaagtagtcctttatcatccttaacattcaatgccattaaccgttataccaacacctcaaaaacagtcagctttgaagctttgcccatcatgaggaatgaacctagctcctattgcagtttcaataacattggaggggaacaggagtacttatacactgacgtggatgagctcaacgactccgattctgagacctactgagaggctgaggaggagggagttctcacagtaaagcttcaaactgtgctttttcaggaaaaaggcactttgatattcacgtagaaattcaacctaagaggaaagatcccacagtgagccaatgttaagagatctgatggcattaggaggaagagttttaaaggcaagttttacaaaaggaacttctagaatcttgaaatagacctgactgaggaaaacacattgatgtcagaattctttgtggaattgtttaatttggttttgcagtgccaggaacaattggggacactgtgcactctaacctgcttacacaagcaacactattgtaacagaagaaataaagacactagatttaaattttatcaataaaattacaactaaatttaaaggcaataaaagtttggtacagtaggcattatgtgcacagcaaattgcaaaaggaccaaataactgaaaggtttttttaataaaatgccattttgtggaaactggagtagattaaatgaaacattacctaaaccaaactgcaatatttctggaaatgaagctgagatttggttttaaatgttgagtttttttgggttttgttttttttttaagaaaacatctgaaagccttccaatgctgtattaaaccatgagagaaagcagatgtatttttacatttttttcttttacagaactatttcaaatttccaatttttatactattagaattaaaaaccagctgactgggtgcaatacgggtgaaaatacttgtgacatagacattgaaatgacctcctttaacaagacactcatctcaaacaatgccatttagttcaggagatctctaagtgtagctgtaaattttggggttaatttggcttatattggaccttttaaaagaaataaagttttttaatgc

SEQ ID NO: 351129 - DNA, 458 bp, Homo sapiens
atgttaattgatacattaggtgccagcattgtgaacgccacagattcaaaaggaagaactcctctccatgcagccgccttcacagaccatgtagagtgtttacagctgctgctcagccataatgctcaagtcaattctgtggactctacagggaaaacacctcttatgatggctgcagaaaatggacaaacaaatacagttgagatgctggttagcagtgctagtgcagaactgactttacaagataacagtaaaaatactgccctccatttggcttgtagcaagcccagtgaagtgccgtatatccatgattgtctgctgtggctggatttgcatccatagatgctgctgactgcaaaagggctccaagaacaccaatgtgtccacaggcagcagacaggtgtataggcgtccggcccctgctatcccgaagtaagcacttagcaccatgttgaagt

SEQ ID NO: 351130 - DNA, 1909 bp, Homo sapiens
  misc_feature (25)..(25): n is a, c, g, or t
gggctaggtagcgaggctgggtggngcatgatgcctgtctcatcaagtagtcctttatcatccttaacattcaatgccattaaccgttataccaacacctcaaaaacagtcagctttgaagctttgcccatcatgaggaatgaacctagctcctattgcagtttcaataacattggaggggaacaggagtacttatacactgacgtggatgagctcaacgactccgattctgagacctactgagaggctgaggaggagggagttctcacagtaaagcttcaaactgtgctttttcaggaaaaaggcactttgatattcacgtagaaattcaacctaagaggaaagatcccacagtgagccaatgttaagagatctgatggcattaggaggaagagttttaaaggcaagttttacaaaaggaacttctagaatcttgaaatagacctgactgaggaaaacacattgatgtcagaattctttgtggaattgtttaatttggttttgcagtgccaggaacaattggggacactgtgcactctaacctgcttacacaagcaacactattgtaacagaagaaataaagacactagatttaaattttatcaataaaattacaactaaatttaaaggcaataaaagtttggtacagtaggcattatgtgcacagcaaattgcaaaaggaccaaataactgaaaggtttttttaataaaatgccattttgtggaaactggagtagattaaatgaaacattacctaaaccaaactgcaatatttctggaaatgaagctgagatttggttttaaatgttgagtttttttgggttttgttttttttttaagaaaacatctgaaagccttccaatgctgtattaaaccatgagagaaagcagatgtatttttacatttttttcttttacagaactatttcaaatttccaatttttatactattagaattaaaaaccagctgactgggtgcaatacgggtgaaaatacttgtgacatagacattgagatggattggggtcaggctgttgccctgttttgaatggtttgggtttaaaatagtactatttttgtttgaaaatgtaaagaatttcctagaaaaaaattcatgaaatcaaaaagtagactatttcaccctattgcagctaagtggtcctggggcatggagtcttcaacctctctatgaatggcacaccttagtcacttatgttacttttgtgtccccaccatgggttgggggatttttgtttattctgatctatgagttttgaaaaagtgaataatcaaaaggaaaataattccttgttgttcataaattaagcatcactaaagtctcttgaaaggcatttctgtattgggcaagatttaaaatactaaagccttaggtcctattcatatttaaagtagcatgtttgtaacctgttactatttggagagagaagcagttgcctgccaaattgaagactacctttcaaatagcaaaagagagagagaaggctgatatttcggcttttaaataaagatttgtgtggttctgcttttactgtaactgtcactttcccagtgaaaatgatttcatatacattgagggtcttacaggtatgggtaaagttctataaattgcaacaaaatgatacccaatttcattttatcctttttgtattgtgaaactggaaactttatgacattgtaaattatcagctggtttttctgaatataaagtgtgaaaacacagaacagtattttgatctatttgataattttgtgggttttttgaagaattaatgagcatgtacatagaaatagtgactgcttgaatactgtatttacttgcactctttcagtacatcaagattcctgtatattttagagtataataaaacacagatgtgagttgtatttaa

SEQ ID NO: 351131 - DNA, 462 bp, Homo sapiens
acctctgtctacatctctggcataaatttaagactttatttgtgaatattcagataagcactttgcctctaacggtattgttcagggcccagcatcattgttacagctgtaattgtaactatcaagacacagttctttgtaattagaaagtcaagatggtattcagcagtatggcagcacagacttacatttgttaggctattagaaaaaaaaatgtttacagagaaaacagtgtcattgtttagtgctcttaattgaccatctgcctggtaaagaaatgtccaaagaaggataaataagactatagtacacttatttatttattttctttgtgcagtgaggaaattaggaaaagcaacagcggaggcaaactagataatacgtttctaaatcaggctgcaagtgaaatcatgccatgcatatgtttctttttaaatttcttccagtgtcaagacaaagacc

SEQ ID NO: 351132 - DNA, 517 bp, Homo sapiens
tttttttacaactagggcctcagtggataaaataaccttgtccacctgttatttcgtattgtgaatttgtatcttcagggtagatgcttagatatggagttgctgggccaagggtgtgcaatggtttggatatggttttgggggccccgccaagtctcatgttgacatttgatcccagtgttggaggtggggcctggtgggaggtgtttttgttgtggggtagatccctcatggaggacagcatggtgccattcttgtgggagtgagtgagttctaactcttagttcccactagaatgggttgttgaaaagagcctggtacctcctttcctctcttggctcccctctccttatgtgatctgcatacactggctcccctttgttttcagccatgagtggaggcagcttgaagccctcaccagagacagatgctgcaccataattgtacagcctgcagaaccatgagctaaataaacatcttttctttataagttacccagcctcagttattcctttat

SEQ ID NO: 351133 - DNA, 4016 bp, Homo sapiens
attgcttttgctgcttttctggctttccctttcggacatgcgcgctcggagcaaggcgccctcgcactcagcttaccgcgcatgtacgttgccaggggtaacgcaggtagccaaagtggcttgtggagtggcgaccgttagtgaggcggttgctgagacagacgctgaggcgggtaggaggagcccgagccgtaagggaagccgtgatgagggccgtgttgacgtggagagataaagccgagcactgtataaatgacatcgcatttaagcctgatggaactcaactgattttggctgccggaagcagattactggtttatgacacctctgatggcaccttacttcagcccctcaagggacacaaagacactgtgtactgtgtggcatatgcgaaggatggcaagcgctttgcttctggatcagctgacaaaagcgttattatctggacatcaaaactggaaggcattctgaagtacacgcacaatgatgctatacaatgtgtctcctacaatcctattactcatcaactggcatcttgttcctccagtgactttgggttgtggtctcctgaacagaagtctgtctccaaacacaaatcaagcagcaagatcatctgctgcagctggacaaatgatggtcagtacctggcgctggggatgttcaatgggatcatcagcatacggaacaaaaatggcgaggagaaagtaaagatcgagcggccggggggctccctctcgccaatatggtccatctgctggaacccttcaagccgatgggagagtttctggatgaacagagagaatgaggatgccgaggatgtcattgtcaacagatatattcaggaaatcccttccactctgaagtcagcagtgtacagtagtcagggtagtgaggcagaggaggaagaaccagaggaagaggacgacagtcccagggacgacaacttagaggaacgtaatgacatcctggctgtggctgactggggacagaaagtttccttctaccagctgagtggaaaacagattggaaaggatcgggcactgaactttgacccctgctgcatcagctactttactaaaggcgagtacattttgctggggggttcagacaagcaagtatctcttttcaccaaggatggagtgcggcttgggactgttggggagcagaactcctgggtgtggacgtgtcaagcgaaaccggattccaactatgtggtggtcggctgccaggacggcaccatttccttctaccagcttattttcagcacagtccatgggctttacaaggaccgctatgcctacagggatagcatgactgacgtcattgtgcagcacctgatcactgagcagaaagttcggattaaatgcaaagagcttgtcaagaagattgccatctacagaaatcgattggctatccaactgccagagaaaatcctcatctatgagttgtattcagaggacttatcagacatgcattaccgggtaaaggagaagattatcaagaagtttgagtgcaacctcctggtggtgtgtgccaatcacatcatcctgtgccaggagaaacggctgcagtgcctgtccttcagcggagtgaaggagcgggagtggcagatggagtctctcattcgttacatcaaggtgatcggtggccctcctggaagagaaggcctcttagtggggctgaagaatggacagatcctgaagatcttcgtggacaatctctttgctatcgtcctgctgaagcaggccacagctgtgcgctgcttggacatgagtgcctcccgtaagaagctggccgtggtagatgaaaatgacacttgcctggtgtatgacatcgacaccaaggagctgctttttcaggaaccaaacgccaacagtgtagcttggaacacccagtgtgaggacatgctctgcttctcgggaggaggctacctcaacatcaaagccagcaccttccctgtgcaccggcagaagctgcagggctttgtggtcggctacaatggctccaagatcttctgcctccatgtcttctccatttctgccgtggaggtgccgcagtccgctcccatgtaccagtacctggataggaaactgttcaaggaagcctaccagattgcttgcttgggtgtcacagacactgattggcgtgaactggccatggaagcgctagaaggtttagattttgaaacagcaaagaaggccttcatcagagtacaagacctccgatatttagagctcatcagcagcattgaggagaggaagaagcggggagagaccaacaatgacctgtttctggcagatgtgttttcctaccaggggaagttccatgaggccgccaaactgtacaagaggagtgggcacgagaacctcgcgcttgaaatgtacaccgacctctgcatgtttgagtatgccaaggatttccttggatctggagaccccaaagaaacaaagatgctaatcaccaaacaggctgactgggccagaaatatcaaggagcccaaagccgccgtggagatgtacatctcagcaggagagcacgtcaaggccatcgagatctgtggtgaccatggctgggttgacatgttgatcgacatcgcccgcaaactggacaaggctgagcgcgagcccctgctgctgtgcgctacctacctcaagaagctggacagccctggctatgctgctgagacctacctgaagatgggtgacctcaagtccctggtgcagctgcacgtggagacccagcgctgggatgaggcctttgctttgggtgagaagcatcctgagtttaaggatgacatctacatgccgtatgctcagtggctagcagagaacgatcgctttgaggaagcccagaaagcgttccacaaggctgggcgacagagagaagcggtccaggtgctggagcagctcacaaacaatgccgtggcggagagcaggtttaatgatgctgcctattattactggatgctgtccatgcagtgcctcgatatagctcaagatcctgcccagaaggacacaatgcttggcaagttctaccacttccagcgtttggcagagctgtaccatggttaccatgccatccatcgccacacggaagatccgttcagtgtccatcgtcctgaaactcttttcaacatctccaggttcctgctgcacagcctgcccaaggacaccccctcgggcatctctaaagtgaaaatactcttcaccttggccaagcagagcaaggccctcggtgcctacaggctggcccggcacgcctatgacaagctgcgtggcctgtacatccctgccagattccaaaagtccattgagctgggtaccctgaccatccgcgccaagcccttccacgacagtgaggagttggtgcccttgtgctaccgctgctccaccaacaacccgctgctcaacaacctgggcaacgtctgcatcaactgccgccagcccttcatcttctccgcctcttcctacgacgtgctacacctggttgagttctacctggaggaagggatcactgatgaagaagccatctccctcatcgacctggaggtgctgagacccaagcgggatgacagacagctagagattgcaaacaacagctcccagattctgcggctagtggagaccaaggactccatcggagatgaggacccgttcacagctaagctgagctttgagcaaggtggctcagagttcgtgccagtggtggtgagccggctggtgctgcgctccatgagccgccgggatgtcctcatcaagcgatggcccccacccctgaggtggcaatacttccgctcactgctgcctgacgcctccattaccatgtgcccctcctgcttccagatgttccattctgaggactatgagttgctggtgcttcagcatggctgctgcccctactgccgcaggtgcaaggatgaccctggcccatgaccagcatcctggggacggcctgcaccctctgcccgccttggggtctgctgggctgtgaaggagaataaagagttaaactgtcag

SEQ ID NO: 351134 - DNA, 3839 bp, Homo sapiens
attgcttttgctgcttttctggctttccctttcggacatgcgcgctcggagcaaggcgccctcgcactcagcttaccgcgcatgtacgttgccaggggtaacgcaggtagccaaagtggcttgtggagtggcgaccgttagtgaggcggttgctgagacagacgctgaggcgggtaggaggagcccgagccgtaagggaagccgtgatgagggccgtgttgacgtggagagataaagccgagcactgtataaatgacatcgcatttaagcctgatggaactcaactgattttggctgccggaagcagattactggtttatgacacctctgatggcaccttacttcagcccctcaagggacacaaagacactgtgtactgtgtggcatatgcgaaggatggcaagcgctttgcttctggatcagctgacaaaagcgttattatctggacatcaaaactggaaggcattctgaagtacacgcacaatgatgctatacaatgtgtctcctacaatcctattactcatcaactggcatcttgttcctccagtgactttgggttgtggtctcctgaacagaagtctgtctccaaacacaaatcaagcagcaagatcatctgctgcagctggacaaatgatggtcagtacctggcgctggggatgttcaatgggatcatcagcatacggaacaaaaatggcgaggagaaagtaaagatcgagcggccggggggctccctctcgccaatatggtccatctgctggaacccttcaagagaggaacgtaatgacatcctggctgtggctgactggggacagaaagtttccttctaccagctgagtggaaaacagattggaaaggatcgggcactgaactttgacccctgctgcatcagctactttactaaaggcgagtacattttgctggggggttcagacaagcaagtatctcttttcaccaaggatggagtgcggcttgggactgttggggagcagaactcctgggtgtggacgtgtcaagcgaaaccggattccaactatgtggtggtcggctgccaggacggcaccatttccttctaccagcttattttcagcacagtccatgggctttacaaggaccgctatgcctacagggatagcatgactgacgtcattgtgcagcacctgatcactgagcagaaagttcggattaaatgcaaagagcttgtcaagaagattgccatctacagaaatcgattggctatccaactgccagagaaaatcctcatctatgagttgtattcagaggacttatcagacatgcattaccgggtaaaggagaagattatcaagaagtttgagtgcaacctcctggtggtgtgtgccaatcacatcatcctgtgccaggagaaacggctgcagtgcctgtccttcagcggagtgaaggagcgggagtggcagatggagtctctcattcgttacatcaaggtgatcggtggccctcctggaagagaaggcctcttagtggggctgaagaatggacagatcctgaagatcttcgtggacaatctctttgctatcgtcctgctgaagcaggccacagctgtgcgctgcttggacatgagtgcctcccgtaagaagctggccgtggtagatgaaaatgacacttgcctggtgtatgacatcgacaccaaggagctgctttttcaggaaccaaacgccaacagtgtagcttggaacacccagtgtgaggacatgctctgcttctcgggaggaggctacctcaacatcaaagccagcaccttccctgtgcaccggcagaagctgcagggctttgtggtcggctacaatggctccaagatcttctgcctccatgtcttctccatttctgccgtggaggtgccgcagtccgctcccatgtaccagtacctggataggaaactgttcaaggaagcctaccagattgcttgcttgggtgtcacagacactgattggcgtgaactggccatggaagcgctagaaggtttagattttgaaacagcaaagaaggccttcatcagagtacaagacctccgatatttagagctcatcagcagcattgaggagaggaagaagcggggagagaccaacaatgacctgtttctggcagatgtgttttcctaccaggggaagttccatgaggccgccaaactgtacaagaggagtgggcacgagaacctcgcgcttgaaatgtacaccgacctctgcatgtttgagtatgccaaggatttccttggatctggagaccccaaagaaacaaagatgctaatcaccaaacaggctgactgggccagaaatatcaaggagcccaaagccgccgtggagatgtacatctcagcaggagagcacgtcaaggccatcgagatctgtggtgaccatggctgggttgacatgttgatcgacatcgcccgcaaactggacaaggctgagcgcgagcccctgctgctgtgcgctacctacctcaagaagctggacagccctggctatgctgctgagacctacctgaagatgggtgacctcaagtccctggtgcagctgcacgtggagacccagcgctgggatgaggcctttgctttgggtgagaagcatcctgagtttaaggatgacatctacatgccgtatgctcagtggctagcagagaacgatcgctttgaggaagcccagaaagcgttccacaaggctgggcgacagagagaagcggtccaggtgctggagcagctcacaaacaatgccgtggcggagagcaggtttaatgatgctgcctattattactggatgctgtccatgcagtgcctcgatatagctcaagatcctgcccagaaggacacaatgcttggcaagttctaccacttccagcgtttggcagagctgtaccatggttaccatgccatccatcgccacacggaagatccgttcagtgtccatcgtcctgaaactcttttcaacatctccaggttcctgctgcacagcctgcccaaggacaccccctcgggcatctctaaagtgaaaatactcttcaccttggccaagcagagcaaggccctcggtgcctacaggctggcccggcacgcctatgacaagctgcgtggcctgtacatccctgccagattccaaaagtccattgagctgggtaccctgaccatccgcgccaagcccttccacgacagtgaggagttggtgcccttgtgctaccgctgctccaccaacaacccgctgctcaacaacctgggcaacgtctgcatcaactgccgccagcccttcatcttctccgcctcttcctacgacgtgctacacctggttgagttctacctggaggaagggatcactgatgaagaagccatctccctcatcgacctggaggtgctgagacccaagcgggatgacagacagctagagattgcaaacaacagctcccagattctgcggctagtggagaccaaggactccatcggagatgaggacccgttcacagctaagctgagctttgagcaaggtggctcagagttcgtgccagtggtggtgagccggctggtgctgcgctccatgagccgccgggatgtcctcatcaagcgatggcccccacccctgaggtggcaatacttccgctcactgctgcctgacgcctccattaccatgtgcccctcctgcttccagatgttccattctgaggactatgagttgctggtgcttcagcatggctgctgcccctactgccgcaggtgcaaggatgaccctggcccatgaccagcatcctggggacggcctgcaccctctgcccgccttggggtctgctgggctgtgaaggagaataaagagttaaactgtcag

SEQ ID NO: 351135 - DNA, 4169 bp, Homo sapiens
attgcttttgctgcttttctggctttccctttcggacatgcgcgctcggagcaaggcgccctcgcactcagcttaccgcgcatgtacgttgccaggggtaacgcaggtagccaaagtggcttgtggagtggcgaccgttagtgaggcggttgctgagacagacgctgaggcgggtaggaggagcccgagccgtaagggaagccgtgatgagggccgtgttgacgtggagagataaagccgagcactgtataaatgacatcgcatttaagcctgatggaactcaactgattttggctgccggaagcagattactggtttatgacacctctgatggcaccttacttcagcccctcaagggacacaaagacactgtgtactgtgtggcatatgcgaaggatggcaagcgctttgcttctggatcagctgacaaaagcgttattatctggacatcaaaactggaaggcattctgaagtacacatcttggtctgtgatgtcttcattgcacctccatcttccatttctgggcctccacaaaacagtaagagtaacagccacagataaagcacctaaaggccaaggtgggaggattgattgcttgaggccaagcgttcaaaaccaacctggccaaaagcacaatgatgctatacaatgtgtctcctacaatcctattactcatcaactggcatcttgttcctccagtgactttgggttgtggtctcctgaacagaagtctgtctccaaacacaaatcaagcagcaagatcatctgctgcagctggacaaatgatggtcagtacctggcgctggggatgttcaatgggatcatcagcatacggaacaaaaatggcgaggagaaagtaaagatcgagcggccggggggctccctctcgccaatatggtccatctgctggaacccttcaagccgatgggagagtttctggatgaacagagagaatgaggatgccgaggatgtcattgtcaacagatatattcaggaaatcccttccactctgaagtcagcagtgtacagtagtcagggtagtgaggcagaggaggaagaaccagaggaagaggacgacagtcccagggacgacaacttagaggaacgtaatgacatcctggctgtggctgactggggacagaaagtttccttctaccagctgagtggaaaacagattggaaaggatcgggcactgaactttgacccctgctgcatcagctactttactaaaggcgagtacattttgctggggggttcagacaagcaagtatctcttttcaccaaggatggagtgcggcttgggactgttggggagcagaactcctgggtgtggacgtgtcaagcgaaaccggattccaactatgtggtggtcggctgccaggacggcaccatttccttctaccagcttattttcagcacagtccatgggctttacaaggaccgctatgcctacagggatagcatgactgacgtcattgtgcagcacctgatcactgagcagaaagttcggattaaatgcaaagagcttgtcaagaagattgccatctacagaaatcgattggctatccaactgccagagaaaatcctcatctatgagttgtattcagaggacttatcagacatgcattaccgggtaaaggagaagattatcaagaagtttgagtgcaacctcctggtggtgtgtgccaatcacatcatcctgtgccaggagaaacggctgcagtgcctgtccttcagcggagtgaaggagcgggagtggcagatggagtctctcattcgttacatcaaggtgatcggtggccctcctggaagagaaggcctcttagtggggctgaagaatggacagatcctgaagatcttcgtggacaatctctttgctatcgtcctgctgaagcaggccacagctgtgcgctgcttggacatgagtgcctcccgtaagaagctggccgtggtagatgaaaatgacacttgcctggtgtatgacatcgacaccaaggagctgctttttcaggaaccaaacgccaacagtgtagcttggaacacccagtgtgaggacatgctctgcttctcgggaggaggctacctcaacatcaaagccagcaccttccctgtgcaccggcagaagctgcagggctttgtggtcggctacaatggctccaagatcttctgcctccatgtcttctccatttctgccgtggaggtgccgcagtccgctcccatgtaccagtacctggataggaaactgttcaaggaagcctaccagattgcttgcttgggtgtcacagacactgattggcgtgaactggccatggaagcgctagaaggtttagattttgaaacagcaaagaaggccttcatcagagtacaagacctccgatatttagagctcatcagcagcattgaggagaggaagaagcggggagagaccaacaatgacctgtttctggcagatgtgttttcctaccaggggaagttccatgaggccgccaaactgtacaagaggagtgggcacgagaacctcgcgcttgaaatgtacaccgacctctgcatgtttgagtatgccaaggatttccttggatctggagaccccaaagaaacaaagatgctaatcaccaaacaggctgactgggccagaaatatcaaggagcccaaagccgccgtggagatgtacatctcagcaggagagcacgtcaaggccatcgagatctgtggtgaccatggctgggttgacatgttgatcgacatcgcccgcaaactggacaaggctgagcgcgagcccctgctgctgtgcgctacctacctcaagaagctggacagccctggctatgctgctgagacctacctgaagatgggtgacctcaagtccctggtgcagctgcacgtggagacccagcgctgggatgaggcctttgctttgggtgagaagcatcctgagtttaaggatgacatctacatgccgtatgctcagtggctagcagagaacgatcgctttgaggaagcccagaaagcgttccacaaggctgggcgacagagagaagcggtccaggtgctggagcagctcacaaacaatgccgtggcggagagcaggtttaatgatgctgcctattattactggatgctgtccatgcagtgcctcgatatagctcaagatcctgcccagaaggacacaatgcttggcaagttctaccacttccagcgtttggcagagctgtaccatggttaccatgccatccatcgccacacggaagatccgttcagtgtccatcgtcctgaaactcttttcaacatctccaggttcctgctgcacagcctgcccaaggacaccccctcgggcatctctaaagtgaaaatactcttcaccttggccaagcagagcaaggccctcggtgcctacaggctggcccggcacgcctatgacaagctgcgtggcctgtacatccctgccagattccaaaagtccattgagctgggtaccctgaccatccgcgccaagcccttccacgacagtgaggagttggtgcccttgtgctaccgctgctccaccaacaacccgctgctcaacaacctgggcaacgtctgcatcaactgccgccagcccttcatcttctccgcctcttcctacgacgtgctacacctggttgagttctacctggaggaagggatcactgatgaagaagccatctccctcatcgacctggaggtgctgagacccaagcgggatgacagacagctagagattgcaaacaacagctcccagattctgcggctagtggagaccaaggactccatcggagatgaggacccgttcacagctaagctgagctttgagcaaggtggctcagagttcgtgccagtggtggtgagccggctggtgctgcgctccatgagccgccgggatgtcctcatcaagcgatggcccccacccctgaggtggcaatacttccgctcactgctgcctgacgcctccattaccatgtgcccctcctgcttccagatgttccattctgaggactatgagttgctggtgcttcagcatggctgctgcccctactgccgcaggtgcaaggatgaccctggcccatgaccagcatcctggggacggcctgcaccctctgcccgccttggggtctgctgggctgtgaaggagaataaagagttaaactgtcag

SEQ ID NO: 351136 - DNA, 4709 bp, Homo sapiens
  misc_feature (3821)..(3821): n is a, c, g, or t
cggacgcgtgggagccgagcactgtataaatgacatcgcatttaagcctgatggaactcaactgattttggctgccggaagcagattactggtttatgacacctctgatggcaccttacttcagcccctcaagggacacaaagacactgtgtactgtgtggcatatgcgaaggatggcaagcgctttgcttctggatcagctgacaaaagcgttattatctggacatcaaaactggaaggcattctgaagtacacgcacaatgatgctatacaatgtgtctcctacaatcctattactcatcaactggcatcttgttcctccagtgactttgggttgtggtctcctgaacagaagtctgtctccaaacacaaatcaagcagcaagatcatctgctgcagctggacaaatgatggtcagtacctggcgctggggatgttcaatgggatcatcagcatacggaacaaaaatggcgaggagaaagtaaagatcgagcggccggggggctccctctcgccaatatggtccatctgctggaacccttcaagagaggaacgtaatgacatcctggctgtggctgactggggacagaaagtttccttctaccagctgagtggaaaacagattggaaaggatcgggcactgaactttgacccctgctgcatcagctactttactaaaggcgagtacattttgctggggggttcagacaagcaagtatctcttttcaccaaggatggagtgcggcttgggactgttggggagcagaactcctgggtgtggacgtgtcaagcgaaaccggattccaactatgtggtggtcggctgccaggacggcaccatttccttctaccagcttattttcagcacagtccatgggctttacaaggaccgctatgcctacagggatagcatgactgacgtcattgtgcagcacctgatcactgagcagaaagttcggattaaatgcaaagagcttgtcaagaagattgccatctacagaaatcgattggctatccaactgccagagaaaatcctcatctatgagttgtattcagaggacttatcagacatgcattaccgggtaaaggagaagattatcaagaagtttgagtgcaacctcctggtggtgtgtgccaatcacatcatcctgtgccaggagaaacggctgcagtgcctgtccttcagcggagtgaaggagcgggagtggcagatggagtctctcattcgttacatcaaggtgatcggtggccctcctggaagagaaggcctcttagtggggctgaagaatggacagatcctgaagatcttcgtggacaatctctttgctatcgtcctgctgaagcaggccacagctgtgcgctgcttggacatgagtgcctcccgtaagaagctggccgtggtagatgaaaatgacacttgcctggtgtatgacatcgacaccaaggagctgctttttcaggaaccaaacgccaacagtgtagcttggaacacccagtgtgaggacatgctctgcttctcgggaggaggctacctcaacatcaaagccagcaccttccctgtgcaccggcagaagctgcagggctttgtggtcggctacaatggctccaagatcttctgcctccatgtcttctccatttctgccgtggaggtgccgcagtccgctcccatgtaccagtacctggataggaaactgttcaaggaagcctaccagattgcttgcttgggtgtcacagacactgattggcgtgaactggccatggaagcgctagaaggtttagattttgaaacagcaaagaaggccttcatcagagtacaagacctccgatatttagagctcatcagcagcattgaggagaggaagaagcggggagagaccaacaatgacctgtttctggcagatgtgttttcctaccaggggaagttccatgaggccgccaaactgtacaagaggagtgggcacgagaacctcgcgcttgaaatgtacaccgacctctgcatgtttgagtatgccaaggatttccttggatctggagaccccaaagaaacaaagatgctaatcaccaaacaggctgactgggccagaaatatcaaggagcccaaagccgccgtggagatgtacatctcagcaggagagcacgtcaaggccatcgagatctgtggtgaccatggctgggttgacatgttgatcgacatcgcccgcaaactggacaaggctgagcgcgagcccctgctgctgtgcgctacctacctcaagaagctggacagccctggctatgctgctgagacctacctgaagatgggtgacctcaagtccctggtgcagctgcacgtggagacccagcgctgggatgaggcctttgctttgggtgagaagcatcctgagtttaaggatgacatctacatgccgtatgctcagtggctagcagagaacgatcgctttgaggaagcccagaaagcgttccacaaggctgggcgacagagagaagcggtccaggtgctggagcagctcacaaacaatgccgtggcggagagcaggtttaatgatgctgcctattattactggatgctgtccatgcagtgcctcgatatagctcaagatcctgcccagaaggacacaatgcttggcaagttctaccacttccagcgtttggcagagctgtaccatggttaccatgccatccatcgccacacggaagatccgttcagtgtccatcgtcctgaaactcttttcaacatctccaggttcctgctgcacagcctgcccaaggacaccccctcgggcatctctaaagtgaaaatactcttcaccttggccaagcagagcaaggccctcggtgcctacaggctggcccggcacgcctatgacaagctgcgtggcctgtacatccctgccagattccaaaagtccattgagctgggtaccctgaccatccgcgccaagcccttccacgacagtgaggtgaggatgcagcacccttgggcaggtggcttctcctctcccttgaggccatctcatgccttcttgcctggcctgggttccgtttgaagagagacagctgcagctccctctaggctctgtgccccctgctcaagcctggccatgccagctcccctgtgcttccctgtccacctcctgttctccccgcagtccacctggcgcccgctcacagcccccggccccggcctcagccctcagcctggcctcccttgctccttgccctcccctaggcaagccccacacctctgtgcccaggtggctctgcctttaccccaggcctggccccagagctgactcttactctagaaacctctgccctttctggaaccaggctgtagttctccagcaaatctaccccacactcccaacccacattccttcaacccagccagcttccttctttcacacatcctccctcaagctcagagcaaggacttggttcagacagacctgggttcacatcccggctccaccctctcctagctctgtctccatctttctgcaccttgggttccccctttcccacaggtagttgtgaggctaaatgagccagtatagtccacgtgctccgcacggtgcccggagcatggtaaatggctggctaatggtggcagcggccactgtcattcctgccaggggaaaagtgccgttgagcgctgcctgtgcaggtgtcttgggcacggggacccaagtgacagggcttgggtatttcggcaggcctttatcctgcttccccatggcatggagctcctgggcccggcgccccttccctgcctgcccacccgggtggcctttcctcttggcagccaggccccaggggccngaagccagagtccagggggaggaggacacgtgcctgccccggcccctcgggagtccgtggctgttttgtaggagttggtgcccttgtgctaccgctgctccaccaacaacccgctgctcaacaacctgggcaacgtctgcatcaactgccgccagcccttcatcttctccgcctcttcctacgacgtgctacacctggttgagttctacctggaggaagggatcactgatgaagaagccatctccctcatcgacctggaggtgctgagacccaagcgggatgacagacagctagagattgcaaacaacagctcccagattctgcggctagtggagaccaaggactccatcggagatgaggacccgttcacagctaagctgagctttgagcaaggtggctcagagttcgtgccagtggtggtgagccggctggtgctgcgctccatgagccgccgggatgtcctcatcaagcgatggcccccacccctgaggtggcaatacttccgctcactgctgcctgacgcctccattaccatgtgcccctcctgcttccagatgttccattctgaggactatgagttgctggtgcttcagcatggctgctgcccctactgccgcaggtgcaaggatgaccctggcccatgaccagcatcctggggacggcctgcaccctctgcccgccttggggtctgctgggctgtgaaggagaataaagagttaaactgtcagaatgtgtttcttgcccagatgaagtttgtgttttgtggggggggccttgtgtaaccacggaattcctatttatggcatttcatgccttgtaaatagcaccaggagatgaggaagagaatgtacatatattttctaaggaaaaaaatctgttactttcaga

SEQ ID NO: 351137 - DNA, 494 bp, Homo sapiens
aggcttgtctgtcctctcccctgcttgcattccatgtgcatctaaagtggacttcactggcccctgcgctgtccacatcctccccaaatcctgggggcccagcaagcgtgatgtgcccttgaccttcactcagaaaacaagaaaccccacagccccctcccatctccccttccagccctcaaacaaaggtgctgcaggtctgtgtccagccctgaccactgccaagccccctccccttgagaggcagtgcgtcctggccccaggcgtagggctgatgagcactagggcttcagcctggtcttacagctgtcttcccttagatgttccattctgaggactatgagttgctggtgcttcagcatggctgctgcccctactgccgcaggtgcaaggatgaccctggcccatgaccagcatcctggggacggcctgcaccctctgcccgccttggggtctgctgggctgtgaaggagaataaagagttaaactgtcag

SEQ ID NO: 351138 - DNA, 654 bp, Homo sapiens
aggcttgtctgtcctctcccctgcttgcattccatgtgcatctaaagtggacttcactggcccctgcgctgtccacatcctccccaaatcctgggggcccagcaagcgtgatgtgcccttgaccttcactcagaaaacaagaaaccccacagccccctcccatctccccttccagccctcaaacaaaggtgctgcaggtctgtgtccagccctgaccactgccaagccccctccccttgagaggcagtgcgtcctggccccaggcgtagggctgatgagcactagggcttcagcctggtcttacagctgtcttcccttagatgttccattctgaggactatgagttgctggtgcttcagcatggctgctgcccctactgccgcaggtgcaaggatgaccctggcccatgaccagcatcctggggacggcctgcaccctctgcccgccttggggtctgctgggctgtgaaggagaataaagagttaaactgtcagaatgtgtttcttgcccagatgaagtttgtgttttgtggggggggccttgtgtaaccacggaattcctatttatggcatttcatgccttgtaaatagcaccaggagatgaggaagagaatgtacatatattttctaaggaaaaaaatctgttactttcaga

SEQ ID NO: 351139 - DNA, 3536 bp, Homo sapiens
attgcttttgctgcttttctggctttccctttcggacatgcgcgctcggagcaaggcgccctcgcactcagcttaccgcgcatgtacgttgccaggggtaacgcaggtagccaaagtggcttgtggagtggcgaccgttagtgaggcggttgctgagacagacgctgaggcgggtaggaggagcccgagccgtaagggaagccgtgatgagggccgtgttgacgtggagagataaagccgagcactgtataaatgacatcgcatttaagcctgatggaactcaactgattttggctgccggaagcagattactggtttatgacacctctgatggcaccttacttcagcccctcaagggacacaaagacactgtgtactgtgtggcatatgcgaaggatgggttgtggtctcctgaacagaagtctgtctccaaacacaaatcaagcagcaagatcatctgctgcagagaggaacgtaatgacatcctggctgtggctgactggggacagaaagtttccttctaccagctgagtggaaaacagattggaaaggatcgggcactgaactttgacccctgctgcatcagctactttactaaaggcgagtacattttgctggggggttcagacaagcaagtatctcttttcaccaaggatggagtgcggcttgggactgttggggagcagaactcctgggtgtggacgtgtcaagcgaaaccggattccaactatgtggtggtcggctgccaggacggcaccatttccttctaccagcttattttcagcacagtccatgggctttacaaggaccgctatgcctacagggatagcatgactgacgtcattgtgcagcacctgatcactgagcagaaagttcggattaaatgcaaagagcttgtcaagaagattgccatctacagaaatcgattggctatccaactgccagagaaaatcctcatctatgagttgtattcagaggacttatcagacatgcattaccgggtaaaggagaagattatcaagaagtttgagtgcaacctcctggtggtgtgtgccaatcacatcatcctgtgccaggagaaacggctgcagtgcctgtccttcagcggagtgaaggagcgggagtggcagatggagtctctcattcgttacatcaaggtgatcggtggccctcctggaagagaaggcctcttagtggggctgaagaatggacagatcctgaagatcttcgtggacaatctctttgctatcgtcctgctgaagcaggccacagctgtgcgctgcttggacatgagtgcctcccgtaagaagctggccgtggtagatgaaaatgacacttgcctggtgtatgacatcgacaccaaggagctgctttttcaggaaccaaacgccaacagtgtagcttggaacacccagtgtgaggacatgctctgcttctcgggaggaggctacctcaacatcaaagccagcaccttccctgtgcaccggcagaagctgcagggctttgtggtcggctacaatggctccaagatcttctgcctccatgtcttctccatttctgccgtggaggtgccgcagtccgctcccatgtaccagtacctggataggaaactgttcaaggaagcctaccagattgcttgcttgggtgtcacagacactgattggcgtgaactggccatggaagcgctagaaggtttagattttgaaacagcaaagaaggccttcatcagagtacaagacctccgatatttagagctcatcagcagcattgaggagaggaagaagcggggagagaccaacaatgacctgtttctggcagatgtgttttcctaccaggggaagttccatgaggccgccaaactgtacaagaggagtgggcacgagaacctcgcgcttgaaatgtacaccgacctctgcatgtttgagtatgccaaggatttccttggatctggagaccccaaagaaacaaagatgctaatcaccaaacaggctgactgggccagaaatatcaaggagcccaaagccgccgtggagatgtacatctcagcaggagagcacgtcaaggccatcgagatctgtggtgaccatggctgggttgacatgttgatcgacatcgcccgcaaactggacaaggctgagcgcgagcccctgctgctgtgcgctacctacctcaagaagctggacagccctggctatgctgctgagacctacctgaagatgggtgacctcaagtccctggtgcagctgcacgtggagacccagcgctgggatgaggcctttgctttgggtgagaagcatcctgagtttaaggatgacatctacatgccgtatgctcagtggctagcagagaacgatcgctttgaggaagcccagaaagcgttccacaaggctgggcgacagagagaagcggtccaggtgctggagcagctcacaaacaatgccgtggcggagagcaggtttaatgatgctgcctattattactggatgctgtccatgcagtgcctcgatatagctcaagatcctgcccagaaggacacaatgcttggcaagttctaccacttccagcgtttggcagagctgtaccatggttaccatgccatccatcgccacacggaagatccgttcagtgtccatcgtcctgaaactcttttcaacatctccaggttcctgctgcacagcctgcccaaggacaccccctcgggcatctctaaagtgaaaatactcttcaccttggccaagcagagcaaggccctcggtgcctacaggctggcccggcacgcctatgacaagctgcgtggcctgtacatccctgccagattccaaaagtccattgagctgggtaccctgaccatccgcgccaagcccttccacgacagtgaggagttggtgcccttgtgctaccgctgctccaccaacaacccgctgctcaacaacctgggcaacgtctgcatcaactgccgccagcccttcatcttctccgcctcttcctacgacgtgctacacctggttgagttctacctggaggaagggatcactgatgaagaagccatctccctcatcgacctggaggtgctgagacccaagcgggatgacagacagctagagattgcaaacaacagctcccagattctgcggctagtggagaccaaggactccatcggagatgaggacccgttcacagctaagctgagctttgagcaaggtggctcagagttcgtgccagtggtggtgagccggctggtgctgcgctccatgagccgccgggatgtcctcatcaagcgatggcccccacccctgaggtggcaatacttccgctcactgctgcctgacgcctccattaccatgtgcccctcctgcttccagatgttccattctgaggactatgagttgctggtgcttcagcatggctgctgcccctactgccgcaggtgcaaggatgaccctggcccatgaccagcatcctggggacggcctgcaccctctgcccgccttggggtctgctgggctgtgaaggagaataaagagttaaactgtcag

SEQ ID NO: 351140 - DNA, 3785 bp, Homo sapiens
attgcttttgctgcttttctggctttccctttcggacatgcgcgctcggagcaaggcgccctcgcactcagcttaccgcgcatgtacgttgccaggggtaacgcaggtagccaaagtggcttgtggagtggcgaccgttagtgaggcggttgctgagacagacgctgaggcgggtaggaggagcccgagccgtaagggaagccgtgatgagggccgtgttgacgtggagagataaagccgagcactgtataaatgacatcgcatttaagcctgatggaactcaactgattttggctgccggaagcagattactggtttatgacacctctgatggcaccttacttcagcccctcaagggacacaaagacactgtgtactgtgtggcatatgcgaaggatggcaagcgctttgcttctggatcagctgacaaaagcgttattatctggacatcaaaactggaaggcattctgaagtacacgcacaatgatgctatacaatgtgtctcctacaatcctattactcatcaactggcatcttgttcctccagtgactttgggttgtggtctcctgaacagaagtctgtctccaaacacaaatcaagcagcaagatcatctgctgcagctggacaaatgatggtcagtacctggcgctggggatgttcaatgggatcatcagcatacggaacaaaaatggcgaggagaaagtaaagatcgagcggccggggggctccctctcgccaatatggtccatctgctggaacccttcaagagaggaacgtaatgacatcctggctgtggctgactggggacagaaagtttccttctaccagctgagtggaaaacagattggaaaggatcgggcactgaactttgacccctgctgcatcagctactttactaaaggcgagtacattttgctggggggttcagacaagcaagtatctcttttcaccaaggatggagtgcggcttgggactgttggggagcagaactcctgggtgtggacgtgtcaagcgaaaccggattccaactatgtggtggtcggctgccaggacggcaccatttccttctaccagcttattttcagcacagtccatgggctttacaaggaccgctatgcctacagggatagcatgactgacgtcattgtgcagcacctgatcactgagcagaaagttcggattaaatgcaaagagcttgtcaagaagattgccatctacagaaatcgattggctatccaactgccagagaaaatcctcatctatgagttgtattcagaggacttatcagacatgcattaccgggtaaaggagaagattatcaagaagtttgagtgcaacctcctggtggtgtgtgccaatcacatcatcctgtgccaggagaaacggctgcagtgcctgtccttcagcggagtgaaggagcgggagtggcagatggagtctctcattcgttacatcaaggtgatcggtggccctcctggaagagaaggcctcttagtggggctgaagaatggacagatcctgaagatcttcgtggacaatctctttgctatcgtcctgctgaagcaggccacagctgtgcgctgcttggacatgagtgcctcccgtaagaagctggccgtggtagatgaaaatgacacttgcctggtgtatgacatcgacaccaaggagctgctttttcaggaaccaaacgccaacagtgtagcttggaacacccagtgtgaggacatgctctgcttctcgggaggaggctacctcaacatcaaagccagcaccttccctgtgcaccggcagaagctgcagggctttgtggtcggctacaatggctccaagatcttctgcctccatgtcttctccatttctgccgtggaggtgccgcagtccgctcccatgtaccagtacctggataggaaactgttcaaggaagcctaccagattgcttgcttgggtgtcacagacactgattggcgtgaactggccatggaagcgctagaaggtttagattttgaaacagcaaagaaggagaggaagaagcggggagagaccaacaatgacctgtttctggcagatgtgttttcctaccaggggaagttccatgaggccgccaaactgtacaagaggagtgggcacgagaacctcgcgcttgaaatgtacaccgacctctgcatgtttgagtatgccaaggatttccttggatctggagaccccaaagaaacaaagatgctaatcaccaaacaggctgactgggccagaaatatcaaggagcccaaagccgccgtggagatgtacatctcagcaggagagcacgtcaaggccatcgagatctgtggtgaccatggctgggttgacatgttgatcgacatcgcccgcaaactggacaaggctgagcgcgagcccctgctgctgtgcgctacctacctcaagaagctggacagccctggctatgctgctgagacctacctgaagatgggtgacctcaagtccctggtgcagctgcacgtggagacccagcgctgggatgaggcctttgctttgggtgagaagcatcctgagtttaaggatgacatctacatgccgtatgctcagtggctagcagagaacgatcgctttgaggaagcccagaaagcgttccacaaggctgggcgacagagagaagcggtccaggtgctggagcagctcacaaacaatgccgtggcggagagcaggtttaatgatgctgcctattattactggatgctgtccatgcagtgcctcgatatagctcaagatcctgcccagaaggacacaatgcttggcaagttctaccacttccagcgtttggcagagctgtaccatggttaccatgccatccatcgccacacggaagatccgttcagtgtccatcgtcctgaaactcttttcaacatctccaggttcctgctgcacagcctgcccaaggacaccccctcgggcatctctaaagtgaaaatactcttcaccttggccaagcagagcaaggccctcggtgcctacaggctggcccggcacgcctatgacaagctgcgtggcctgtacatccctgccagattccaaaagtccattgagctgggtaccctgaccatccgcgccaagcccttccacgacagtgaggagttggtgcccttgtgctaccgctgctccaccaacaacccgctgctcaacaacctgggcaacgtctgcatcaactgccgccagcccttcatcttctccgcctcttcctacgacgtgctacacctggttgagttctacctggaggaagggatcactgatgaagaagccatctccctcatcgacctggaggtgctgagacccaagcgggatgacagacagctagagattgcaaacaacagctcccagattctgcggctagtggagaccaaggactccatcggagatgaggacccgttcacagctaagctgagctttgagcaaggtggctcagagttcgtgccagtggtggtgagccggctggtgctgcgctccatgagccgccgggatgtcctcatcaagcgatggcccccacccctgaggtggcaatacttccgctcactgctgcctgacgcctccattaccatgtgcccctcctgcttccagatgttccattctgaggactatgagttgctggtgcttcagcatggctgctgcccctactgccgcaggtgcaaggatgaccctggcccatgaccagcatcctggggacggcctgcaccctctgcccgccttggggtctgctgggctgtgaaggagaataaagagttaaactgtcag

SEQ ID NO: 351141 - DNA, 719 bp, Homo sapiens
attgcttttgctgcttttctggctttccctttcggacatgcgcgctcggagcaaggcgccctcgcactcagcttaccgcgcatgtacgttgccaggggtaacgcaggtagccaaagtggcttgtggagtggcgaccgttagtgaggcggttgctgagacagacgctgaggcgggtaggaggagcccgagccgtaagggaagccgtgatgagggccgtgttgacgtggagagataaagccgagcactgtataaatgacatcgcatttaagcctgatggaactcaactgattttggctgccggaagcagattactggtttatgacacctctgatggcaccttacttcagcccctcaagggacacaaagacactgtgtactgtgtggcatatgcgaaggatggcaagcgctttgcttctggatcagctgacaaaagcgttattatctggacatcaaaactggaaggcattctgaagtacacgcacaatgatgctatacaatgtgtctcctacaatcctattactcatcaactggcatcttgttcctccagtgactttgggttgtggtctcctgaacagaagtctgtctccaaacacaaatcaagcagcaagatcatctgctgcagctggacaaatgatggtcagccacagccaggatgtcattacgttcctctcttgaagggttccagcagatggaccatattggcgagagggagccccccg

SEQ ID NO: 351142 - DNA, 410 bp, Homo sapiens
ggctcagaccggcttgttcttctttgggtctagagtctcccaaggaggcaccgccacagactgtggcatcacggttttgttttacctgatctcaaaatgactgatgcaactgggatgtctttgctgttctttacatggtccaatcccatggataaagccatgcctcgctgggtggtataacctcctgcacgcacgatgattaatctgtgcttgctcccttcctctcctctgtggctcactgtctagatagagcttgacttcccacccctagccaatcacccacttttgaagccaagaagacagcttattttattctttatttcttcgccacaggccttcatcagagtacaagacctccgatatttagagctcatcagcagcattgaggtaaaagatgaagcatttttcct

SEQ ID NO: 351143 - DNA, 3683 bp, Homo sapiens
attgcttttgctgcttttctggctttccctttcggacatgcgcgctcggagcaaggcgccctcgcactcagcttaccgcgcatgtacgttgccaggggtaacgcaggtagccaaagtggcttgtggagtggcgaccgttagtgaggcggttgctgagacagacgctgaggcgggtaggaggagcccgagccgtaagggaagccgtgatgagggccgtgttgacgtggagagataaagccgagcactgtataaatgacatcgcatttaagcctgatggaactcaactgattttggctgccggaagcagattactggtttatgacacctctgatggcaccttacttcagcccctcaagggacacaaagacactgtgtactgtgtggcatatgcgaaggatgggttgtggtctcctgaacagaagtctgtctccaaacacaaatcaagcagcaagatcatctgctgcagctggacaaatgatggtcagtacctggcgctggggatgttcaatgggatcatcagcatacggaacaaaaatggcgaggagaaagtaaagatcgagcggccggggggctccctctcgccaatatggtccatctgctggaacccttcaagagaggaacgtaatgacatcctggctgtggctgactggggacagaaagtttccttctaccagctgagtggaaaacagattggaaaggatcgggcactgaactttgacccctgctgcatcagctactttactaaaggcgagtacattttgctggggggttcagacaagcaagtatctcttttcaccaaggatggagtgcggcttgggactgttggggagcagaactcctgggtgtggacgtgtcaagcgaaaccggattccaactatgtggtggtcggctgccaggacggcaccatttccttctaccagcttattttcagcacagtccatgggctttacaaggaccgctatgcctacagggatagcatgactgacgtcattgtgcagcacctgatcactgagcagaaagttcggattaaatgcaaagagcttgtcaagaagattgccatctacagaaatcgattggctatccaactgccagagaaaatcctcatctatgagttgtattcagaggacttatcagacatgcattaccgggtaaaggagaagattatcaagaagtttgagtgcaacctcctggtggtgtgtgccaatcacatcatcctgtgccaggagaaacggctgcagtgcctgtccttcagcggagtgaaggagcgggagtggcagatggagtctctcattcgttacatcaaggtgatcggtggccctcctggaagagaaggcctcttagtggggctgaagaatggacagatcctgaagatcttcgtggacaatctctttgctatcgtcctgctgaagcaggccacagctgtgcgctgcttggacatgagtgcctcccgtaagaagctggccgtggtagatgaaaatgacacttgcctggtgtatgacatcgacaccaaggagctgctttttcaggaaccaaacgccaacagtgtagcttggaacacccagtgtgaggacatgctctgcttctcgggaggaggctacctcaacatcaaagccagcaccttccctgtgcaccggcagaagctgcagggctttgtggtcggctacaatggctccaagatcttctgcctccatgtcttctccatttctgccgtggaggtgccgcagtccgctcccatgtaccagtacctggataggaaactgttcaaggaagcctaccagattgcttgcttgggtgtcacagacactgattggcgtgaactggccatggaagcgctagaaggtttagattttgaaacagcaaagaaggccttcatcagagtacaagacctccgatatttagagctcatcagcagcattgaggagaggaagaagcggggagagaccaacaatgacctgtttctggcagatgtgttttcctaccaggggaagttccatgaggccgccaaactgtacaagaggagtgggcacgagaacctcgcgcttgaaatgtacaccgacctctgcatgtttgagtatgccaaggatttccttggatctggagaccccaaagaaacaaagatgctaatcaccaaacaggctgactgggccagaaatatcaaggagcccaaagccgccgtggagatgtacatctcagcaggagagcacgtcaaggccatcgagatctgtggtgaccatggctgggttgacatgttgatcgacatcgcccgcaaactggacaaggctgagcgcgagcccctgctgctgtgcgctacctacctcaagaagctggacagccctggctatgctgctgagacctacctgaagatgggtgacctcaagtccctggtgcagctgcacgtggagacccagcgctgggatgaggcctttgctttgggtgagaagcatcctgagtttaaggatgacatctacatgccgtatgctcagtggctagcagagaacgatcgctttgaggaagcccagaaagcgttccacaaggctgggcgacagagagaagcggtccaggtgctggagcagctcacaaacaatgccgtggcggagagcaggtttaatgatgctgcctattattactggatgctgtccatgcagtgcctcgatatagctcaagatcctgcccagaaggacacaatgcttggcaagttctaccacttccagcgtttggcagagctgtaccatggttaccatgccatccatcgccacacggaagatccgttcagtgtccatcgtcctgaaactcttttcaacatctccaggttcctgctgcacagcctgcccaaggacaccccctcgggcatctctaaagtgaaaatactcttcaccttggccaagcagagcaaggccctcggtgcctacaggctggcccggcacgcctatgacaagctgcgtggcctgtacatccctgccagattccaaaagtccattgagctgggtaccctgaccatccgcgccaagcccttccacgacagtgaggagttggtgcccttgtgctaccgctgctccaccaacaacccgctgctcaacaacctgggcaacgtctgcatcaactgccgccagcccttcatcttctccgcctcttcctacgacgtgctacacctggttgagttctacctggaggaagggatcactgatgaagaagccatctccctcatcgacctggaggtgctgagacccaagcgggatgacagacagctagagattgcaaacaacagctcccagattctgcggctagtggagaccaaggactccatcggagatgaggacccgttcacagctaagctgagctttgagcaaggtggctcagagttcgtgccagtggtggtgagccggctggtgctgcgctccatgagccgccgggatgtcctcatcaagcgatggcccccacccctgaggtggcaatacttccgctcactgctgcctgacgcctccattaccatgtgcccctcctgcttccagatgttccattctgaggactatgagttgctggtgcttcagcatggctgctgcccctactgccgcaggtgcaaggatgaccctggcccatgaccagcatcctggggacggcctgcaccctctgcccgccttggggtctgctgggctgtgaaggagaataaagagttaaactgtcag

SEQ ID NO: 351144 - DNA, 3684 bp, Homo sapiens
attgcttttgctgcttttctggctttccctttcggacatgcgcgctcggagcaaggcgccctcgcactcagcttaccgcgcatgtacgttgccaggggtaacgcaggtagccaaagtggcttgtggagtggcgaccgttagtgaggcggttgctgagacagacgctgaggcgggtaggaggagcccgagccgtaagggaagccgtgatgagggccgtgttgacgtggagagataaagccgagcactgtataaatgacatcgcatttaagcctgatggaactcaactgattttggctgccggaagcagattactggtttatgacacctctgatggcaccttacttcagcccctcaagggacacaaagacactgtgtactgtgtggcatatgcgaaggatggcaagcgctttgcttctggatcagctgacaaaagcgttattatctggacatcaaaactggaaggcattctgaagtacacgcacaatgatgctatacaatgtgtctcctacaatcctattactcatcaactggcatcttgttcctccagtgactttgggttgtggtctcctgaacagaagtctgtctccaaacacaaatcaagcagcaagatcatctgctgcagctggacaaatgatggtcagtactgactggggacagaaagtttccttctaccagctgagtggaaaacagattggaaaggatcgggcactgaactttgacccctgctgcatcagctactttactaaaggcgagtacattttgctggggggttcagacaagcaagtatctcttttcaccaaggatggagtgcggcttgggactgttggggagcagaactcctgggtgtggacgtgtcaagcgaaaccggattccaactatgtggtggtcggctgccaggacggcaccatttccttctaccagcttattttcagcacagtccatgggctttacaaggaccgctatgcctacagggatagcatgactgacgtcattgtgcagcacctgatcactgagcagaaagttcggattaaatgcaaagagcttgtcaagaagattgccatctacagaaatcgattggctatccaactgccagagaaaatcctcatctatgagttgtattcagaggacttatcagacatgcattaccgggtaaaggagaagattatcaagaagtttgagtgcaacctcctggtggtgtgtgccaatcacatcatcctgtgccaggagaaacggctgcagtgcctgtccttcagcggagtgaaggagcgggagtggcagatggagtctctcattcgttacatcaaggtgatcggtggccctcctggaagagaaggcctcttagtggggctgaagaatggacagatcctgaagatcttcgtggacaatctctttgctatcgtcctgctgaagcaggccacagctgtgcgctgcttggacatgagtgcctcccgtaagaagctggccgtggtagatgaaaatgacacttgcctggtgtatgacatcgacaccaaggagctgctttttcaggaaccaaacgccaacagtgtagcttggaacacccagtgtgaggacatgctctgcttctcgggaggaggctacctcaacatcaaagccagcaccttccctgtgcaccggcagaagctgcagggctttgtggtcggctacaatggctccaagatcttctgcctccatgtcttctccatttctgccgtggaggtgccgcagtccgctcccatgtaccagtacctggataggaaactgttcaaggaagcctaccagattgcttgcttgggtgtcacagacactgattggcgtgaactggccatggaagcgctagaaggtttagattttgaaacagcaaagaaggccttcatcagagtacaagacctccgatatttagagctcatcagcagcattgaggagaggaagaagcggggagagaccaacaatgacctgtttctggcagatgtgttttcctaccaggggaagttccatgaggccgccaaactgtacaagaggagtgggcacgagaacctcgcgcttgaaatgtacaccgacctctgcatgtttgagtatgccaaggatttccttggatctggagaccccaaagaaacaaagatgctaatcaccaaacaggctgactgggccagaaatatcaaggagcccaaagccgccgtggagatgtacatctcagcaggagagcacgtcaaggccatcgagatctgtggtgaccatggctgggttgacatgttgatcgacatcgcccgcaaactggacaaggctgagcgcgagcccctgctgctgtgcgctacctacctcaagaagctggacagccctggctatgctgctgagacctacctgaagatgggtgacctcaagtccctggtgcagctgcacgtggagacccagcgctgggatgaggcctttgctttgggtgagaagcatcctgagtttaaggatgacatctacatgccgtatgctcagtggctagcagagaacgatcgctttgaggaagcccagaaagcgttccacaaggctgggcgacagagagaagcggtccaggtgctggagcagctcacaaacaatgccgtggcggagagcaggtttaatgatgctgcctattattactggatgctgtccatgcagtgcctcgatatagctcaagatcctgcccagaaggacacaatgcttggcaagttctaccacttccagcgtttggcagagctgtaccatggttaccatgccatccatcgccacacggaagatccgttcagtgtccatcgtcctgaaactcttttcaacatctccaggttcctgctgcacagcctgcccaaggacaccccctcgggcatctctaaagtgaaaatactcttcaccttggccaagcagagcaaggccctcggtgcctacaggctggcccggcacgcctatgacaagctgcgtggcctgtacatccctgccagattccaaaagtccattgagctgggtaccctgaccatccgcgccaagcccttccacgacagtgaggagttggtgcccttgtgctaccgctgctccaccaacaacccgctgctcaacaacctgggcaacgtctgcatcaactgccgccagcccttcatcttctccgcctcttcctacgacgtgctacacctggttgagttctacctggaggaagggatcactgatgaagaagccatctccctcatcgacctggaggtgctgagacccaagcgggatgacagacagctagagattgcaaacaacagctcccagattctgcggctagtggagaccaaggactccatcggagatgaggacccgttcacagctaagctgagctttgagcaaggtggctcagagttcgtgccagtggtggtgagccggctggtgctgcgctccatgagccgccgggatgtcctcatcaagcgatggcccccacccctgaggtggcaatacttccgctcactgctgcctgacgcctccattaccatgtgcccctcctgcttccagatgttccattctgaggactatgagttgctggtgcttcagcatggctgctgcccctactgccgcaggtgcaaggatgaccctggcccatgaccagcatcctggggacggcctgcaccctctgcccgccttggggtctgctgggctgtgaaggagaataaagagttaaactgtcag

SEQ ID NO: 351145 - DNA, 2747 bp, Homo sapiens
  misc_feature (325)..(325): n is a, c, g, or t
  misc_feature (364)..(364): n is a, c, g, or t
  misc_feature (402)..(402): n is a, c, g, or t
  misc_feature (862)..(862): n is a, c, g, or t
gaaaacaatacttcaagctccacatttgggaaccattagcacagaggtcctggctgatttctcttccctgcccaggaagccaggagagatgcaggccactgaagcacactggctggcctaaaacaagggcaaggcctttccttgttaaagatgtcatggcccaactcaagactcattctcaggcctgcacgcacatatgcacatatacacgcgtgcatacatgtggcaggaaggggcacagaacctggagtccagtcacctctggctattgccagctatttgctgggacaggtcatttgtcctctctgagtctcggtctcctggnctgtagccagggagaaataatacctactgcacaggactntggggacagccaaaagccttttataaacctaagaaagngaagtcgttaggaactattcatgggcactcacagcaaggcaaccccatcttgtaggagggcatctgtccccagggcagggatcaggagagctgtttccagaggcttccagggtaacttggagcaaatcacttacctttcttggactcagtccctggaagaagaggccattccagaccgcttcctcccacgaactcattcattgtgtcagcaaacgtagactggggttctgctgagggaggccgatacaacccaccactgcccacggctgtgcacggctttgctgtgggaacaggcctgtaactgcggcacaacctgcgatctggacaaagggcagaggaagctgagactctttcccctggggtgggggcttgaggggcttgggaggactctgcagaagaggtgacatttcaacagggccttgaaagccaaataggtattttccagaggcagagtggggangggcaaaggcattccaggtgagggtgacatcctatggcgaggcaggcctgtaggtgggaaggaggggaggatgggcagagagtttgtgctgtggagcacagtagcccagtcatgagagaggtgcaggatggagcacacagggtgggctgggcaggctgggcagggtgctgattggcggctgcagggctgctccccaggcatgggtaatcatcccacgcatctggaggcaggctctgtatgcatctggttctttccatggctctgaaaacagtcttctttttttcccttgatgaaatcctgcagtccgctcccatgtaccagtacctggataggaaactgttcaaggaagcctaccagattgcttgcttgggtgtcacagacactgattggcgtgaactggccatggaagcgctagaaggtttagattttgaaacagcaaagaaggtaagcatctagccagcaggagctggagtttggtccttgtggggtcccttaagaaggcagatggggacccaggtggcacggagaggccatagactgcagcagtctctggagttaggctgacctgggcttgtatcttagccacttcctcactgtgggcctgggtaggtgacaccctttctaagattgcttctctatagacgtaggatgatgacaggccccatcctcacaaagctgtgaggatcaaatgggaggatgcctgtaaagcctgacccaggagcagcatgtcagattctggctgtcactcttattagctgttctctgtgggaagcacctgactagtagcctggcacatcacaggcactccgtaaatggcggcttttattatcggtgtagtcactggccatgatgctgcacacaatgctgcttttcttagcatctgccaactaaggtgggagagatggtcaaggtctctgattctgacagcaatgtgggcacttcccacgtaccttcatggcgggattcatggacttgattcgttgtgtcctttcctggcctagtctatgaaagctagagagatggctgaaaacatctgacccctctctgcacataaggaaaagcccaggtatgttcctgagctgtgtttccatctagaacctcagatggaggaaggaatggcttccaacctccactcccctaccccttccctctttatctccccacagtcaattaatgagctgctcattttgtccatattcccgggctgacattgaaggagtggcaaagagggacgtgatgcccgccttgggttagatcaagacttgtaggcatgaagagaggagactggaccagaccaggactaagaagcctggctgagaacgagctgtgtcacataaggggctctgggacctcaggccagccactttccttggagccccagtcctcccagttctgaaatgggggtggtgagaatgcccgctgcagtcatgaggcttaactgagatgttgtaaaggggaatttaaatcagggatggttgtgcagatgctagccattactaaacaagggaagtgatcgttgtgtaacaatgatctagattatatttttagatgtcctcagtgtaggaaagtggagatggaggaggctgtaagaattcagaggaggggccaggcgcggtggctcacgcctgtaaatcctagcactttgggaggccgaggtgtgcggatcacaaggtcaggagatcgagaccatcctggctaacacggtgaaaccccgtctctactaaaaatacaaaaaattagccgggcatggtggcaggcgcctgtagtcccagctactccggaggctgaggcaggagaatggcgtgaacctgggaggcggagcgtgcagtgagccgagatggtgccactgcactccagcctgggccatagagcaagactctgactt

SEQ ID NO: 351146 - DNA, 220 bp, Homo sapiens
ataccctctcagctttcccctcctctgctccctctgtggtaccaggggctctgggtcccctgtgtctgtggcaccactgggtaggcatagctgtcccctgcattctacccatgttgccaagatgtataggcagtctctcatcagtccatgcatctcatcctctcctgctgtgatgctgcgtgaccccccagaggctcagaccggcttgttcttctttggg

SEQ ID NO: 351147 - DNA, 3754 bp, Homo sapiens
attgcttttgctgcttttctggctttccctttcggacatgcgcgctcggagcaaggcgccctcgcactcagcttaccgcgcatgtacgttgccaggggtaacgcaggtagccaaagtggcttgtggagtggcgaccgttagtgaggcggttgctgagacagacgctgaggcgggtaggaggagcccgagccgtaagggaagccgtgatgagggccgtgttgacgtggagagataaagccgagcactgtataaatgacatcgcatttaagcctgatggaactcaactgattttggctgccggaagcagattactggcaagcgctttgcttctggatcagctgacaaaagcgttattatctggacatcaaaactggaaggcattctgaagtacacgcacaatgatgctatacaatgtgtctcctacaatcctattactcatcaactggcatcttgttcctccagtgactttgggttgtggtctcctgaacagaagtctgtctccaaacacaaatcaagcagcaagatcatctgctgcagctggacaaatgatggtcagtacctggcgctggggatgttcaatgggatcatcagcatacggaacaaaaatggcgaggagaaagtaaagatcgagcggccggggggctccctctcgccaatatggtccatctgctggaacccttcaagagaggaacgtaatgacatcctggctgtggctgactggggacagaaagtttccttctaccagctgagtggaaaacagattggaaaggatcgggcactgaactttgacccctgctgcatcagctactttactaaaggcgagtacattttgctggggggttcagacaagcaagtatctcttttcaccaaggatggagtgcggcttgggactgttggggagcagaactcctgggtgtggacgtgtcaagcgaaaccggattccaactatgtggtggtcggctgccaggacggcaccatttccttctaccagcttattttcagcacagtccatgggctttacaaggaccgctatgcctacagggatagcatgactgacgtcattgtgcagcacctgatcactgagcagaaagttcggattaaatgcaaagagcttgtcaagaagattgccatctacagaaatcgattggctatccaactgccagagaaaatcctcatctatgagttgtattcagaggacttatcagacatgcattaccgggtaaaggagaagattatcaagaagtttgagtgcaacctcctggtggtgtgtgccaatcacatcatcctgtgccaggagaaacggctgcagtgcctgtccttcagcggagtgaaggagcgggagtggcagatggagtctctcattcgttacatcaaggtgatcggtggccctcctggaagagaaggcctcttagtggggctgaagaatggacagatcctgaagatcttcgtggacaatctctttgctatcgtcctgctgaagcaggccacagctgtgcgctgcttggacatgagtgcctcccgtaagaagctggccgtggtagatgaaaatgacacttgcctggtgtatgacatcgacaccaaggagctgctttttcaggaaccaaacgccaacagtgtagcttggaacacccagtgtgaggacatgctctgcttctcgggaggaggctacctcaacatcaaagccagcaccttccctgtgcaccggcagaagctgcagggctttgtggtcggctacaatggctccaagatcttctgcctccatgtcttctccatttctgccgtggaggtgccgcagtccgctcccatgtaccagtacctggataggaaactgttcaaggaagcctaccagattgcttgcttgggtgtcacagacactgattggcgtgaactggccatggaagcgctagaaggtttagattttgaaacagcaaagaaggccttcatcagagtacaagacctccgatatttagagctcatcagcagcattgaggagaggaagaagcggggagagaccaacaatgacctgtttctggcagatgtgttttcctaccaggggaagttccatgaggccgccaaactgtacaagaggagtgggcacgagaacctcgcgcttgaaatgtacaccgacctctgcatgtttgagtatgccaaggatttccttggatctggagaccccaaagaaacaaagatgctaatcaccaaacaggctgactgggccagaaatatcaaggagcccaaagccgccgtggagatgtacatctcagcaggagagcacgtcaaggccatcgagatctgtggtgaccatggctgggttgacatgttgatcgacatcgcccgcaaactggacaaggctgagcgcgagcccctgctgctgtgcgctacctacctcaagaagctggacagccctggctatgctgctgagacctacctgaagatgggtgacctcaagtccctggtgcagctgcacgtggagacccagcgctgggatgaggcctttgctttgggtgagaagcatcctgagtttaaggatgacatctacatgccgtatgctcagtggctagcagagaacgatcgctttgaggaagcccagaaagcgttccacaaggctgggcgacagagagaagcggtccaggtgctggagcagctcacaaacaatgccgtggcggagagcaggtttaatgatgctgcctattattactggatgctgtccatgcagtgcctcgatatagctcaagatcctgcccagaaggacacaatgcttggcaagttctaccacttccagcgtttggcagagctgtaccatggttaccatgccatccatcgccacacggaagatccgttcagtgtccatcgtcctgaaactcttttcaacatctccaggttcctgctgcacagcctgcccaaggacaccccctcgggcatctctaaagtgaaaatactcttcaccttggccaagcagagcaaggccctcggtgcctacaggctggcccggcacgcctatgacaagctgcgtggcctgtacatccctgccagattccaaaagtccattgagctgggtaccctgaccatccgcgccaagcccttccacgacagtgaggagttggtgcccttgtgctaccgctgctccaccaacaacccgctgctcaacaacctgggcaacgtctgcatcaactgccgccagcccttcatcttctccgcctcttcctacgacgtgctacacctggttgagttctacctggaggaagggatcactgatgaagaagccatctccctcatcgacctggaggtgctgagacccaagcgggatgacagacagctagagattgcaaacaacagctcccagattctgcggctagtggagaccaaggactccatcggagatgaggacccgttcacagctaagctgagctttgagcaaggtggctcagagttcgtgccagtggtggtgagccggctggtgctgcgctccatgagccgccgggatgtcctcatcaagcgatggcccccacccctgaggtggcaatacttccgctcactgctgcctgacgcctccattaccatgtgcccctcctgcttccagatgttccattctgaggactatgagttgctggtgcttcagcatggctgctgcccctactgccgcaggtgcaaggatgaccctggcccatgaccagcatcctggggacggcctgcaccctctgcccgccttggggtctgctgggctgtgaaggagaataaagagttaaactgtcag

SEQ ID NO: 351148 - DNA, 3189 bp, Homo sapiens
  misc_feature (59)..(60): n is a, c, g, or t
ttcattaaacgtcttgggcaggctgtgcagacaggaacctggagatgtagaaaagagtnncaggatgtcattacgtcctccctctcgccaatatggtccatctgctggaacccttcaagagaggaacgtaatgacatcctggctgtggctgactggggacagaaagtttccttctaccagctgagtggaaaacagattggaaaggatcgggcactgaactttgacccctgctgcatcagctactttactaaaggcgagtacattttgctggggggttcagacaagcaagtatctcttttcaccaaggatggagtgcggcttgggactgttggggagcagaactcctgggtgtggacgtgtcaagcgaaaccggattccaactatgtggtggtcggctgccaggacggcaccatttccttctaccagcttattttcagcacagtccatgggctttacaaggaccgctatgcctacagggatagcatgactgacgtcattgtgcagcacctgatcactgagcagaaagttcggattaaatgcaaagagcttgtcaagaagattgccatctacagaaatcgattggctatccaactgccagagaaaatcctcatctatgagttgtattcagaggacttatcagacatgcattaccgggtaaaggagaagattatcaagaagtttgagtgcaacctcctggtggtgtgtgccaatcacatcatcctgtgccaggagaaacggctgcagtgcctgtccttcagcggagtgaaggagcgggagtggcagatggagtctctcattcgttacatcaaggtgatcggtggccctcctggaagagaaggcctcttagtggggctgaagaatggacagatcctgaagatcttcgtggacaatctctttgctatcgtcctgctgaagcaggccacagctgtgcgctgcttggacatgagtgcctcccgtaagaagctggccgtggtagatgaaaatgacacttgcctggtgtatgacatcgacaccaaggagctgctttttcaggaaccaaacgccaacagtgtagcttggaacacccagtgtgaggacatgctctgcttctcgggaggaggctacctcaacatcaaagccagcaccttccctgtgcaccggcagaagctgcagggctttgtggtcggctacaatggctccaagatcttctgcctccatgtcttctccatttctgccgtggaggtgccgcagtccgctcccatgtaccagtacctggataggaaactgttcaaggaagcctaccagattgcttgcttgggtgtcacagacactgattggcgtgaactggccatggaagcgctagaaggtttagattttgaaacagcaaagaaggccttcatcagagtacaagacctccgatatttagagctcatcagcagcattgaggagaggaagaagcggggagagaccaacaatgacctgtttctggcagatgtgttttcctaccaggggaagttccatgaggccgccaaactgtacaagaggagtgggcacgagaacctcgcgcttgaaatgtacaccgacctctgcatgtttgagtatgccaaggatttccttggatctggagaccccaaagaaacaaagatgctaatcaccaaacaggctgactgggccagaaatatcaaggagcccaaagccgccgtggagatgtacatctcagcaggagagcacgtcaaggccatcgagatctgtggtgaccatggctgggttgacatgttgatcgacatcgcccgcaaactggacaaggctgagcgcgagcccctgctgctgtgcgctacctacctcaagaagctggacagccctggctatgctgctgagacctacctgaagatgggtgacctcaagtccctggtgcagctgcacgtggagacccagcgctgggatgaggcctttgctttgggtgagaagcatcctgagtttaaggatgacatctacatgccgtatgctcagtggctagcagagaacgatcgctttgaggaagcccagaaagcgttccacaaggctgggcgacagagagaagcggtccaggtgctggagcagctcacaaacaatgccgtggcggagagcaggtttaatgatgctgcctattattactggatgctgtccatgcagtgcctcgatatagctcaagatcctgcccagaaggacacaatgcttggcaagttctaccacttccagcgtttggcagagctgtaccatggttaccatgccatccatcgccacacggaagatccgttcagtgtccatcgtcctgaaactcttttcaacatctccaggttcctgctgcacagcctgcccaaggacaccccctcgggcatctctaaagtgaaaatactcttcaccttggccaagcagagcaaggccctcggtgcctacaggctggcccggcacgcctatgacaagctgcgtggcctgtacatccctgccagattccaaaagtccattgagctgggtaccctgaccatccgcgccaagcccttccacgacagtgaggagttggtgcccttgtgctaccgctgctccaccaacaacccgctgctcaacaacctgggcaacgtctgcatcaactgccgccagcccttcatcttctccgcctcttcctacgacgtgctacacctggttgagttctacctggaggaagggatcactgatgaagaagccatctccctcatcgacctggaggtgctgagacccaagcgggatgacagacagctagagattgcaaacaacagctcccagattctgcggctagtggagaccaaggactccatcggagatgaggacccgttcacagctaagctgagctttgagcaaggtggctcagagttcgtgccagtggtggtgagccggctggtgctgcgctccatgagccgccgggatgtcctcatcaagcgatggcccccacccctgaggtggcaatacttccgctcactgctgcctgacgcctccattaccatgtgcccctcctgcttccagatgttccattctgaggactatgagttgctggtgcttcagcatggctgctgcccctactgccgcaggtgcaaggatgaccctggcccatgaccagcatcctggggacggcctgcaccctctgcccgccttggggtctgctgggctgtgaaggagaataaagagttaaactgtcag

SEQ ID NO: 351149 - DNA, 776 bp, Homo sapiens
actgcccctgcacacacacacattgctcctgcacacacacacacacacacacacacacacacacagagactgctcctgcacacacatacagagactgcccctgctgcctcttcttgcttttggtgaagctgccagtgggttgagaagcaactctgtggtcaccccacctgcctggcggcaagtcctttgcaaggcctccagccccctcagccctttctctatgccctccagacgtgctacacctggttgagttctacctggaggaagggatcactgatgaagaagccatctccctcatcgacctggaggtgctgagacccaagcgggatgacagacagctagagattgcaaacaacagctcccagattctgcggctagtggagaccaaggactccatcggagatgaggacccgttcacagctaagctgagctttgagcaaggtggctcagagttcgtgccagtggtggtgagccggctggtgctgcgctccatgagccgccgggatgtcctcatcaagcgatggcccccacccctgaggtggcaatacttccgctcactgctgcctgacgcctccattaccatgtgcccctcctgcttccagatgttccattctgaggactatgagttgctggtgcttcagcatggctgctgcccctactgccgcaggtgcaaggatgaccctggcccatgaccagcatcctggggacggcctgcaccctctgcccgccttggggtctgctgggctgtgaaggagaataaagagttaaactgtcag

SEQ ID NO: 351150 - DNA, 562 bp, Homo sapiens
cgatctagaggcatccccaggtgtcgtgcctgtgctgtactgtcctggagggacacctctagaggcctataccattcaaggacagtatgccattccacagccagatttgaccaagctgcaccagttggcaatgcaacagtctcattttcccatgacgcatggcaacaccggattcagtggcattgaatccagctctccagaggtgaaaggctattgggcaggtttggatgcatctgctcagactacttctcatgaactcaccattccaaacgatttgattggctgcataatcgggcgtcaaggcgccaaaatcaatgagatccgtcagatgtctggggcgcagatcaaaattgcgaacccagtggaaggatctactgataggcaggttaccatcactggatctgctgccagcattagcctggctcaatatctaatcaatgtcaggctttcctcggagacgggtggcatggggagcagctagaacaatgcagattcatccataatccctttctgctgttcagaaactacacagatggatcatgggtggtggtgaacgtacgac

SEQ ID NO: 351151 - DNA, 2602 bp, Homo sapiens
acatgtacccttactgttctgtggagcttattttgggagtggaagcagcagcattttcgcttaagtatgaatttttaggtgatacttgagtttctcttttccacttctgaaaggtccacattagaagtatgatcagtcagaaacaactttttataccacctcccaccagaaaagcttccctagttcttatctacacttctgttctcagcatttttctttgaaaacgctacattctttgaaatttgaaattagtcagtgacctactttggactcttgtctctttccaccctgatactggtttgtttgctgtggagatgtaagcagactttaatacatagctggaaggatttttaaaaattctgctttataaatattcaaagcttcacaagtaattgtgggataattgattttctgttagaataggaaattgacatttgattagaggaaacatttcttccttgttgggtgattgatgagtatctttttctacccgaaatcattccttcaacatctgggttgggtcagtgtgtcagatacatgaagtatgtgccctatgatttcttttctctgtcagctttttcttcaccatagcagtttttaagtagctctgtggaatggaaatatacatatttagagggtgggacataggctaaaagaaagcttgtcacaagttgacactaggtcttcctaattgtcaaccagaggcacttactgatataactgaagcagtttttgtcctgtacttactcccttttgtggtcttcccttccacccaccctttttttttgttccttttttcctctgttacagtttagaaaacgctaaaccctcctcccaggcagcctccgtcacgatccctgatcacctcagcatcaacctctctcaaccctccaccccttcttcttcttcctcctccaccaccaccccctcgctcgccacagcggggacctccgacgcaccctccagcctccccaaccctcttccgaccgccccttgtgtctccagtctgcttggcatgaaacccatccctctcctggctctaaatgttgtgtctgctgctaagggtaccggggcttcagctaccaccaccaccacctctgccgtgccatgtgtaactaacaaactgaaaggcgagaaacagagattctctccctactgattgcataccttgaggcacctcctccagtattattttgttcattttgttttcctttgttaacattggtgagaatgaaactattgtgagcttgttaccgtttcctttttactactttgggggataactgggtgggggtgggggagtggtaacccttgtttaggtttaggccatttcagctgagtgcctgtttcagggtctgacttgaattctttatctagagccacagttttctcttctttcttgtttgttacttttctttgtagctttattctgccttgcaatataacaatgtgttaggctctgtgttaatgaataaaagctgcttcgttaacttttttttttttttttaagaattatttaatggttaagctatcagcaggccttcttggccatatttgtgtttctagctgtaataaagttggcgcagtaagaaccttagtacactgtgtgctgtgaagggtaaagggttgggggcttgtgacttgtggctattcagctaggaagcctgtataactgacatgggctttttgaatcccaagtgaattttatagtcgtttgtcaatatttccacaaagagataacgagtctgtggcagtttagatcctgaaggtcctctgtaattggcaacaagcttcactagtgaggaagtttatctgacttctcagatggccttaccttgccagcagcagctaacaaggtgttcatcccaggattcctctggtgaatggttaccatgaggatctcttccaagtcatacattcaaagaacatacttctttacccagaatgaaggggaggggcaaagtgggataagtctaataaaattaggcagcttctgtctgcattcctctgaattagcattatgcctctttctgtgacattaggtatatctcagccaacccgtgacattatccacaacttgacatgatgccatccactagtcctaaaccaactctgtcaaccaagtttctttacccttttttctattcctggccgtatcctttctgctccccaccagcactatcaggagtaggaagtgacatgcttagatttggaaggaaccttaaggatcaactaatctgtaacacattgatcccctcattttacagattaaaaaatagaggccctaagataatttaaattcataggttatgagtgactagccaggactaacaacttaagctttacttttactcaatcgtactaacctccctgaaatcttgttcattttcttatactaagatgggcacaggcctctcataaaacagtagaaatgttcttagtatggtggtataaggcctctgatagccttccattcaacgagagtacacgttgccacagtgctgaaagtgtaatgctcttcccagggcattagagaactcagtgtagagatagtttccctgatgaccttttcccagcatcaccattggctgacaaaaaaaaa

SEQ ID NO: 351152 - DNA, 648 bp, Homo sapiens
atatcgaattcgcggccgcgtcgacagacgacagaggggatcaatgtcaggctttcctcggagacgggtggcatggggagcagctagaacaatgcagattcatccataatccctttctgctgttcaccaccacccatgatccatctgtgtagtttctgaacagtcagcgattccaggttttaaatagtttgtaaattttcagtttctacacactttatcatccactcgtgattttttaattaaagcgttttaattcctttctctgttcagctgttgatgctgagatccatatttagttttataagcttctccctggtttttttttttttttggttttttttttttggctcatgaatttttctgtttgtcatggaaatgtaagagtggaatattaatacatttcagtttagttctgtaatgtcaggaatttttcaaaaaaattaaaagatggactggagcaaaaaaaaaaaaacaaaacttaaaaaaaagcggcctgaataaattgccccatctgtccttaatacctgtagcaccccggattccctctctctatagctgccgcccccgcggtgaagcctccacccttcgacacaaaaaaagggggtcctttacaagtttgccgggcccctgaatccctcttttttttct

SEQ ID NO: 351153 - DNA, 797 bp, Homo sapiens
ctcatgcctgtaatcccagcacattgggaggcagaggcaggcagatcacctgaggtcaggagtttaagacctgcctgggaaacctgttgaagccccgtctctactaataatagaaaaagtagctgggagtggtggtggctgccagtaatcccagctatcaggtggaggctgaggcaagagaattgcttgagccagggaggcacaagttgcagtgaggcaagatcacatcactgtactctagcctgggtgacagagctagactctgtctcaataaataagtaaatctgagtataattcttgacccatagttactctttttacatctctttttaacatttttttttttacctttaaaacggtattacctcataataccctacacattgatagaactccagggctttaaagtaaaggccttgagttgtctcagcattaaacccttgagactactctcagatgactctttctttcctaaactggtattctgtcagcagtttgggaggagccaaagtgagctcagcaataaagaaacattgcttctgtgttacaggctttcctcggagacgggtggcatggggagcagctagaacaatgcagattcatccataatccctttctgctgttcaccaccacccatgatccatctgtgtagtttctgaacagtcagcgattccaggttttaaatagtttgtaaattttcagtttctacacactttatcatccactcgtgattttttaattaaagcgttttaattcctttctctgttcagctgtgatgctgacgactgtccggccgt

SEQ ID NO: 351154 - DNA, 961 bp, Homo sapiens
tagttgttaccccacagtgacaagatgacatcaagtcagtcccagaaatgtctacatggacacggtgtgatgaaggtggttaatgcacctcacatcggtactatgctggaaggaagttggcagtatcatcggaaagaaaggagaatcagttaagaagatgcgcgaggagagtggtgcacgtatcaacatctcagaagggaattgtcctgagagaattatcactttggctggacccactaatgccatcttcaaagcctttgctatgatcattgacaaactggaagaggacataagcagctctgttttaagtatgtgtatcctttgcttgtattttgtattaaaaaaataagaaaaagaagcctttattgttgagcatgttggcattgtcccctttatttttttctctttttgggacatatgaagcaagttattctttttctgtatctttttttcttttgtaaactttttttttgtttgtttaaaaatggctttataaaagggctttataacccaaaaaaaaaaaaaaaacaaacaagaaaaaaaaaaaaaaaaaacataaaaaaagaaacaaaaaaaggaaggggggcccaccaccaaaaatttcacccgggagggggccgacaaataaaggccgaacccagttttgttagaaaagagagggtcccccaagaagagacggcagtataaaaacaaagcaaagagcaacgacggcgcagcggatacaaaaaacgcgtgagaggagaaacagccagatggagcagcacgaagaactgatgcgagaaacaccaccaacatcgatagggggcaaaaacatggggacaacaacacctcgaacgaaatataacgagcctgaggcaacaaaaaacgatgaacagacggcatacgagtggaaacacacacgccaatacagcggcagaaagaattcgtccacgagtcactacacaaaatcttcaggcagtgt

SEQ ID NO: 351155 - DNA, 310 bp, Homo sapiens
  misc_feature (275)..(275): n is a, c, g, or t
cgtccttcatcatacctaccaaggagaatcagttaagaagatgcgcgaggagagtggtgcacgtatcaacatctcagaagggaattgtcctgagagaattatcactttggctggacccactaatgccatcttcaaagcctttgctatgatcattgacaaactggaagaggacataagcagctctatgaccaatagcacagctgccagtagacccccggtcaccctgaggctggtggtccctgctagtcagtgtggctctctcattggaaaggggnatgacacgggatcctctagatacccaagcaacacc

SEQ ID NO: 351156 - DNA, 627 bp, Homo sapiens
  misc_feature (434)..(434): n is a, c, g, or t
tgtggaatggcaatgtccttgaatggtataggcctctagaggtggtctctccaggtcaggtttgaggcacattcacggggtggtgtgtggaaagctcgtactgtcgctgcctgtgctgttcctgtcctgaccacctgcgaagattaccgaagttcttgactgtaaaatcccggcccaagccgtccagctctccggtcatctttgcaggtggtcaggcctataccattcaaggacagtatgccattccacagccagatttgaccaagctgcaccagttggcaatgcaacagtctcattttcccatgacgcatggcaacaccggattcagtggcattgaatccagctctccagaggtgaaaggctattgggcaggtttggatgcatctgctcagactacttctcatgaactcaccattccaaacgatttgattggntgcataatcgccggttcacgagacccttccttgtactatccctatgaggtataattataacaagctccatctgcctacgacaaacagaccttaaatcgctccattgcatactcttcaatcagccacatagccctggtagtaacatccgttcttatcacatattatcgccaggtcacgagatgggtcccacgag

SEQ ID NO: 351157 - DNA, 1408 bp, Homo sapiens
attcggcacaggcctcgcgtatatttcccctcagtcgcctcgcgcctgcagtttttggctttcacccccaaccagtgaccaaagacttgaccactcaaagtccagctccccagaacactgctcgacatggacaccggtgtgattgaaggtggattaaatgtcactctcaccatccggctacttatgcatggaaaggaagttggcagtatcatcggaaagaaaggagaatcagttaagaagatgcgcgaggagagtggtgcacgtatcaacatctcagaagggaattgtcctgagagaattatcactttggctggacccactaatgccatcttcaaagcctttgctatgatcattgacaaactggaagaggacataagcagctctatgaccaatagcacagctgccagtagacccccggtcaccctgaggctggtggtccctgctagtcagtgtggctctctcattggaaaaggtggatgcaagatcaaggaaatacgagagagtacaggggctcaggtccaggtggcaggggatatgctacccaactcaactgagcgggccatcactattgctggcattccacaatccatcattgagtgtgtcaaacagatctgcgtggtcatgttggagtcccagtcccccccgaagggcgtgaccatcccgtaccggcccaagccgtccagctctccggtcatctttgcaggtggtcaggacaggtacagcacaggcagcgacagtgcgagctttccccacaccaccccgtccatgtgcctcaaccctgacctggagggaccacctctagaggcctataccattcaaggacagtatgccattccacagccagatttgaccaagctgcaccagttggcaatgcaacagtctcattttcccatgacgcatggcaacaccggattcagtggcattgaatccagctctccagaggtgaaaggctattgggcaggtttggatgcatctgctcagactacttctcatgaactcaccattccaaacgatttgattggctgcataatcgggcgtcaaggcgccaaaatcaatgagatccgtcagatgtctggggcgcagatcaaaattgcgaacccagtggaaggatctactgataggcaggttaccatcactggatctgctgccagcattagcctggctcaatatctaatcaatgtcaggctttcctcggagacgggtggcatggggagcagctagaacaatgcagattcatccataatccctttctgctgttcaccaccacccatgatccatctgtgtagtttctgaacagtcagcgattccaggttttaaatagtttgtaaattttcagtttctacacactttatcatccactcgtgattttttaattaaagcgttttaattcctttctctgttcagctgt

SEQ ID NO: 351158 - DNA, 2046 bp, Homo sapiens
attcggcacaggcctcgcgtatatttcccctcagtcgcctcgcgcctgcagtttttggctttcacccccaaccagtgaccaaagacttgaccactcaaagtccagctccccagaacactgctcgacatggacaccggtgtgattgaaggtggattaaatgtcactctcaccatccggctacttatgcatggaaaggaagttggcagtatcatcggaaagaaaggagaatcagttaagaagatgcgcgaggagagtggtgcacgtatcaacatctcagaagggaattgtcctgagagaattatcactttggctggacccactaatgccatcttcaaagcctttgctatgatcattgacaaactggaagaggacataagcagctctatgaccaatagcacagctgccagtagacccccggtcaccctgaggctggtggtccctgctagtcagtgtggctctctcattggaaaaggtggatgcaagatcaaggaaatacgagagagtacaggggctcaggtccaggtggcaggggatatgctacccaactcaactgagcgggccatcactattgctggcattccacaatccatcattgagtgtgtcaaacagatctgcgtggtcatgttggagtcccagtcccccccgaagggcgtgaccatcccgtaccggcccaagccgtccagctctccggtcatctttgcaggtggtcaggacaggtacagcacaggcagcgacagtgcgagctttccccacaccaccccgtccatgtgcctcaaccctgacctggagggaccacctctagaggcctataccattcaaggacagtatgccattccacagccagatttgaccaagctgcaccagttggcaatgcaacagtctcattttcccatgacgcatggcaacaccggattcagtggcattgaatccagctctccagaggtgaaaggctattgggcaggtttggatgcatctgctcagactacttctcatgaactcaccattccaaacgatttgattggctgcataatcgggcgtcaaggcgccaaaatcaatgagatccgtcagatgtctggggcgcagatcaaaattgcgaacccagtggaaggatctactgataggcaggttaccatcactggatctgctgccagcattagcctggctcaatatctaatcaatgtcaggctttcctcggagacgggtggcatggggagcagctagaacaatgcagattcatccataatccctttctgctgttcaccaccacccatgatccatctgtgtagtttctgaacagtcagcgattccaggttttaaatagtttgtaaattttcagtttctacacactttatcatccactcgtgattttttaattaaagcgttttaattcctttctctgttcagctgttgatgctgagatccatatttagttttataagcttctccctggtttttttttttttttggttttttttttttggctcatgaatttttctgtttgtcatggaaatgtaagagtggaatattaatacatttcagtttagttctgtaatgtcaggaatttttcaaaaaaattaaaagatggactggagctttttctttgtgaatagaaactggatgccacagtgattcatgtgggttttattcctcttgtcttgctgttatttttgtaccttttatccctcaaaggacccttcttgggttttgaatggaagcctttattccggttaagatgttttcttctattttaccacttccatctttttttgtggccctcgatcctatttttccctgactccatgcttggttggcccttataaaacttgtgcccaaaagattgaggattagactttccgaggacttacctgtcctaggggagtaggcaagcacttccactagggagggggtgggggaaaggaatgacacatgacatacatggcatacacattaagcagttgatcatatgtctgactgggttccagtttcttgggaatgttggtccccttgttcaggcttgcatattttaaactaaaaatttcagtctat

SEQ ID NO: 351159 - DNA, 1667 bp, Homo sapiens
attcggcacaggcctcgcgtatatttcccctcagtcgcctcgcgcctgcagtttttggctttcacccccaaccagtgaccaaagacttgaccactcaaagtccagctccccagaacactgctcgacatggacaccggtgtgattgaaggtggattaaatgtcactctcaccatccggctacttatgcatggaaaggaagttggcagtatcatcggaaagaaaggagaatcagttaagaagatgcgcgaggagagtggtgcacgtatcaacatctcagaagggaattgtcctgagagaattatcactttggctggacccactaatgccatcttcaaagcctttgctatgatcattgacaaactggaagaggacataagcagctctatgaccaatagcacagctgccagtagacccccggtcaccctgaggctggtggtccctgctagtcagtgtggctctctcattggaaaaggtggatgcaagatcaaggaaatacgagagagtacaggggctcaggtccaggtggcaggggatatgctacccaactcaactgagcgggccatcactattgctggcattccacaatccatcattgagtgtgtcaaacagatctgcgtggtcatgttggagtcccagtcccccccgaagggcgtgaccatcccgtaccggcccaagccgtccagctctccggtcatctttgcaggtggtcaggacaggtacagcacaggcagcgacagtgcgagctttccccacaccaccccgtccatgtgcctcaaccctgacctggagggaccacctctagaggcctataccattcaaggacagtatgccattccacagccagatttgaccaagctgcaccagttggcaatgcaacagtctcattttcccatgacgcatggcaacaccggattcagtggcattgaatccagctctccagaggtgaaaggctattgggcaggtttggatgcatctgctcagactacttctcatgaactcaccattccaaacgatttgattggctgcataatcgggcgtcaaggcgccaaaatcaatgagatccgtcagatgtctggggcgcagatcaaaattgcgaacccagtggaaggatctactgataggcaggttaccatcactggatctgctgccagcattagcctggctcaatatctaatcaatgtcaggctttcctcggagacgggtggcatggggagcagctagaacaatgcagattcatccataatccctttctgctgttcaccaccacccatgatccatctgtgtagtttctgaacagtcagcgattccaggttttaaatagtttgtaaattttcagtttctacacactttatcatccactcgtgattttttaattaaagcgttttaattcctttctctgttcagctgttgatgctgagatccatatttagttttataagcttctccctggtttttttttttttttggttttttttttttggctcatgaatttttctgtttgtcatggaaatgtaagagtggaatattaatacatttcagtttagttctgtaatgtcaggaatttttcaaaaaaattaaaagatggactggagctttttctttgtgaatagaaactggatgccatattggggagattccatttggggggatcatatgggggggactcc

SEQ ID NO: 351160 - DNA, 1593 bp, Homo sapiens
attcggcacaggcctcgcgtatatttcccctcagtcgcctcgcgcctgcagtttttggctttcacccccaaccagtgaccaaagacttgaccactcaaagtccagctccccagaacactgctcgacatggacaccggtgtgattgaaggtggattaaatgtcactctcaccatccggctacttatgcatggaaaggaagttggcagtatcatcggaaagaaaggagaatcagttaagaagatgcgcgaggagagtggtgcacgtatcaacatctcagaagggaattgtcctgagagaattatcactttggctggacccactaatgccatcttcaaagcctttgctatgatcattgacaaactggaagaggacataagcagctctatgaccaatagcacagctgccagtagacccccggtcaccctgaggctggtggtccctgctagtcagtgtggctctctcattggaaaaggtggatgcaagatcaaggaaatacgagagagtacaggggctcaggtccaggtggcaggggatatgctacccaactcaactgagcgggccatcactattgctggcattccacaatccatcattgagtgtgtcaaacagatctgcgtggtcatgttggagtcccagtcccccccgaagggcgtgaccatcccgtaccggcccaagccgtccagctctccggtcatctttgcaggtggtcaggacaggtacagcacaggcagcgacagtgcgagctttccccacaccaccccgtccatgtgcctcaaccctgacctggagggaccacctctagaggcctataccattcaaggacagtatgccattccacagccagatttgaccaagctgcaccagttggcaatgcaacagtctcattttcccatgacgcatggcaacaccggattcagtggcattgaatccagctctccagaggtgaaaggctattgggcaggtttggatgcatctgctcagactacttctcatgaactcaccattccaaacgatttgattggctgcataatcgggcgtcaaggcgccaaaatcaatgagatccgtcagatgtctggggcgcagatcaaaattgcgaacccagtggaaggatctactgataggcaggttaccatcactggatctgctgccagcattagcctggctcaatatctaatcaatgtcaggctttcctcggagacgggtggcatggggagcagctagaacaatgcagattcatccataatccctttctgctgttcaccaccacccatgatccatctgtgtagtttctgaacagtcagcgattccaggttttaaatagtttgtaaattttcagtttctacacactttatcatccactcgtgattttttaattaaagcgttttaattcctttctctgttcagctgttgatgctgagatccatatttagttttataagcttctccctggtttttttttttttttggttttttttttttggctcatgaatttttctgtttgtcatggaaatgtaagagtggaatattaatacatttcagtttagttctgtaatgtcaggaatttttcaaaaaaattaaaagatggactggagc

SEQ ID NO: 351161 - DNA, 1646 bp, Homo sapiens
attcggcacaggcctcgcgtatatttcccctcagtcgcctcgcgcctgcagtttttggctttcacccccaaccagtgaccaaagacttgaccactcaaagtccagctccccagaacactgctcgacatggacaccggtgtgattgaaggtggattaaatgtcactctcaccatccggctacttatgcatggaaaggaagttggcagtatcatcggaaagaaaggagaatcagttaagaagatgcgcgaggagagtggtgcacgtatcaacatctcagaagggaattgtcctgagagaattatcactttggctggacccactaatgccatcttcaaagcctttgctatgatcattgacaaactggaagaggacataagcagctctatgaccaatagcacagctgccagtagacccccggtcaccctgaggctggtggtccctgctagtcagtgtggctctctcattggaaaaggtggatgcaagatcaaggaaatacgagagagtacaggggctcaggtccaggtggcaggggatatgctacccaactcaactgagcgggccatcactattgctggcattccacaatccatcattgagtgtgtcaaacagatctgcgtggtcatgttggagtcccagtcccccccgaagggcgtgaccatcccgtaccggcccaagccgtccagctctccggtcatctttgcaggtggtcaggacaggtacagcacaggcagcgacagtgcgagctttccccacaccaccccgtccatgtgcctcaaccctgacctggagggaccacctctagaggcctataccattcaaggacagtatgccattccacagccagatttgaccaagctgcaccagttggcaatgcaacagtctcattttcccatgacgcatggcaacaccggattcagtggcattgaatccagctctccagaggtgaaaggctattgggcaggtttggatgcatctgctcagactacttctcatgaactcaccattccaaacgatttgattggctgcataatcgggcgtcaaggcgccaaaatcaatgagatccgtcagatgtctggggcgcagatcaaaattgcgaacccagtggaaggatctactgataggcaggttaccatcactggatctgctgccagcattagcctggctcaatatctaatcaatgtcaggctttcctcggagacgggtggcatggggagcagctagaacaatgcagattcatccataatccctttctgctgttcaccaccacccatgatccatctgtgtagtttctgaacagtcagcgattccaggttttaaatagtttgtaaattttcagtttctacacactttatcatccactcgtgattttttaattaaagcgttttaattcctttctctgttcagctgttgatgctgagatccatatttagttttataagcttctccctggtttttttttttttttggttttttttttttggctcatgaatttttctgtttgtcatggaaatgtaagagtggaatattaatacatttcagtttagttctgtaatgtcaggaatttttcaaaaaaattaaaagatggactggagctttttctttgtgaatagaaactggatgccatttgggggtgggatcctctagaa

SEQ ID NO: 351162 - DNA, 1653 bp, Homo sapiens
  misc_feature (1621)..(1622): n is a, c, g, or t
  misc_feature (1626)..(1626): n is a, c, g, or t
attcggcacaggcctcgcgtatatttcccctcagtcgcctcgcgcctgcagtttttggctttcacccccaaccagtgaccaaagacttgaccactcaaagtccagctccccagaacactgctcgacatggacaccggtgtgattgaaggtggattaaatgtcactctcaccatccggctacttatgcatggaaaggaagttggcagtatcatcggaaagaaaggagaatcagttaagaagatgcgcgaggagagtggtgcacgtatcaacatctcagaagggaattgtcctgagagaattatcactttggctggacccactaatgccatcttcaaagcctttgctatgatcattgacaaactggaagaggacataagcagctctatgaccaatagcacagctgccagtagacccccggtcaccctgaggctggtggtccctgctagtcagtgtggctctctcattggaaaaggtggatgcaagatcaaggaaatacgagagagtacaggggctcaggtccaggtggcaggggatatgctacccaactcaactgagcgggccatcactattgctggcattccacaatccatcattgagtgtgtcaaacagatctgcgtggtcatgttggagtcccagtcccccccgaagggcgtgaccatcccgtaccggcccaagccgtccagctctccggtcatctttgcaggtggtcaggacaggtacagcacaggcagcgacagtgcgagctttccccacaccaccccgtccatgtgcctcaaccctgacctggagggaccacctctagaggcctataccattcaaggacagtatgccattccacagccagatttgaccaagctgcaccagttggcaatgcaacagtctcattttcccatgacgcatggcaacaccggattcagtggcattgaatccagctctccagaggtgaaaggctattgggcaggtttggatgcatctgctcagactacttctcatgaactcaccattccaaacgatttgattggctgcataatcgggcgtcaaggcgccaaaatcaatgagatccgtcagatgtctggggcgcagatcaaaattgcgaacccagtggaaggatctactgataggcaggttaccatcactggatctgctgccagcattagcctggctcaatatctaatcaatgtcaggctttcctcggagacgggtggcatggggagcagctagaacaatgcagattcatccataatccctttctgctgttcaccaccacccatgatccatctgtgtagtttctgaacagtcagcgattccaggttttaaatagtttgtaaattttcagtttctacacactttatcatccactcgtgattttttaattaaagcgttttaattcctttctctgttcagctgttgatgctgagatccatatttagttttataagcttctccctggtttttttttttttgggtgtttttttttggggcccaggaaatttccgggttggccagggaattgtaagaggggaattttaatcctttcacagttaagtccgtgtaagtgtcgggaatttttccaaaaaatttaaaaggagggagcggggagctttccttgggggaatagaanngtgnttgccgcagctgtaaaaaaaaacacag

SEQ ID NO: 351163 - DNA, 1636 bp, Homo sapiens
attcggcacaggcctcgcgtatatttcccctcagtcgcctcgcgcctgcagtttttggctttcacccccaaccagtgaccaaagacttgaccactcaaagtccagctccccagaacactgctcgacatggacaccggtgtgattgaaggtggattaaatgtcactctcaccatccggctacttatgcatggaaaggaagttggcagtatcatcggaaagaaaggagaatcagttaagaagatgcgcgaggagagtggtgcacgtatcaacatctcagaagggaattgtcctgagagaattatcactttggctggacccactaatgccatcttcaaagcctttgctatgatcattgacaaactggaagaggacataagcagctctatgaccaatagcacagctgccagtagacccccggtcaccctgaggctggtggtccctgctagtcagtgtggctctctcattggaaaaggtggatgcaagatcaaggaaatacgagagagtacaggggctcaggtccaggtggcaggggatatgctacccaactcaactgagcgggccatcactattgctggcattccacaatccatcattgagtgtgtcaaacagatctgcgtggtcatgttggagtcccagtcccccccgaagggcgtgaccatcccgtaccggcccaagccgtccagctctccggtcatctttgcaggtggtcaggacaggtacagcacaggcagcgacagtgcgagctttccccacaccaccccgtccatgtgcctcaaccctgacctggagggaccacctctagaggcctataccattcaaggacagtatgccattccacagccagatttgaccaagctgcaccagttggcaatgcaacagtctcattttcccatgacgcatggcaacaccggattcagtggcattgaatccagctctccagaggtgaaaggctattgggcaggtttggatgcatctgctcagactacttctcatgaactcaccattccaaacgatttgattggctgcataatcgggcgtcaaggcgccaaaatcaatgagatccgtcagatgtctggggcgcagatcaaaattgcgaacccagtggaaggatctactgataggcaggttaccatcactggatctgctgccagcattagcctggctcaatatctaatcaatgtcaggctttcctcggagacgggtggcatggggagcagctagaacaatgcagattcatccataatccctttctgctgttcaccaccacccatgatccatctgtgtagtttctgaacagtcagcgattccaggttttaaatagtttgtaaattttcagtttctacacactttatcatccactcgtgattttttaattaaagcgttttaattcctttctctgttcagctgttgatgctgagatccatatttagttttataagcttctccctggttttttttttttttggggttttttttttgtgggcctcatggaattttcctggttggctcagtggaaattgttaagaagtgtggaattttaatcactttccagttaagtccgtgtaagtgctcgggaattttctcaaaaaatttaaaagaagtggccgtggaccttttcctgtgggtgaattagaac

SEQ ID NO: 351164 - DNA, 1875 bp, Homo sapiens
attcggcacaggcctcgcgtatatttcccctcagtcgcctcgcgcctgcagtttttggctttcacccccaaccagtgaccaaagacttgaccactcaaagtccagctccccagaacactgctcgacatggacaccggtgtgattgaaggtggattaaatgtcactctcaccatccggctacttatgcatggaaaggaagttggcagtatcatcggaaagaaaggagaatcagttaagaagatgcgcgaggagagtggtgcacgtatcaacatctcagaagggaattgtcctgagagaattatcactttggctggacccactaatgccatcttcaaagcctttgctatgatcattgacaaactggaagaggacataagcagctctatgaccaatagcacagctgccagtagacccccggtcaccctgaggctggtggtccctgctagtcagtgtggctctctcattggaaaaggtggatgcaagatcaaggaaatacgagagagtacaggggctcaggtccaggtggcaggggatatgctacccaactcaactgagcgggccatcactattgctggcattccacaatccatcattgagtgtgtcaaacagatctgcgtggtcatgttggagtcccagtcccccccgaagggcgtgaccatcccgtaccggcccaagccgtccagctctccggtcatctttgcaggtggtcaggacaggtacagcacaggcagcgacagtgcgagctttccccacaccaccccgtccatgtgcctcaaccctgacctggagggaccacctctagaggcctataccattcaaggacagtatgccattccacagccagatttgaccaagctgcaccagttggcaatgcaacagtctcattttcccatgacgcatggcaacaccggattcagtggcattgaatccagctctccagaggtgaaaggctattgggcaggtttggatgcatctgctcagactacttctcatgaactcaccattccaaacgatttgattggctgcataatcgggcgtcaaggcgccaaaatcaatgagatccgtcagatgtctggggcgcagatcaaaattgcgaacccagtggaaggatctactgataggcaggttaccatcactggatctgctgccagcattagcctggctcaatatctaatcaatgtcaggctttcctcggagacgggtggcatggggagcagctagaacaatgcagattcatccataatccctttctgctgttcaccaccacccatgatccatctgtgtagtttctgaacagtcagcgattccaggttttaaatagtttgtaaattttcagtttctacacactttatcatccactcgtgattttttaattaaagcgttttaattcctttctctgttcagctgttgatgctgagatccatatttagttttataagcttctccctggtttttttttttttggggtttttggggcccagaaatttccggtgggccgggcaattgtcggggggcatttaaactttccgtatccggaaggtcagggattttttccaaaaaatttacacagtgtacgggactttctttgggaattgcgcacaacagagtagcacagagaacaaaaaaattgtttgggggccgcgcagcccagagaaggttttaaacacgtctggttggggcccgggccccaagagggtatggacagtgcacaagggtcacagagagaccggcgagacagtggtgggtcccccaaaaaaacgcggggacgagggttgaacaccaggcggttgggctacgggctaacaggccggcatctcccccgccgcgcggaagaaggcaaaccatacacggacaagccataacatagacaacaca

SEQ ID NO: 351165 - DNA, 1522 bp, Homo sapiens
  misc_feature (1485)..(1485): n is a, c, g, or t
attcggcacaggcctcgcgtatatttcccctcagtcgcctcgcgcctgcagtttttggctttcacccccaaccagtgaccaaagacttgaccactcaaagtccagctccccagaacactgctcgacatggacaccggtgtgattgaaggtggattaaatgtcactctcaccatccggctacttatgcatggaaaggaagttggcagtatcatcggaaagaaaggagaatcagttaagaagatgcgcgaggagagtggtgcacgtatcaacatctcagaagggaattgtcctgagagaattatcactttggctggacccactaatgccatcttcaaagcctttgctatgatcattgacaaactggaagaggacataagcagctctatgaccaatagcacagctgccagtagacccccggtcaccctgaggctggtggtccctgctagtcagtgtggctctctcattggaaaaggtggatgcaagatcaaggaaatacgagagagtacaggggctcaggtccaggtggcaggggatatgctacccaactcaactgagcgggccatcactattgctggcattccacaatccatcattgagtgtgtcaaacagatctgcgtggtcatgttggagtcccagtcccccccgaagggcgtgaccatcccgtaccggcccaagccgtccagctctccggtcatctttgcaggtggtcaggacaggtacagcacaggcagcgacagtgcgagctttccccacaccaccccgtccatgtgcctcaaccctgacctggagggaccacctctagaggcctataccattcaaggacagtatgccattccacagccagatttgaccaagctgcaccagttggcaatgcaacagtctcattttcccatgacgcatggcaacaccggattcagtggcattgaatccagctctccagaggtgaaaggctattgggcaggtttggatgcatctgctcagactacttctcatgaactcaccattccaaacgatttgattggctgcataatcgggcgtcaaggcgccaaaatcaatgagatccgtcagatgtctggggcgcagatcaaaattgcgaacccagtggaaggatctactgataggcaggttaccatcactggatctgctgccagcattagcctggctcaatatctaatcaatgtcaggctttcctcggagacgggtggcatggggagcagctagaacaatgcagattcatccataatccctttctgctgttcaccaccacccatgatccatctgtgtagtttctgaacagtcagcgattccaggttttaaatagtttgtaaattttcagtttctacacactttatcatccactcgtgattttttaattaaagcgttttaattcctttctctgttcagctgttgatgctgagatccatatttagttttataagcttctccctggttttttttttttttttttttttttttttttttttnttttttttttttttttttttttttttttttttttttt

SEQ ID NO: 351166 - DNA, 2149 bp, Homo sapiens
attcggcacaggcctcgcgtatatttcccctcagtcgcctcgcgcctgcagtttttggctttcacccccaaccagtgaccaaagacttgaccactcaaagtccagctccccagaacactgctcgacatggacaccggtgtgattgaaggtggattaaatgtcactctcaccatccggctacttatgcatggaaaggaagttggcagtatcatcggaaagaaaggagaatcagttaagaagatgcgcgaggagagtggtgcacgtatcaacatctcagaagggaattgtcctgagagaattatcactttggctggacccactaatgccatcttcaaagcctttgctatgatcattgacaaactggaagaggacataagcagctctatgaccaatagcacagctgccagtagacccccggtcaccctgaggctggtggtccctgctagtcagtgtggctctctcattggaaaaggtggatgcaagatcaaggaaatacgagagagtacaggggctcaggtccaggtggcaggggatatgctacccaactcaactgagcgggccatcactattgctggcattccacaatccatcattgagtgtgtcaaacagatctgcgtggtcatgttggagtcccagtcccccccgaagggcgtgaccatcccgtaccggcccaagccgtccagctctccggtcatctttgcaggtggtcaggacaggtacagcacaggcagcgacagtgcgagctttccccacaccaccccgtccatgtgcctcaaccctgacctggagggaccacctctagaggcctataccattcaaggacagtatgccattccacagccagatttgaccaagctgcaccagttggcaatgcaacagtctcattttcccatgacgcatggcaacaccggattcagtggcattgaatccagctctccagaggtgaaaggctattgggcaggtttggatgcatctgctcagactacttctcatgaactcaccattccaaacgatttgattggctgcataatcgggcgtcaaggcgccaaaatcaatgagatccgtcagatgtctggggcgcagatcaaaattgcgaacccagtggaaggatctactgataggcaggttaccatcactggatctgctgccagcattagcctggctcaatatctaatcaatgtcaggctttcctcggagacgggtggcatggggagcagctagaacaatgcagattcatccataatccctttctgctgttcaccaccacccatgatccatctgtgtagtttctgaacagtcagcgattccaggttttaaatagtttgtaaattttcagtttctacacactttatcatccactcgtgattttttaattaaagcgttttaattcctttctctgttcagctgttgatgctgagatccatatttagttttataagcttctccctggttttttttttttttggggttttttttttgtgggcctcatggaattttcctggttggctcagtggaaattgttaagaagtgtggaattttaatcactttccagttaagtccgtgtaagtgctcgggaattttctcaaaaaatttaaaagaagtggcacgggagcttttccttggtgaattagaaacgggattcgccacaggttgaaaaaacaaacaacaaaaaaaaaaaaaaaaaaaaaaaaaaaaaaaggggggcgcgcccctcttagatgaaattctcccccccagagggcccccacattaacgggtcaccccagttttttttgcaacagagggggccccaatagggcggcacgtaataataaaacaacaagagcagcacggggcccgcgattaaaaaaccaaggcgcgcggggcggggaacaacacccgggctgccgtgagcactcttggagaagaagagccccacaacttcgggggggggcaccaactattgcgggccgacacccccccagagagagtataaaagcgcccagggagaaatacaacatcaaccgggtgtaacgggggacaccacaccgatattttcctgcggcggagaaatctgtgtcagagactaaatatagaaatagtaggagaaataacaatagtaaacccccccgcacacgcacgagcaagacatagcacatcacactcacgt

SEQ ID NO: 351167 - DNA, 1721 bp, Homo sapiens
attcggcacaggcctcgcgtatatttcccctcagtcgcctcgcgcctgcagtttttggctttcacccccaaccagtgaccaaagacttgaccactcaaagtccagctccccagaacactgctcgacatggacaccggtgtgattgaaggtggattaaatgtcactctcaccatccggctacttatgcatggaaaggaagttggcagtatcatcggaaagaaaggagaatcagttaagaagatgcgcgaggagagtggtgcacgtatcaacatctcagaagggaattgtcctgagagaattatcactttggctggacccactaatgccatcttcaaagcctttgctatgatcattgacaaactggaagaggacataagcagctctatgaccaatagcacagctgccagtagacccccggtcaccctgaggctggtggtccctgctagtcagtgtggctctctcattggaaaaggtggatgcaagatcaaggaaatacgagagagtacaggggctcaggtccaggtggcaggggatatgctacccaactcaactgagcgggccatcactattgctggcattccacaatccatcattgagtgtgtcaaacagatctgcgtggtcatgttggagtcccagtcccccccgaagggcgtgaccatcccgtaccggcccaagccgtccagctctccggtcatctttgcaggtggtcaggacaggtacagcacaggcagcgacagtgcgagctttccccacaccaccccgtccatgtgcctcaaccctgacctggagggaccacctctagaggcctataccattcaaggacagtatgccattccacagccagatttgaccaagctgcaccagttggcaatgcaacagtctcattttcccatgacgcatggcaacaccggattcagtggcattgaatccagctctccagaggtgaaaggctattgggcaggtttggatgcatctgctcagactacttctcatgaactcaccattccaaacgatttgattggctgcataatcgggcgtcaaggcgccaaaatcaatgagatccgtcagatgtctggggcgcagatcaaaattgcgaacccagtggaaggatctactgataggcaggttaccatcactggatctgctgccagcattagcctggctcaatatctaatcaatgtcaggctttcctcggagacgggtggcatggggagcagctagaacaatgcagattcatccataatccctttctgctgttcaccaccacccatgatccatctgtgtagtttctgaacagtcagcgattccaggttttaaatagtttgtaaattttcagtttctacacactttatcatccactcgtgattttttaattaaagcgttttaattcctttctctgttcagctgtgcaaaaaaaaaaaaaaaaaaaaacaaagaaatcttggcgcggcggctcgggcgcccagagaaaaaaagcgtttaaaaagacccactcccgtggggggggccgcggccccacatgagggtacagttgagccactgtggccacacagcgtggggaccaaaaggagaacaccggcgcctcagcacaaagcgccgggtttttcccaccaataaaaaaacgcgcgggggaaccggggcgtctggaccaccccaaagggcgtccgggcgcacacgggtccaacacaagggccagaggcgataccgccgggggggggggc

SEQ ID NO: 351168 - DNA, 1698 bp, Homo sapiens
attcggcacaggcctcgcgtatatttcccctcagtcgcctcgcgcctgcagtttttggctttcacccccaaccagtgaccaaagacttgaccactcaaagtccagctccccagaacactgctcgacatggacaccggtgtgattgaaggtggattaaatgtcactctcaccatccggctacttatgcatggaaaggaagttggcagtatcatcggaaagaaaggagaatcagttaagaagatgcgcgaggagagtggtgcacgtatcaacatctcagaagggaattgtcctgagagaattatcactttggctggacccactaatgccatcttcaaagcctttgctatgatcattgacaaactggaagaggacataagcagctctatgaccaatagcacagctgccagtagacccccggtcaccctgaggctggtggtccctgctagtcagtgtggctctctcattggaaaaggtggatgcaagatcaaggaaatacgagagagtacaggggctcaggtccaggtggcaggggatatgctacccaactcaactgagcgggccatcactattgctggcattccacaatccatcattgagtgtgtcaaacagatctgcgtggtcatgttggagtcccagtcccccccgaagggcgtgaccatcccgtaccggcccaagccgtccagctctccggtcatctttgcaggtggtcaggacaggtacagcacaggcagcgacagtgcgagctttccccacaccaccccgtccatgtgcctcaaccctgacctggagggaccacctctagaggcctataccattcaaggacagtatgccattccacagccagatttgaccaagctgcaccagttggcaatgcaacagtctcattttcccatgacgcatggcaacaccggattcagtggcattgaatccagctctccagaggtgaaaggctattgggcaggtttggatgcatctgctcagactacttctcatgaactcaccattccaaacgatttgattggctgcataatcgggcgtcaaggcgccaaaatcaatgagatccgtcagatgtctggggcgcagatcaaaattgcgaacccagtggaaggatctactgataggcaggttaccatcactggatctgctgccagcattagcctggctcaatatctaatcaatgtcaggctttcctcggagacgggtggcatggggagcagctagaacaatgcagattcatccataatccctttctgctgttcaccaccacccatgatccatctgtgtagtttctgaacagtcagcgattccaggttttaaatagtttgtaaattttcagtttctacacactttatcatccactcgtgattttttaattaaagcgttttaattcctttctctgttcagctgtcaaaaaaaaaaaaaaaaaaaaaaaaaaaaatattgtggggccggccatcgggccaggagaaaaggtttcaaaaaccattcggcgggggccgccgggcccagatatggttacggacaccctgccccaaagggggtcgaaagaaagaccggggcaagacaggcgcgggtttcccacaaaaaaaaaaaccgcggcggagaccgcgggtctgaaccaaaccccgagggggtcggccgccaacggggctctacacagcggggccacgagacgattaatcccacccgcggggaggt

SEQ ID NO: 351169 - DNA, 3912 bp, Homo sapiens
attcggcacaggcctcgcgtatatttcccctcagtcgcctcgcgcctgcagtttttggctttcacccccaaccagtgaccaaagacttgaccactcaaagtccagctccccagaacactgctcgacatggacaccggtgtgattgaaggtggattaaatgtcactctcaccatccggctacttatgcatggaaaggaagttggcagtatcatcggaaagaaaggagaatcagttaagaagatgcgcgaggagagtggtgcacgtatcaacatctcagaagggaattgtcctgagagaattatcactttggctggacccactaatgccatcttcaaagcctttgctatgatcattgacaaactggaagaggacataagcagctctatgaccaatagcacagctgccagtagacccccggtcaccctgaggctggtggtccctgctagtcagtgtggctctctcattggaaaaggtggatgcaagatcaaggaaatacgagagagtacaggggctcaggtccaggtggcaggggatatgctacccaactcaactgagcgggccatcactattgctggcattccacaatccatcattgagtgtgtcaaacagatctgcgtggtcatgttggagtcccagtcccccccgaagggcgtgaccatcccgtaccggcccaagccgtccagctctccggtcatctttgcaggtggtcaggacaggtacagcacaggcagcgacagtgcgagctttccccacaccaccccgtccatgtgcctcaaccctgacctggagggaccacctctagaggcctataccattcaaggacagtatgccattccacagccagatttgaccaagctgcaccagttggcaatgcaacagtctcattttcccatgacgcatggcaacaccggattcagtggtatggatacctcagtgtttatttctgtaaggtgtagtgcaagagagaggccagtcccaaggtctcagcttgacatctgtttaaaacaaacttcgttatccagcatcctgctggtttaaacttgcctgtctactatggctaagcccaaggaggtaatgtgtttgttaacgtggttttcatttggggtcagttattctaaaagaaaaaaaaagccctggaaggtttgggggtgaggtttggggatgcttgtcaggcaaagggtaggctgatatttctttgagcccatcctgactgctgcccccttgatctgatcagcaccccctttctctccaccagcaattcacaggcttgggtagagaccatccatttgtgccaaattgtgtagtgttttttttgtttttgtttttgtttttattttgtttcgtttttggggcttttctgtataaggaataacttgtccgatagggttaggatgagaccaccaaactcattttcacttgtatcttaacaggcattgaatccagctctccagaggtgaaaggctattggggtaatgattaaaaaaaaaaaaatctgtagtattctactgttatattaataaactggtgggagtcttgtttcactgcccatgaaccataccagcaacatgcacatggcagagaggagctgagagagcaaaggggtgggcctggagcccccgagggtcccttgatggatctggccaacccccttctaaaaatgatgagacagcagccatagctgagatcaggactaagcttgagtgttagccagctggcctggttcagtccaggtgttgttaaagatgggtacgggtatttgctgatgggatttttttttctttctttttctttggaaaacaaaatgaaagccagaacaaaattattgaaccattctatctgaccttccagtctaggttaggagaatagggggtggaggggattaatctgatacaggtatatttaaagcaactctgcatgtgtgccagaagtccatggtacccattaacaggcataatattggcactggtgctagtgagcatcaggtgagatacaatttggaacacaacaggaaaggggtagaagtacagaaggacttgtttagacattggtcctttttgaggataccacactcccttgcccttgcttccatcccccatccctaataggctgggctttgcaggaaatggcatgaaatcagctcttctgagtgtacagaagaacctttcgagcattatttctacacccttctcccccactctttcctctttggaggcttccaagttagtgatgaatcccaacagctaatgatgctgggtttccagtttatttccttctgttagtttaatgtgcaagtcagtgaggttttgaatgctgtgcattgaatttgcttgctctcttctgtcttttagcaggtttggatgcatctgctcagactacttctcatgaactcaccattccaaacgatttgattggctgcataatcgggcgtcaaggcgccaaaatcaatgagatccgtcagatgtctggggcgcagatcaaaattgcgaacccagtggaaggatctactgataggcaggttaccatcactggatctgctgccagcattagcctggctcaatatctaatcaatgtcaggctttcctcggagacgggtggcatggggagcagctagaacaatgcagattcatccataatccctttctgctgttcaccaccacccatgatccatctgtgtagtttctgaacagtcagcgattccaggttttaaatagtttgtaaattttcagtttctacacactttatcatccactcgtgattttttaattaaagcgttttaattcctttctctgttcagctgttgatgctgagatccatatttagttttataagcttctccctggtttttttttttttttggttttttttttttggctcatgaatttttctgtttgtcatggaaatgtaagagtggaatattaatacatttcagtttagttctgtaatgtcaggaatttttcaaaaaaattaaaagatggactggagctttttctttgtgaatagaaactggatgccacagtgattcatgtgggttttattcctcttgtcttgctgttatttttgtaccttttatccctcaaaggacccttcttgggttttgaatggaagcctttattccggttaagatgttttcttctattttaccacttccatctttttttgtggccctcgatcctatttttccctgactccatgcttggttggcccttataaaacttgtgcccaaaagattgaggattagactttccgaggacttacctgtcctaggggagtaggcaagcacttccactagggagggggtgggggaaaggaatgacacatgacatacatggcatacacattaagcagttgatcatatgtctgactgggttccagtttcttgggaatgttggtccccttgttcaggcttgcatattttaaactaaaaatttcagtctattgtttttagtaacttcatttatagtcctccataacaagttagaaggatgtatctgctaccatttattcctataattttagaaagttggggcttgacattatactcatttagtgagagtagatgcaaaaaagtggaggggcaggagaacttctccagacacctcagataaagtccggagcccaaggctttatcttaaccatgtatggtaccccattcattcatcaagaaaaccctcaacagctgggcctgcatggagtgttatatttcaaggtttttcacaggggttacagtaggacagtccccaccccaatcaggcaccaggataaaagcagggacttaaacagcaccccggttcttcagcctgagccatcacatgctatcagtctcctaacctccccctgggccttaagacagggcttgggcagagaagataaatggtgggacaaaaaaatgagttacattgccacctgagaaac

SEQ ID NO: 351170 - DNA, 1433 bp, Homo sapiens
attcggcacaggcctcgcgtatatttcccctcagtcgcctcgcgcctgcagtttttggctttcacccccaaccagtgaccaaagacttgaccactcaaagtccagctccccagaacactgctcgacatggacaccggtgtgattgaaggtggattaaatgtcactctcaccatccggctacttatgcatggaaaggaagttggcagtatcatcggaaagaaaggagaatcagttaagaagatgcgcgaggagagtggtgcacgtatcaacatctcagaagggaattgtcctgagagaattatcactttggctggacccactaatgccatcttcaaagcctttgctatgatcattgacaaactggaagaggacataagcagctctatgaccaatagcacagctgccagtagacccccggtcaccctgaggctggtggtccctgctagtcagtgtggctctctcattggaaaaggtggatgcaagatcaaggaaatacgagagagtacaggggctcaggtccaggtggcaggggatatgctacccaactcaactgagcgggccatcactattgctggcattccacaatccatcattgagtgtgtcaaacagatctgcgtggtcatgttggagtcccagtcccccccgaagggcgtgaccatcccgtaccggcccaagccgtccagctctccggtcatctttgcaggtggtcaggacaggtacagcacaggcagcgacagtgcgagctttccccacaccaccccgtccatgtgcctcaaccctgacctggagggaccacctctagaggcctataccattcaaggacagtatgccattccacagccagatttgaccaagctgcaccagttggcaatgcaacagtctcattttcccatgacgcatggcaacaccggattcagtggcattgaatccagctctccagaggtgaaaggctattgggcaggtttggatgcatctgctcagactacttctcatgaactcaccattccaaacgatttgattggctgcataatcgggcgtcaaggcgccaaaatcaatgagatccgtcagatgtctggggcgcagatcaaaattgcgaacccagtggaaggatctactgataggcaggttaccatcactggatctgctgccagcattagcctggctcaatatctaatcaatgtcaggctttcctcggagacgggtggcatggggagcagctagaacaatgcagattcatccataatccctttctgctgttcaccaccacccatgatccatctgtgtagtttctgaacagtcagcgattccaggttttaaatagtttgtaaattttcagtttctacacactttatcatccactcgtgattttttaattaaagcgttttaattcctttctctgttcagctgtgggtggcagggttggggatcctcaa

SEQ ID NO: 351171 - DNA, 2852 bp, Homo sapiens
attcggcacaggcctcgcgtatatttcccctcagtcgcctcgcgcctgcagtttttggctttcacccccaaccagtgaccaaagacttgaccactcaaagtccagctccccagaacactgctcgacatggacaccggtgtgattgaaggtggattaaatgtcactctcaccatccggctacttatgcatggaaaggaagttggcagtatcatcggaaagaaaggagaatcagttaagaagatgcgcgaggagagtggtgcacgtatcaacatctcagaagggaattgtcctgagagaattatcactttggctggacccactaatgccatcttcaaagcctttgctatgatcattgacaaactggaagaggacataagcagctctatgaccaatagcacagctgccagtagacccccggtcaccctgaggctggtggtccctgctagtcagtgtggctctctcattggaaaaggtggatgcaagatcaaggaaatacgagagagtacaggggctcaggtccaggtggcaggggatatgctacccaactcaactgagcgggccatcactattgctggcattccacaatccatcattgagtgtgtcaaacagatctgcgtggtcatgttggagtcccagtcccccccgaagggcgtgaccatcccgtaccggcccaagccgtccagctctccggtcatctttgcaggtggtcaggacaggtacagcacaggcagcgacagtgcgagctttccccacaccaccccgtccatgtgcctcaaccctgacctggagggaccacctctagaggcctataccattcaaggacagtatgccattccacagccagatttgaccaagctgcaccagttggcaatgcaacagtctcattttcccatgacgcatggcaacaccggattcagtggtatggatacctcagtgtttatttctgtaaggtgtagtgcaagagagaggccagtcccaaggtctcagcttgacatctgtttaaaacaaacttcgttatccagcatcctgctggtttaaacttgcctgtctactatggctaagcccaaggaggtaatgtgtttgttaacgtggttttcatttggggtcagttattctaaaagaaaaaaaaagccctggaaggtttgggggtgaggtttggggatgcttgtcaggcaaagggtaggctgatatttctttgagcccatcctgactgctgcccccttgatctgatcagcaccccctttctctccaccagcaattcacaggcttgggtagagaccatccatttgtgccaaattgtgtagtgttttttttgtttttgtttttgtttttattttgtttcgtttttggggcttttctgtataaggaataacttgtccgatagggttaggatgagaccaccaaactcattttcacttgtatcttaacaggcattgaatccagctctccagaggtgaaaggctattggggtaatgattaaaaaaaaaaaaatctgtagtattctactgttatattaataaactggtgggagtcttgtttcactgcccatgaaccataccagcaacatgcacatggcagagaggagctgagagagcaaaggggtgggcctggagcccccgagggtcccttgatggatctggccaacccccttctaaaaatgatgagacagcagccatagctgagatcaggactaagcttgagtgttagccagctggcctggttcagtccaggtgttgttaaagatgggtacgggtatttgctgatgggatttttttttctttctttttctttggaaaacaaaatgaaagccagaacaaaattattgaacaaaagacagggactaaatctggagaaatgaagtcccctcacctgactgccatttcattctatctgaccttccagtctaggttaggagaatagggggtggaggggattaatctgatacaggtatatttaaagcaactctgcatgtgtgccagaagtccatggtacccattaacaggcataatattggcactggtgctagtgagcatcaggtgagatacaatttggaacacaacaggaaaggggtagaagtacagaaggacttgtttagacattggtcctttttgaggataccacactcccttgcccttgcttccatcccccatccctaataggctgggctttgcaggaaatggcatgaaatcagctcttctgagtgtacagaagaacctttcgagcattatttctacacccttctcccccactctttcctctttggaggcttccaagttagtgatgaatcccaacagctaatgatgctgggtttccagtttatttccttctgttagtttaatgtgcaagtcagtgaggttttgaatgctgtgcattgaatttgcttgctctcttctgtcttttagcaggtttggatgcatctgctcagactacttctcatgaactcaccattccaaacgatttgattggctgcataatcgggcgtcaaggcgccaaaatcaatgagatccgtcagatgtctggggcgcagatcaaaattgcgaacccagtggaaggatctactgataggcaggttaccatcactggatctgctgccagcattagcctggctcaatatctaatcaatgtcaggctttcctcggagacgggtggcatggggagcagctagaacaatgcagattcatccataatccctttctgctgttcaccaccacccatgatccatctgtgtagtttctgaacagtcagcgattccaggttttaaatagtttgtaaattttcagtttctacacactttatcatccactcgtgattttttaattaaagcgttttaattcctttctctgttcagctgt

SEQ ID NO: 351172 - DNA, 2968 bp, Homo sapiens
attcggcacaggcctcgcgtatatttcccctcagtcgcctcgcgcctgcagtttttggctttcacccccaaccagtgaccaaagacttgaccactcaaagtccagctccccagaacactgctcgacatggacaccggtgtgattgaaggtggattaaatgtcactctcaccatccggctacttatgcatggaaaggaagttggcagtatcatcggaaagaaaggagaatcagttaagaagatgcgcgaggagagtggtgcacgtatcaacatctcagaagggaattgtcctgagagaattatcactttggctggacccactaatgccatcttcaaagcctttgctatgatcattgacaaactggaagaggacataagcagctctatgaccaatagcacagctgccagtagacccccggtcaccctgaggctggtggtccctgctagtcagtgtggctctctcattggaaaaggtggatgcaagatcaaggaaatacgagagagtacaggggctcaggtccaggtggcaggggatatgctacccaactcaactgagcgggccatcactattgctggcattccacaatccatcattgagtgtgtcaaacagatctgcgtggtcatgttggagtcccagtcccccccgaagggcgtgaccatcccgtaccggcccaagccgtccagctctccggtcatctttgcaggtggtcaggacaggtacagcacaggcagcgacagtgcgagctttccccacaccaccccgtccatgtgcctcaaccctgacctggagggaccacctctagaggcctataccattcaaggacagtatgccattccacagccagatttgaccaagctgcaccagttggcaatgcaacagtctcattttcccatgacgcatggcaacaccggattcagtggtatggatacctcagtgtttatttctgtaaggtgtagtgcaagagagaggccagtcccaaggtctcagcttgacatctgtttaaaacaaacttcgttatccagcatcctgctggtttaaacttgcctgtctactatggctaagcccaaggaggtaatgtgtttgttaacgtggttttcatttggggtcagttattctaaaagaaaaaaaaagccctggaaggtttgggggtgaggtttggggatgcttgtcaggcaaagggtaggctgatatttctttgagcccatcctgactgctgcccccttgatctgatcagcacccccttttttttgtttttgtttttgtttttattttgtttcgtttttggggcttttctgtataaggaataacttgtccgatagggttaggatgagaccaccaaactcattttcacttgtatcttaacaggcattgaatccagctctccagaggtgaaaggctattgggcaggtttggatgcatctgctcagactacttctcatgaactcaccattccaaacgatttgattggctgcataatcgggcgtcaaggcgccaaaatcaatgagatccgtcagatgtctggggcgcagatcaaaattgcgaacccagtggaaggatctactgataggcaggttaccatcactggatctgctgccagcattagcctggctcaatatctaatcaatgtcaggctttcctcggagacgggtggcatggggagcagctagaacaatgcagattcatccataatccctttctgctgttcaccaccacccatgatccatctgtgtagtttctgaacagtcagcgattccaggttttaaatagtttgtaaattttcagtttctacacactttatcatccactcgtgattttttaattaaagcgttttaattcctttctctgttcagctgttgatgctgagatccatatttagttttataagcttctccctggtttttttttttttttggttttttttttttggctcatgaatttttctgtttgtcatggaaatgtaagagtggaatattaatacatttcagtttagttctgtaatgtcaggaatttttcaaaaaaattaaaagatggactggagctttttctttgtgaatagaaactggatgccacagtgattcatgtgggttttattcctcttgtcttgctgttatttttgtaccttttatccctcaaaggacccttcttgggttttgaatggaagcctttattccggttaagatgttttcttctattttaccacttccatctttttttgtggccctcgatcctatttttccctgactccatgcttggttggcccttataaaacttgtgcccaaaagattgaggattagactttccgaggacttacctgtcctaggggagtaggcaagcacttccactagggagggggtgggggaaaggaatgacacatgacatacatggcatacacattaagcagttgatcatatgtctgactgggttccagtttcttgggaatgttggtccccttgttcaggcttgcatattttaaactaaaaatttcagtctattgtttttagtaacttcatttatagtcctccataacaagttagaaggatgtatctgctaccatttattcctataattttagaaagttggggcttgacattatactcatttagtgagagtagatgcaaaaaagtggaggggcaggagaacttctccagacacctcagataaagtccggagcccaaggctttatcttaaccatgtatggtaccccattcattcatcaagaaaaccctcaacagctgggcctgcatggagtgttatatttcaaggtttttcacaggggttacagtaggacagtccccaccccaatcaggcaccaggataaaagcagggacttaaacagcaccccggttcttcagcctgagccatcacatgctatcagtctcctaacctccccctgggccttaagacagggcttgggcagagaagataaatggtgggacaaaaaaatgagttacattgccacctgagaaac

SEQ ID NO: 351173 - DNA, 1489 bp, Homo sapiens
attcggcacaggcctcgcgtatatttcccctcagtcgcctcgcgcctgcagtttttggctttcacccccaaccagtgaccaaagacttgaccactcaaagtccagctccccagaacactgctcgacatggacaccggtgtgattgaaggtggattaaatgtcactctcaccatccggctacttatgcatggaaaggaagttggcagtatcatcggaaagaaaggagaatcagttaagaagatgcgcgaggagagtggtgcacgtatcaacatctcagaagggaattgtcctgagagaattatcactttggctggacccactaatgccatcttcaaagcctttgctatgatcattgacaaactggaagaggacataagcagctctatgaccaatagcacagctgccagtagacccccggtcaccctgaggctggtggtccctgctagtcagtgtggctctctcattggaaaaggtggatgcaagatcaaggaaatacgagagagtacaggggctcaggtccaggtggcaggggatatgctacccaactcaactgagcgggccatcactattgctggcattccacaatccatcattgagtgtgtcaaacagatctgcgtggtcatgttggagtcccagtcccccccgaagggcgtgaccatcccgtaccggcccaagccgtccagctctccggtcatctttgcaggtggtcaggacaggtacagcacaggcagcgacagtgcgagctttccccacaccaccccgtccatgtgcctcaaccctgacctggagggaccacctctagaggcctataccattcaaggacagtatgccattccacagccagatttgaccaagctgcaccagttggcaatgcaacagtctcattttcccatgacgcatggcaacaccggattcagtgcaggtttggatgcatctgctcagactacttctcatgaactcaccattccaaacgatttgattggctgcataatcgggcgtcaaggcgccaaaatcaatgagatccgtcagatgtctggggcgcagatcaaaattgcgaacccagtggaaggatctactgataggcaggttaccatcactggatctgctgccagcattagcctggctcaatatctaatcaatgtcaggctttcctcggagacgggtggcatggggagcagctagaacaatgcagattcatccataatccctttctgctgttcaccaccacccatgatccatctgtgtagtttctgaacagtcagcgattccaggttttaaatagtttgtaaattttcagtttctacacactttatcatccactcgtgattttttaattaaagcgttttaattcctttctctgttcagctgtaaaaaaaaaagaccaccacccacaaaacccttgggggggcgctgggcctcggaaaggtttttggacacccttggtggggggcggggcccaggggatggggaccgggcccaatgggtccca

SEQ ID NO: 351174 - DNA, 2480 bp, Homo sapiens
attcggcacaggcctcgcgtatatttcccctcagtcgcctcgcgcctgcagtttttggctttcacccccaaccagtgaccaaagacttgaccactcaaagtccagctccccagaacactgctcgacatggacaccggtgtgattgaaggtggattaaatgtcactctcaccatccggctacttatgcatggaaaggaagttggcagtatcatcggaaagaaaggagaatcagttaagaagatgcgcgaggagagtggtgcacgtatcaacatctcagaagggaattgtcctgagagaattatcactttggctggacccactaatgccatcttcaaagcctttgctatgatcattgacaaactggaagaggacataagcagctctatgaccaatagcacagctgccagtagacccccggtcaccctgaggctggtggtccctgctagtcagtgtggctctctcattggaaaaggtggatgcaagatcaaggaaatacgagagagtacaggggctcaggtccaggtggcaggggatatgctacccaactcaactgagcgggccatcactattgctggcattccacaatccatcattgagtgtgtcaaacagatctgcgtggtcatgttggagtcccagtcccccccgaagggcgtgaccatcccgtaccggcccaagccgtccagctctccggtcatctttgcaggtggtcaggacaggtacagcacaggcagcgacagtgcgagctttccccacaccaccccgtccatgtgcctcaaccctgacctggagggaccacctctagagttgaccaagctgcaccagttggcaatgcaacagtctcattttcccatgacgcatggcaacaccggattcagtggcattgaatccagctctccagaggtgaaaggctattgggcaggtttggatgcatctgctcagactacttctcatgaactcaccattccaaacgatttgattggctgcataatcgggcgtcaaggcgccaaaatcaatgagatccgtcagatgtctggggcgcagatcaaaattgcgaacccagtggaaggatctactgataggcaggttaccatcactggatctgctgccagcattagcctggctcaatatctaatcaatgtcaggctttcctcggagacgggtggcatggggagcagctagaacaatgcagattcatccataatccctttctgctgttcaccaccacccatgatccatctgtgtagtttctgaacagtcagcgattccaggttttaaatagtttgtaaattttcagtttctacacactttatcatccactcgtgattttttaattaaagcgttttaattcctttctctgttcagctgttgatgctgagatccatatttagttttataagcttctccctggtttttttttttttttggttttttttttttggctcatgaatttttctgtttgtcatggaaatgtaagagtggaatattaatacatttcagtttagttctgtaatgtcaggaatttttcaaaaaaattaaaagatggactggagctttttctttgtgaatagaaactggatgccacagtgattcatgtgggttttattcctcttgtcttgctgttatttttgtaccttttatccctcaaaggacccttcttgggttttgaatggaagcctttattccggttaagatgttttcttctattttaccacttccatctttttttgtggccctcgatcctatttttccctgactccatgcttggttggcccttataaaacttgtgcccaaaagattgaggattagactttccgaggacttacctgtcctaggggagtaggcaagcacttccactagggagggggtgggggaaaggaatgacacatgacatacatggcatacacattaagcagttgatcatatgtctgactgggttccagtttcttgggaatgttggtccccttgttcaggcttgcatattttaaactaaaaatttcagtctattgtttttagtaacttcatttatagtcctccataacaagttagaaggatgtatctgctaccatttattcctataattttagaaagttggggcttgacattatactcatttagtgagagtagatgcaaaaaagtggaggggcaggagaacttctccagacacctcagataaagtccggagcccaaggctttatcttaaccatgtatggtaccccattcattcatcaagaaaaccctcaacagctgggcctgcatggagtgttatatttcaaggtttttcacaggggttacagtaggacagtccccaccccaatcaggcaccaggataaaagcagggacttaaacagcaccccggttcttcagcctgagccatcacatgctatcagtctcctaacctccccctgggccttaagacagggcttgggcagagaagataaatggtgggacaaaaaaatgagttacattgccacctgagaaac

SEQ ID NO: 351175 - DNA, 2070 bp, Homo sapiens
attcggcacaggcctcgcgtatatttcccctcagtcgcctcgcgcctgcagtttttggctttcacccccaaccagtgaccaaagacttgaccactcaactgagcgggccatcactattgctggcattccacaatccatcattgagtgtgtcaaacagatctgcgtggtcatgttggagtcccagtcccccccgaagggcgtgaccatcccgtaccggcccaagccgtccagctctccggtcatctttgcaggtggtcaggacaggtacagcacaggcagcgacagtgcgagctttccccacaccaccccgtccatgtgcctcaaccctgacctggagggaccacctctagaggcctataccattcaaggacagtatgccattccacagccagatttgaccaagctgcaccagttggcaatgcaacagtctcattttcccatgacgcatggcaacaccggattcagtggcattgaatccagctctccagaggtgaaaggctattgggcaggtttggatgcatctgctcagactacttctcatgaactcaccattccaaacgatttgattggctgcataatcgggcgtcaaggcgccaaaatcaatgagatccgtcagatgtctggggcgcagatcaaaattgcgaacccagtggaaggatctactgataggcaggttaccatcactggatctgctgccagcattagcctggctcaatatctaatcaatgtcaggctttcctcggagacgggtggcatggggagcagctagaacaatgcagattcatccataatccctttctgctgttcaccaccacccatgatccatctgtgtagtttctgaacagtcagcgattccaggttttaaatagtttgtaaattttcagtttctacacactttatcatccactcgtgattttttaattaaagcgttttaattcctttctctgttcagctgttgatgctgagatccatatttagttttataagcttctccctggtttttttttttttttggttttttttttttggctcatgaatttttctgtttgtcatggaaatgtaagagtggaatattaatacatttcagtttagttctgtaatgtcaggaatttttcaaaaaaattaaaagatggactggagctttttctttgtgaatagaaactggatgccacagtgattcatgtgggttttattcctcttgtcttgctgttatttttgtaccttttatccctcaaaggacccttcttgggttttgaatggaagcctttattccggttaagatgttttcttctattttaccacttccatctttttttgtggccctcgatcctatttttccctgactccatgcttggttggcccttataaaacttgtgcccaaaagattgaggattagactttccgaggacttacctgtcctaggggagtaggcaagcacttccactagggagggggtgggggaaaggaatgacacatgacatacatggcatacacattaagcagttgatcatatgtctgactgggttccagtttcttgggaatgttggtccccttgttcaggcttgcatattttaaactaaaaatttcagtctattgtttttagtaacttcatttatagtcctccataacaagttagaaggatgtatctgctaccatttattcctataattttagaaagttggggcttgacattatactcatttagtgagagtagatgcaaaaaagtggaggggcaggagaacttctccagacacctcagataaagtccggagcccaaggctttatcttaaccatgtatggtaccccattcattcatcaagaaaaccctcaacagctgggcctgcatggagtgttatatttcaaggtttttcacaggggttacagtaggacagtccccaccccaatcaggcaccaggataaaagcagggacttaaacagcaccccggttcttcagcctgagccatcacatgctatcagtctcctaacctccccctgggccttaagacagggcttgggcagagaagataaatggtgggacaaaaaaatgagttacattgccacctgagaaac

SEQ ID NO: 351176 - DNA, 2215 bp, Homo sapiens
attcggcacaggcctcgcgtatatttcccctcagtcgcctcgcgcctgcagtttttggctttcacccccaaccagtgaccaaagacttgaccactcaaagtccagctccccagaacactgctcgacatggacaccggtgtgattgaaggtggattaaatgtcactctcaccatccggctacttatgcatggaaaggaagttggcagtatcatcggaaagaaaggagaatcagttaagaagatgcgcgaggagagtggtgcacgtatcaacatctcagaagggaattgtcctgagagaattatcactttggctggacccactaatgccatcttcaaagcctttgctatgatcattgacaaactggaagaggacataagcagctctatgaccaatagcacagctgccagtagacccccggtcaccctgaggctggtggtccctgctagtcagtgtggctctctcattggaaaaggtggatgcaagatcaaggaaatacgagagagtacaggggctcaggtccaggtggcaggggatatgctacccaactcaactgagcgggccatcactattgctggcattccacaatccatcattgagtgtgtcaaacagatctgcgtggtcatgttggagtcccagtcccccccgaagggcgtgaccatcccgtaccggcccaagccgtccagctctccggtcatctttgcaggtggtcaggacaggtacagcacaggcagcgacagtgcgagctttccccacaccaccccgtccatgtgcctcaaccctgacctggagggaccacctctagaggcctataccattcaaggacagtatgccattccacagccagatttgaccaagctgcaccagttggcaatgcaacagtctcattttcccatgacgcatggcaacaccggattcagtgcaggtttggatgcatctgctcagactacttctcaccaccacccatgatccatctgtgtagtttctgaacagtcagcgattccaggttttaaatagtttgtaaattttcagtttctacacactttatcatccactcgtgattttttaattaaagcgttttaattcctttctctgttcagctgttgatgctgagatccatatttagttttataagcttctccctggtttttttttttttttggttttttttttttggctcatgaatttttctgtttgtcatggaaatgtaagagtggaatattaatacatttcagtttagttctgtaatgtcaggaatttttcaaaaaaattaaaagatggactggagctttttctttgtgaatagaaactggatgccacagtgattcatgtgggttttattcctcttgtcttgctgttatttttgtaccttttatccctcaaaggacccttcttgggttttgaatggaagcctttattccggttaagatgttttcttctattttaccacttccatctttttttgtggccctcgatcctatttttccctgactccatgcttggttggcccttataaaacttgtgcccaaaagattgaggattagactttccgaggacttacctgtcctaggggagtaggcaagcacttccactagggagggggtgggggaaaggaatgacacatgacatacatggcatacacattaagcagttgatcatatgtctgactgggttccagtttcttgggaatgttggtccccttgttcaggcttgcatattttaaactaaaaatttcagtctattgtttttagtaacttcatttatagtcctccataacaagttagaaggatgtatctgctaccatttattcctataattttagaaagttggggcttgacattatactcatttagtgagagtagatgcaaaaaagtggaggggcaggagaacttctccagacacctcagataaagtccggagcccaaggctttatcttaaccatgtatggtaccccattcattcatcaagaaaaccctcaacagctgggcctgcatggagtgttatatttcaaggtttttcacaggggttacagtaggacagtccccaccccaatcaggcaccaggataaaagcagggacttaaacagcaccccggttcttcagcctgagccatcacatgctatcagtctcctaacctccccctgggccttaagacagggcttgggcagagaagataaatggtgggacaaaaaaatgagttacattgccacctgagaaac

SEQ ID NO: 351177 - DNA, 1014 bp, Homo sapiens
attcggcacaggcctcgcgtatatttcccctcagtcgcctcgcgcctgcagtttttggctttcacccccaaccagtgaccaaagacttgaccactcaaagtccagctccccagaacactgctcgacatggacaccggtgtgattgaaggtggattaaatgtcactctcaccatccggctacttatgcatggaaaggaagttggcagtatcatcggaaagaaaggagaatcagttaagaagatgcgcgaggagagtggtgcacgtatcaacatctcagaagggaattgtcctgagagaattatcactttggctggacccactaatgccatcttcaaagcctttgctatgatcattgacaaactggaagaggacataagcagctctatgaccaatagcacagctgccagtagacccccggtcaccctgaggctggtggtccctgctagtcagtgtggctctctcattggaaaaggtggatgcaagatcaaggaaatacgagagagtacaggggctcaggtccaggtggcaggggatatgctacccaactcaactgagcgggccatcactattgctggcattccacaatccatcattgagtgtgtcaaacagatctgcgtggtcatgttggagtcccagtcccccccgaagggcgtgaccatcccgtaccggcccaagccgtccagctctccggtcatctttgcaggtggtcaggacaggtacagcacaggcagcgacagtgcgagctttccccacaccaccccgtccatgtgcctcaaccctgacctggagggaccacctctagaggcctataccattcaaggacagtatgccattccacagccagatttgaccaagctgcaccagttggcaatgcaacagtctcattttcccatgacgcatggcaacaccggattcagtggcattgaatccagctctccagaggtgaaaggctattggggtttggatgcatctgctcagactggctcagtcgaacggactgggtatcctctagag

SEQ ID NO: 351178 - DNA, 1331 bp, Homo sapiens
  misc_feature (1307)..(1307): n is a, c, g, or t
  misc_feature (1311)..(1311): n is a, c, g, or t
attcggcacaggcctcgcgtatatttcccctcagtcgcctcgcgcctgcagtttttggctttcacccccaaccagtgaccaaagacttgaccactcaaagtccagctccccagaacactgctcgacatggacaccggtgtgattgaaggtggattaaatgtcactctcaccatccggctacttatgcatggaaaggaagttggcagtatcatcggaaagaaaggagaatcagttaagaagatgcgcgaggagagtggtgcacgtatcaacatctcagaagggaattgtcctgagagaattatcactttggctggacccactaatgccatcttcaaagcctttgctatgatcattgacaaactggaagaggacataagcagctctatgaccaatagcacagctgccagtagacccccggtcaccctgaggctggtggtccctgctagtcagtgtggctctctcattggaaaaggtggatgcaagatcaaggaaatacgagagagtacaggggctcaggtccaggtggcaggggatatgctacccaactcaactgagcgggccatcactattgctggcattccacaatccatcattgagtgtgtcaaacagatctgcgtggtcatgttggagtcccagtcccccccgaagggcgtgaccatcccgtaccggcccaagccgtccagctctccggtcatctttgcaggtggtcaggacaggtacagcacaggcagcgacagtgcgagctttccccacaccaccccgtccatgtgcctcaaccctgacctggagggaccacctctagaggcctataccattcaaggacagtatgccattccacagccagatttgaccaagctgcaccagttggcaatgcaacagtctcattttcccatgacgcatggcaacaccggattcagtggtatggatacctcagtgtttatttctgtaaggtgtagtgcaagagagaggccagtcccaaggtctcagcttgacatctgtttaaaacaaacttcgttatccagcatcctgctggtttaaacttgcctgtctactatggctaagcccaaggaggtaatgtgtttgttaacgtggttttcatttggggtcagttattctaaaagaaaaaaaaagccctggaaggtttgggggtgaggtttggggatgcttgtcaggcaaagggtaggctgatatttctttgagcccatcctgactgctgcccccttgatctgatcagcaccccctttctctccaccagcaattcacaggcttgggtagagaccatccatttgtgccaaattgtgtagtgnccgnattccgggatcctctgacgc

SEQ ID NO: 351179 - DNA, 1362 bp, Homo sapiens
attcggcacaggcctcgcgtatatttcccctcagtcgcctcgcgcctgcagtttttggctttcacccccaaccagtgaccaaagacttgaccactcaaagtccagctccccagaacactgctcgacatggacaccggtgtgattgaaggtggattaaatgtcactctcaccatccggctacttatgcatggaaaggaagttggcagtatcatcggaaagaaaggagaatcagttaagaagatgcgcgaggagagtggtgcacgtatcaacatctcagaagggaattgtcctgagagaattatcactttggctggacccactaatgccatcttcaaagcctttgctatgatcattgacaaactggaagaggacataagcagctctatgaccaatagcacagctgccagtagacccccggtcaccctgaggctggtggtccctgctagtcagtgtggctctctcattggaaaaggtggatgcaagatcaaggaaatacgagagagtacaggggctcaggtccaggtggcaggggatatgctacccaactcaactgagcgggccatcactattgctggcattccacaatccatcattgagtgtgtcaaacagatctgcgtggtcatgttggagtcccagtcccccccgaagggcgtgaccatcccgtaccggcccaagccgtccagctctccggtcatctttgcaggtggtcaggacaggtacagcacaggcagcgacagtgcgagctttccccacaccaccccgtccatgtgcctcaaccctgacctggagggaccacctctagaggcctataccattcaaggacagtatgccattccacagccagatttgaccaagctgcaccagttggcaatgcaacagtctcattttcccatgacgcatggcaacaccggattcagtggtatggatacctcagtgtttatttctgtaaggtgtagtgcaagagagaggccagtcccaaggtctcagcttgacatctgtttaaaacaaacttcgttatccagcatcctgctggtttaaacttgcctgtctactatggctaagcccaaggaggtaatgtgtttgttaacgtggttttcatttggggtcagttattctaaaagaaaaaaaaagccctggaaggtttgggggtgaggtttggggatgcttgtcaggcaaagggtaggctgatatttctttgagcccatcctgactgctgcccccttgatctgatcagcacccccttttttttgtttttgtttttgtttttattttgtttcgtttttggggcttttctgtataaggaataacttgtccgatagggttaggatgagaccacttcctctttcgagggatcctcaagag

SEQ ID NO: 351180 - DNA, 3421 bp, Homo sapiens
attcggcacaggcctcgcgtatatttcccctcagtcgcctcgcgcctgcagtttttggctttcacccccaaccagtgaccaaagacttgaccactcaactgagcgggccatcactattgctggcattccacaatccatcattgagtgtgtcaaacagatctgcgtggtcatgttggagtcccagtcccccccgaagggcgtgaccatcccgtaccggcccaagccgtccagctctccggtcatctttgcaggtggtcaggcctataccattcaaggacagtatgccattccacagccagatttgaccaagctgcaccagttggcaatgcaacagtctcattttcccatgacgcatggcaacaccggattcagtggtatggatacctcagtgtttatttctgtaaggtgtagtgcaagagagaggccagtcccaaggtctcagcttgacatctgtttaaaacaaacttcgttatccagcatcctgctggtttaaacttgcctgtctactatggctaagcccaaggaggtaatgtgtttgttaacgtggttttcatttggggtcagttattctaaaagaaaaaaaaagccctggaaggtttgggggtgaggtttggggatgcttgtcaggcaaagggtaggctgatatttctttgagcccatcctgactgctgcccccttgatctgatcagcaccccctttctctccaccagcaattcacaggcttgggtagagaccatccatttgtgccaaattgtgtagtgttttttttgtttttgtttttgtttttattttgtttcgtttttggggcttttctgtataaggaataacttgtccgatagggttaggatgagaccaccaaactcattttcacttgtatcttaacaggcattgaatccagctctccagaggtgaaaggctattggggtaatgattaaaaaaaaaaaaatctgtagtattctactgttatattaataaactggtgggagtcttgtttcactgcccatgaaccataccagcaacatgcacatggcagagaggagctgagagagcaaaggggtgggcctggagcccccgagggtcccttgatggatctggccaacccccttctaaaaatgatgagacagcagccatagctgagatcaggactaagcttgagtgttagccagctggcctggttcagtccaggtgttgttaaagatgggtacgggtatttgctgatgggatttttttttctttctttttctttggaaaacaaaatgaaagccagaacaaaattattgaacaaaagacagggactaaatctggagaaatgaagtcccctcacctgactgccatttcattctatctgaccttccagtctaggttaggagaatagggggtggaggggattaatctgatacaggtatatttaaagcaactctgcatgtgtgccagaagtccatggtacccattaacaggcataatattggcactggtgctagtgagcatcaggtgagatacaatttggaacacaacaggaaaggggtagaagtacagaaggacttgtttagacattggtcctttttgaggataccacactcccttgcccttgcttccatcccccatccctaataggctgggctttgcaggaaatggcatgaaatcagctcttctgagtgtacagaagaacctttcgagcattatttctacacccttctcccccactctttcctctttggaggcttccaagttagtgatgaatcccaacagctaatgatgctgggtttccagtttatttccttctgttagtttaatgtgcaagtcagtgaggttttgaatgctgtgcattgaatttgcttgctctcttctgtcttttagcaggtttggatgcatctgctcagactacttctcatgaactcaccattccaaacgatttgattggctgcataatcgggcgtcaaggcgccaaaatcaatgagatccgtcagatgtctggggcgcagatcaaaattgcgaacccagtggaaggatctactgataggcaggttaccatcactggatctgctgccagcattagcctggctcaatatctaatcaatgtcaggctttcctcggagacgggtggcatggggagcagctagaacaatgcagattcatccataatccctttctgctgttcaccaccacccatgatccatctgtgtagtttctgaacagtcagcgattccaggttttaaatagtttgtaaattttcagtttctacacactttatcatccactcgtgattttttaattaaagcgttttaattcctttctctgttcagctgttgatgctgagatccatatttagttttataagcttctccctggtttttttttttttttggttttttttttttggctcatgaatttttctgtttgtcatggaaatgtaagagtggaatattaatacatttcagtttagttctgtaatgtcaggaatttttcaaaaaaattaaaagatggactggagctttttctttgtgaatagaaactggatgccacagtgattcatgtgggttttattcctcttgtcttgctgttatttttgtaccttttatccctcaaaggacccttcttgggttttgaatggaagcctttattccggttaagatgttttcttctattttaccacttccatctttttttgtggccctcgatcctatttttccctgactccatgcttggttggcccttataaaacttgtgcccaaaagattgaggattagactttccgaggacttacctgtcctaggggagtaggcaagcacttccactagggagggggtgggggaaaggaatgacacatgacatacatggcatacacattaagcagttgatcatatgtctgactgggttccagtttcttgggaatgttggtccccttgttcaggcttgcatattttaaactaaaaatttcagtctattgtttttagtaacttcatttatagtcctccataacaagttagaaggatgtatctgctaccatttattcctataattttagaaagttggggcttgacattatactcatttagtgagagtagatgcaaaaaagtggaggggcaggagaacttctccagacacctcagataaagtccggagcccaaggctttatcttaaccatgtatggtaccccattcattcatcaagaaaaccctcaacagctgggcctgcatggagtgttatatttcaaggtttttcacaggggttacagtaggacagtccccaccccaatcaggcaccaggataaaagcagggacttaaacagcaccccggttcttcagcctgagccatcacatgctatcagtctcctaacctccccctgggccttaagacagggcttgggcagagaagataaatggtgggacaaaaaaatgagttacattgccacctgagaaac

SEQ ID NO: 351181 - DNA, 3379 bp, Homo sapiens
attcggcacaggcctcgcgtatatttcccctcagtcgcctcgcgcctgcagtttttggctttcacccccaaccagtgaccaaagacttgaccactcaactgagcgggccatcactattgctggcattccacaatccatcattgagtgtgtcaaacagatctgcgtggtcatgttggagtcccagtcccccccgaagggcgtgaccatcccgtaccggcccaagccgtccagctctccggtcatctttgcaggtggtcagttgaccaagctgcaccagttggcaatgcaacagtctcattttcccatgacgcatggcaacaccggattcagtggtatggatacctcagtgtttatttctgtaaggtgtagtgcaagagagaggccagtcccaaggtctcagcttgacatctgtttaaaacaaacttcgttatccagcatcctgctggtttaaacttgcctgtctactatggctaagcccaaggaggtaatgtgtttgttaacgtggttttcatttggggtcagttattctaaaagaaaaaaaaagccctggaaggtttgggggtgaggtttggggatgcttgtcaggcaaagggtaggctgatatttctttgagcccatcctgactgctgcccccttgatctgatcagcaccccctttctctccaccagcaattcacaggcttgggtagagaccatccatttgtgccaaattgtgtagtgttttttttgtttttgtttttgtttttattttgtttcgtttttggggcttttctgtataaggaataacttgtccgatagggttaggatgagaccaccaaactcattttcacttgtatcttaacaggcattgaatccagctctccagaggtgaaaggctattggggtaatgattaaaaaaaaaaaaatctgtagtattctactgttatattaataaactggtgggagtcttgtttcactgcccatgaaccataccagcaacatgcacatggcagagaggagctgagagagcaaaggggtgggcctggagcccccgagggtcccttgatggatctggccaacccccttctaaaaatgatgagacagcagccatagctgagatcaggactaagcttgagtgttagccagctggcctggttcagtccaggtgttgttaaagatgggtacgggtatttgctgatgggatttttttttctttctttttctttggaaaacaaaatgaaagccagaacaaaattattgaacaaaagacagggactaaatctggagaaatgaagtcccctcacctgactgccatttcattctatctgaccttccagtctaggttaggagaatagggggtggaggggattaatctgatacaggtatatttaaagcaactctgcatgtgtgccagaagtccatggtacccattaacaggcataatattggcactggtgctagtgagcatcaggtgagatacaatttggaacacaacaggaaaggggtagaagtacagaaggacttgtttagacattggtcctttttgaggataccacactcccttgcccttgcttccatcccccatccctaataggctgggctttgcaggaaatggcatgaaatcagctcttctgagtgtacagaagaacctttcgagcattatttctacacccttctcccccactctttcctctttggaggcttccaagttagtgatgaatcccaacagctaatgatgctgggtttccagtttatttccttctgttagtttaatgtgcaagtcagtgaggttttgaatgctgtgcattgaatttgcttgctctcttctgtcttttagcaggtttggatgcatctgctcagactacttctcatgaactcaccattccaaacgatttgattggctgcataatcgggcgtcaaggcgccaaaatcaatgagatccgtcagatgtctggggcgcagatcaaaattgcgaacccagtggaaggatctactgataggcaggttaccatcactggatctgctgccagcattagcctggctcaatatctaatcaatgtcaggctttcctcggagacgggtggcatggggagcagctagaacaatgcagattcatccataatccctttctgctgttcaccaccacccatgatccatctgtgtagtttctgaacagtcagcgattccaggttttaaatagtttgtaaattttcagtttctacacactttatcatccactcgtgattttttaattaaagcgttttaattcctttctctgttcagctgttgatgctgagatccatatttagttttataagcttctccctggtttttttttttttttggttttttttttttggctcatgaatttttctgtttgtcatggaaatgtaagagtggaatattaatacatttcagtttagttctgtaatgtcaggaatttttcaaaaaaattaaaagatggactggagctttttctttgtgaatagaaactggatgccacagtgattcatgtgggttttattcctcttgtcttgctgttatttttgtaccttttatccctcaaaggacccttcttgggttttgaatggaagcctttattccggttaagatgttttcttctattttaccacttccatctttttttgtggccctcgatcctatttttccctgactccatgcttggttggcccttataaaacttgtgcccaaaagattgaggattagactttccgaggacttacctgtcctaggggagtaggcaagcacttccactagggagggggtgggggaaaggaatgacacatgacatacatggcatacacattaagcagttgatcatatgtctgactgggttccagtttcttgggaatgttggtccccttgttcaggcttgcatattttaaactaaaaatttcagtctattgtttttagtaacttcatttatagtcctccataacaagttagaaggatgtatctgctaccatttattcctataattttagaaagttggggcttgacattatactcatttagtgagagtagatgcaaaaaagtggaggggcaggagaacttctccagacacctcagataaagtccggagcccaaggctttatcttaaccatgtatggtaccccattcattcatcaagaaaaccctcaacagctgggcctgcatggagtgttatatttcaaggtttttcacaggggttacagtaggacagtccccaccccaatcaggcaccaggataaaagcagggacttaaacagcaccccggttcttcagcctgagccatcacatgctatcagtctcctaacctccccctgggccttaagacagggcttgggcagagaagataaatggtgggacaaaaaaatgagttacattgccacctgagaaac

SEQ ID NO: 351182 - DNA, 1935 bp, Homo sapiens
attcggcacaggcctcgcgtatatttcccctcagtcgcctcgcgcctgcagtttttggctttcacccccaaccagtgaccaaagacttgaccactcaactgagcgggccatcactattgctggcattccacaatccatcattgagtgtgtcaaacagatctgcgtggtcatgttggagtcccagtcccccccgaagggcgtgaccatcccgtaccggcccaagccgtccagctctccggtcatctttgcaggtggtcagttgaccaagctgcaccagttggcaatgcaacagtctcattttcccatgacgcatggcaacaccggattcagtggcattgaatccagctctccagaggtgaaaggctattgggcaggtttggatgcatctgctcagactacttctcatgaactcaccattccaaacgatttgattggctgcataatcgggcgtcaaggcgccaaaatcaatgagatccgtcagatgtctggggcgcagatcaaaattgcgaacccagtggaaggatctactgataggcaggttaccatcactggatctgctgccagcattagcctggctcaatatctaatcaatgtcaggctttcctcggagacgggtggcatggggagcagctagaacaatgcagattcatccataatccctttctgctgttcaccaccacccatgatccatctgtgtagtttctgaacagtcagcgattccaggttttaaatagtttgtaaattttcagtttctacacactttatcatccactcgtgattttttaattaaagcgttttaattcctttctctgttcagctgttgatgctgagatccatatttagttttataagcttctccctggtttttttttttttttggttttttttttttggctcatgaatttttctgtttgtcatggaaatgtaagagtggaatattaatacatttcagtttagttctgtaatgtcaggaatttttcaaaaaaattaaaagatggactggagctttttctttgtgaatagaaactggatgccacagtgattcatgtgggttttattcctcttgtcttgctgttatttttgtaccttttatccctcaaaggacccttcttgggttttgaatggaagcctttattccggttaagatgttttcttctattttaccacttccatctttttttgtggccctcgatcctatttttccctgactccatgcttggttggcccttataaaacttgtgcccaaaagattgaggattagactttccgaggacttacctgtcctaggggagtaggcaagcacttccactagggagggggtgggggaaaggaatgacacatgacatacatggcatacacattaagcagttgatcatatgtctgactgggttccagtttcttgggaatgttggtccccttgttcaggcttgcatattttaaactaaaaatttcagtctattgtttttagtaacttcatttatagtcctccataacaagttagaaggatgtatctgctaccatttattcctataattttagaaagttggggcttgacattatactcatttagtgagagtagatgcaaaaaagtggaggggcaggagaacttctccagacacctcagataaagtccggagcccaaggctttatcttaaccatgtatggtaccccattcattcatcaagaaaaccctcaacagctgggcctgcatggagtgttatatttcaaggtttttcacaggggttacagtaggacagtccccaccccaatcaggcaccaggataaaagcagggacttaaacagcaccccggttcttcagcctgagccatcacatgctatcagtctcctaacctccccctgggccttaagacagggcttgggcagagaagataaatggtgggacaaaaaaatgagttacattgccacctgagaaac

SEQ ID NO: 351183 - DNA, 1896 bp, Homo sapiens
attcggcacaggcctcgcgtatatttcccctcagtcgcctcgcgcctgcagtttttggctttcacccccaaccagtgaccaaagacttgaccactcaactgagcgggccatcactattgctggcattccacaatccatcattgagtgtgtcaaacagatctgcgtggtcatgttggagtcccagtcccccccgaagggcgtgaccatcccgtaccggcccaagccgtccagctctccggtcatctttgcaggtggtcagttgaccaagctgcaccagttggcaatgcaacagtctcattttcccatgacgcatggcaacaccggattcagtgcaggtttggatgcatctgctcagactacttctcatgaactcaccattccaaacgatttgattggctgcataatcgggcgtcaaggcgccaaaatcaatgagatccgtcagatgtctggggcgcagatcaaaattgcgaacccagtggaaggatctactgataggcaggttaccatcactggatctgctgccagcattagcctggctcaatatctaatcaatgtcaggctttcctcggagacgggtggcatggggagcagctagaacaatgcagattcatccataatccctttctgctgttcaccaccacccatgatccatctgtgtagtttctgaacagtcagcgattccaggttttaaatagtttgtaaattttcagtttctacacactttatcatccactcgtgattttttaattaaagcgttttaattcctttctctgttcagctgttgatgctgagatccatatttagttttataagcttctccctggtttttttttttttttggttttttttttttggctcatgaatttttctgtttgtcatggaaatgtaagagtggaatattaatacatttcagtttagttctgtaatgtcaggaatttttcaaaaaaattaaaagatggactggagctttttctttgtgaatagaaactggatgccacagtgattcatgtgggttttattcctcttgtcttgctgttatttttgtaccttttatccctcaaaggacccttcttgggttttgaatggaagcctttattccggttaagatgttttcttctattttaccacttccatctttttttgtggccctcgatcctatttttccctgactccatgcttggttggcccttataaaacttgtgcccaaaagattgaggattagactttccgaggacttacctgtcctaggggagtaggcaagcacttccactagggagggggtgggggaaaggaatgacacatgacatacatggcatacacattaagcagttgatcatatgtctgactgggttccagtttcttgggaatgttggtccccttgttcaggcttgcatattttaaactaaaaatttcagtctattgtttttagtaacttcatttatagtcctccataacaagttagaaggatgtatctgctaccatttattcctataattttagaaagttggggcttgacattatactcatttagtgagagtagatgcaaaaaagtggaggggcaggagaacttctccagacacctcagataaagtccggagcccaaggctttatcttaaccatgtatggtaccccattcattcatcaagaaaaccctcaacagctgggcctgcatggagtgttatatttcaaggtttttcacaggggttacagtaggacagtccccaccccaatcaggcaccaggataaaagcagggacttaaacagcaccccggttcttcagcctgagccatcacatgctatcagtctcctaacctccccctgggccttaagacagggcttgggcagagaagataaatggtgggacaaaaaaatgagttacattgccacctgagaaac

SEQ ID NO: 351184 - DNA, 1243 bp, Homo sapiens
  misc_feature (1200)..(1201): n is a, c, g, or t
attcggcacaggcctcgcgtatatttcccctcagtcgcctcgcgcctgcagtttttggctttcacccccaaccagtgaccaaagacttgaccactcaaagtccagctccccagaacactgctcgacatggacaccggtgtgattgaaggtggattaaatgtcactctcaccatccggctacttatgcatggaaaggaagttggcagtatcatcggaaagaaaggagaatcagttaagaagatgcgcgaggagagtggtgcacgtatcaacatctcagaagggaattgtcctgagagaattatcactttggctggacccactaatgccatcttcaaagcctttgctatgatcattgacaaactggaagaggacataagcagctctatgaccaatagcacagctgccagtagacccccggtcaccctgaggctggtggtccctgctagtcagtgtggctctctcattggaaaaggtggatgcaagatcaaggaaatacgagagagtacaggggctcaggtccaggtggcaggggatatgctacccaactcaactgagcgggccatcactattgctggcattccacaatccatcattgagtgtgtcaaacagatctgcgtggtcatgttggagtcccagtcccccccgaagggcgtgaccatcccgtaccggcccaagccgtccagctctccggtcatctttgcaggtggtcaggacaggtacagcacaggcagcgacagtgcgagctttccccacaccaccccgtccatgtgcctcaaccctgacctggagggaccacctctagagttgaccaagctgcaccagttggcaatgcaacagtctcattttcccatgacgcatggcaacaccggattcagtggtatggatacctcagtgtttatttctgtaaggtgtagtgcaagagagaggccagtcccaaggtctcagcttgacatctgtttaaaacaaacttcgttatccagcatcctgctggtttaaacttgcctgtctactatggctaagcccaaggaggtaatgtgtttgttaacgtggttttcatttggggtcagttattctaaaagaaaaaaaaagccctggaaggtttgggggtgaggtttggggatgcttgtcaggcaaagggtaggctgatatttctttgagcccatcctgactgctgcccccttgatctgatcagcacccccnntctctccaccctgccattcgccggcctgggtcagccacacac

SEQ ID NO: 351185 - DNA, 944 bp, Homo sapiens
attcggcacaggcctcgcgtatatttcccctcagtcgcctcgcgcctgcagtttttggctttcacccccaaccagtgaccaaagacttgaccactcaactgagcgggccatcactattgctggcattccacaatccatcattgagtgtgtcaaacagatctgcgtggtcatgttggagtcccagtcccccccgaagggcgtgaccatcccgtaccggcccaagccgtccagctctccggtcatctttgcaggtggtcaggcctataccattcaaggacagtatgccattccacagccagatttgaccaagctgcaccagttggcaatgcaacagtctcattttcccatgacgcatggcaacaccggattcagtgcaggtttggatgcatctgctcagactacttctcatgaactcaccattccaaacgatttgattggctgcataatcgggcgtcaaggcgccaaaatcaatgagatccgtcagatgtctggggcgcagatcaaaattgcgaacccagtggaaggatctactgataggcaggttaccatcactggatctgctgccagcattagcctggctcaatatctaatcaatgtcaggctttcctcggagacgggtggcatggggagcagctagaacaatgcagattcatccataatccctttctgctgttcaccaccacccatgatccatctgtgtagtttctgaacagtcagcgattccaggttttaaatagtttgtaaattttcagtttctacacactttatcatccactcgtgattttttaattaaagcgttttaattcctttctctgttcagctgtaaaaaaaaaagaccaccacccacaaaacccttgggggggcgctgggcctcggaaaggtttttggacacccttggtggggggcggggcccaggggatggggaccgggcccaatgggtccca

SEQ ID NO: 351186 - DNA, 671 bp, Homo sapiens
  misc_feature (478)..(478): n is a, c, g, or t
attcggcacaggcctcgcgtatatttcccctcagtcgcctcgcgcctgcagtttttggctttcacccccaaccagtgaccaaagacttgaccactcaactgagcgggccatcactattgctggcattccacaatccatcattgagtgtgtcaaacagatctgcgtggtcatgttggagtcccagtcccccccgaagggcgtgaccatcccgtaccggcccaagccgtccagctctccggtcatctttgcaggtggtcaggcctataccattcaaggacagtatgccattccacagccagatttgaccaagctgcaccagttggcaatgcaacagtctcattttcccatgacgcatggcaacaccggattcagtggcattgaatccagctctccagaggtgaaaggctattgggcaggtttggatgcatctgctcagactacttctcatgaactcaccattccaaacgatttgattggntgcataatcgccggttcacgagacccttccttgtactatccctatgaggtataattataacaagctccatctgcctacgacaaacagaccttaaatcgctccattgcatactcttcaatcagccacatagccctggtagtaacatccgttcttatcacatattatcgccaggtcacgagatgggtcccacgag

SEQ ID NO: 351187 - DNA, 554 bp, Homo sapiens
attcggcacaggcctcgcgtatatttcccctcagtcgcctcgcgcctgcagtttttggctttcacccccaaccagtgaccaaagacttgaccactcaactgagcgggccatcactattgctggcattccacaatccatcattgagtgtgtcaaacagatctgcgtggtcatgttggagtcccagtcccccccgaagggcgtgaccatcccgtaccggcccaagccgtccagctctccggtcatctttgcaggtggtcaggcctataccattcaaggacagtatgccattccacagccagatttgaccaagctgcaccagttggcaatgcaacagtctcattttcccatgacgcatggcaacaccggattcagtggcattgaatccagctctccagaggtgaaaggctattgggcaggtttcgacgcatctgttccgatcacgtctcaggaactcgccgttccgtgccatgtgagcatgccgcacagttcggagctttcagggagtcccctatcaatgagaatcgtcagatgtactggtgtgatgatcagaattg

SEQ ID NO: 351188 - DNA, 279 bp, Homo sapiens
ctctaattcggtgtgccttgtttttctttctcccttaagttgattggctgcataatcgggcgtcaaggcgccaaaatcaatgagatccgtcagatgtctggggcgcagatcaaaattgcgaacccagtggaaggatctactgataggcaggttaccatcactggatctgctgccagcattagcctggctcaatatctaatcaatgtcaggtaagattgctctaccttttgtcttatttatgccaacacagtaatgtgtgtgttggggagagctgcagtg

SEQ ID NO: 351189 - DNA, 706 bp, Homo sapiens
ggcggtgatgggactaaacccagtatggtttcttcacctctctcctccttgcagtctccctgcccccctcatctccttccctctccccaatactgatgaaaccctgcatggtgtgttttccctagcaccactgcacagtttgtttacctagcctgtctgtgcttgtccctgcggcaactgttgcaatggctgcaaactaccttcattaagtagcctccaagggggatggtcgttgggcaagtgctgttgcttttctattcccacacccaaaaggcattcattctcttccaggcacccattctatttctaacccttacccttcatattctgccaatccccaggattgtgatgcaagccccatccctaccctctgttgtagtttgagtagtagagtcaattttgggaatcaggacctgcattttcaaattcgaatgtgcttgagccctggctctgttaaatcttctaatgccaacctcctgtttcctccttgcagttgaccaagctgcaccagttggcaatgcaacagtctcattttcccatgacgcatggcaacaccggattcagtggtatggatacctcagtgtttatttctgtaaggtgtagtgcaagagagaggccagtcccaaggtctcagcttgacatctgtttaaaacaaacttcgttatccagcatcctgctggtttaaacttgcctgtctactatggct

SEQ ID NO: 351190 - DNA, 292 bp, Homo sapiens
gcactggggaaactaactgagttcttgtttctgtgttacaggctttcctcggagacgggtggcatggggagcagctagaacaatgcagattcatccataatccctttctgctgttcaccaccacccatgatccatctgtgtagtttctgaacagtcagcgattccaggttttaaatagtttgtaaattttcagtttctacacactttatcatccactcgtgattttttaattaaagcgttttaattcctttctctgttcagctgttgatgctgagatccatatttagtttta

SEQ ID NO: 351191 - DNA, 317 bp, Homo sapiens
  misc_feature (279)..(279): n is a, c, g, or t
ggtttattctaaagaagattatagtgtggtaaacaggtttgaaagtcatggaggagactctctcccagtcccccccgaagggcgtgaccatcccgtaccggcccaagccgtccagctctccggtcatctttgcaggtggtcagttccagattttttaaggtggctacaacaatactatgaaatttcaactctttttttggacattcattctcttgagacattgagttttttaaaccctcctgtcattagaacatatctgggggtaatttccatttaatnaaatgggatccaaaaatgccagagtggctgggggtttg

SEQ ID NO: 351192 - DNA, 489 bp, Homo sapiens
tctagaggatacccagtccgttcgactgagcgggccatcactattgctggcattccacaatccatcattgagtgtgtcaaacagatctgcgtggtcatgttggagtcccagtcccccccgaagggcgtgaccatcccgtaccggcccaagccgtccagctctccggtcatctttgcaggtggtcaggacaggtacagcacaggcagcgacagtgcgagctttccccacaccaccccgtccatgtgcctcaaccctgacctggagggaccacctctagaggcctataccattcaaggacagtatgccattccacagccagatttgaccaagctgcaccagttggcaatgcaacagtctcattttcccatgacgcatggcaacaccggattcagtggcattgaatccagctctccagaggtgaaaggctattggggtttggatgcatctgctcagactggctcagtcgaacggactgggtatcctctagag

SEQ ID NO: 351193 - DNA, 494 bp, Homo sapiens
  misc_feature (7)..(8): n is a, c, g, or t
  misc_feature (10)..(11): n is a, c, g, or t
cgatccnncnncgacgtgttcaaacagatctgcgtggtcatgttggtcccagtcccccccgaagggcgtgaccatcccgtaccggcccaagccgtccagctctccggtcatctttgcaggtggtcaggcctataccattcaaggacagtatgccattccacagccagatttgaccaagctgcaccagttggcaatgcaacagtctcattttcccatgacgcatggcaacaccggattcagtggcattgaatccagctctccagaggtgaaaggctattgggcaggtttggatgcatctgctcagactacttctcatgaactcaccattccaaacgatttgattggctgcataatcgggcgtcaaggcgccaaaatcaatgagatccgtcagatgtctggggcgcagatcaaaattgcgaacccagtggaaggatctactgataggcaggttaccatcactggatctctgccagcttctcaggtaccgagcctca

SEQ ID NO: 351194 - DNA, 2522 bp, Homo sapiens
attcggcacaggcctcgcgtatatttcccctcagtcgcctcgcgcctgcagtttttggctttcacccccaaccagtgaccaaagacttgaccactcaaagtccagctccccagaacactgctcgacatggacaccggtgtgattgaaggtggattaaatgtcactctcaccatccggctacttatgcatggaaaggaagttggcagtatcatcggaaagaaaggagaatcagttaagaagatgcgcgaggagagtggtgcacgtatcaacatctcagaagggaattgtcctgagagaattatcactttggctggacccactaatgccatcttcaaagcctttgctatgatcattgacaaactggaagaggacataagcagctctatgaccaatagcacagctgccagtagacccccggtcaccctgaggctggtggtccctgctagtcagtgtggctctctcattggaaaaggtggatgcaagatcaaggaaatacgagagagtacaggggctcaggtccaggtggcaggggatatgctacccaactcaactgagcgggccatcactattgctggcattccacaatccatcattgagtgtgtcaaacagatctgcgtggtcatgttggagtcccagtcccccccgaagggcgtgaccatcccgtaccggcccaagccgtccagctctccggtcatctttgcaggtggtcaggacaggtacagcacaggcagcgacagtgcgagctttccccacaccaccccgtccatgtgcctcaaccctgacctggagggaccacctctagaggcctataccattcaaggacagtatgccattccacagccagatttgaccaagctgcaccagttggcaatgcaacagtctcattttcccatgacgcatggcaacaccggattcagtggcattgaatccagctctccagaggtgaaaggctattgggcaggtttggatgcatctgctcagactacttctcatgaactcaccattccaaacgatttgattggctgcataatcgggcgtcaaggcgccaaaatcaatgagatccgtcagatgtctggggcgcagatcaaaattgcgaacccagtggaaggatctactgataggcaggttaccatcactggatctgctgccagcattagcctggctcaatatctaatcaatgtcaggctttcctcggagacgggtggcatggggagcagctagaacaatgcagattcatccataatccctttctgctgttcaccaccacccatgatccatctgtgtagtttctgaacagtcagcgattccaggttttaaatagtttgtaaattttcagtttctacacactttatcatccactcgtgattttttaattaaagcgttttaattcctttctctgttcagctgttgatgctgagatccatatttagttttataagcttctccctggtttttttttttttttggttttttttttttggctcatgaatttttctgtttgtcatggaaatgtaagagtggaatattaatacatttcagtttagttctgtaatgtcaggaatttttcaaaaaaattaaaagatggactggagctttttctttgtgaatagaaactggatgccacagtgattcatgtgggttttattcctcttgtcttgctgttatttttgtaccttttatccctcaaaggacccttcttgggttttgaatggaagcctttattccggttaagatgttttcttctattttaccacttccatctttttttgtggccctcgatcctatttttccctgactccatgcttggttggcccttataaaacttgtgcccaaaagattgaggattagactttccgaggacttacctgtcctaggggagtaggcaagcacttccactagggagggggtgggggaaaggaatgacacatgacatacatggcatacacattaagcagttgatcatatgtctgactgggttccagtttcttgggaatgttggtccccttgttcaggcttgcatattttaaactaaaaatttcagtctattgtttttagtaacttcatttatagtcctccataacaagttagaaggatgtatctgctaccatttattcctataattttagaaagttggggcttgacattatactcatttagtgagagtagatgcaaaaaagtggaggggcaggagaacttctccagacacctcagataaagtccggagcccaaggctttatcttaaccatgtatggtaccccattcattcatcaagaaaaccctcaacagctgggcctgcatggagtgttatatttcaaggtttttcacaggggttacagtaggacagtccccaccccaatcaggcaccaggataaaagcagggacttaaacagcaccccggttcttcagcctgagccatcacatgctatcagtctcctaacctccccctgggccttaagacagggcttgggcagagaagataaatggtgggacaaaaaaatgagttacattgccacctgagaaac

SEQ ID NO: 351195 - DNA, 1615 bp, Homo sapiens
attcggcacaggcctcgcgtatatttcccctcagtcgcctcgcgcctgcagtttttggctttcacccccaaccagtgaccaaagacttgaccactcaaagtccagctccccagaacactgctcgacatggacaccggtgtgattgaaggtggattaaatgtcactctcaccatccggctacttatgcatggaaaggaagttggcagtatcatcggaaagaaaggagaatcagttaagaagatgcgcgaggagagtggtgcacgtatcaacatctcagaagggaattgtcctgagagaattatcactttggctggacccactaatgccatcttcaaagcctttgctatgatcattgacaaactggaagaggacataagcagctctatgaccaatagcacagctgccagtagacccccggtcaccctgaggctggtggtccctgctagtcagtgtggctctctcattggaaaaggtggatgcaagatcaaggaaatacgagagagtacaggggctcaggtccaggtggcaggggatatgctacccaactcaactgagcgggccatcactattgctggcattccacaatccatcattgagtgtgtcaaacagatctgcgtggtcatgttggagtcccagtcccccccgaagggcgtgaccatcccgtaccggcccaagccgtccagctctccggtcatctttgcaggtggtcaggacaggtacagcacaggcagcgacagtgcgagctttccccacaccaccccgtccatgtgcctcaaccctgacctggagggaccacctctagaggcctataccattcaaggacagtatgccattccacagccagatttgaccaagctgcaccagttggcaatgcaacagtctcattttcccatgacgcatggcaacaccggattcagtggcattgaatccagctctccagaggtgaaaggctattgggcaggtttggatgcatctgctcagactacttctcatgaactcaccattccaaacgatttgattggctgcataatcgggcgtcaaggcgccaaaatcaatgagatccgtcagatgtctggggcgcagatcaaaattgcgaacccagtggaaggatctactgataggcaggttaccatcactggatctgctgccagcattagcctggctcaatatctaatcaatgtcaggctttcctcggagacgggtggcatggggagcagctagaacaatgcagattcatccataatccctttctgctgttcaccaccacccatgatccatctgtgtagtttctgaacagtcagcgattccaggttttaaatagtttgtaaattttcagtttctacacactttatcatccactcgtgattttttaattaaagcgttttaattcctttctctgttcagctgttgatgctgagatccatatttagttttataagcttctccctggtttttttttttttttggttttttttttttggctcatgaatttttctgtttgtcatggaaatgtaagagtggaatattaatacatttcagtttagttctgtaatgtcaggaatttttcaaaaaaattaaaagatggactggagccacataggaggtgccgagtcga

SEQ ID NO: 351196 - DNA, 2231 bp, Homo sapiens
attcggcacaggcctcgcgtatatttcccctcagtcgcctcgcgcctgcagtttttggctttcacccccaaccagtgaccaaagacttgaccactcaaagtccagctccccagaacactgctcgacatggacaccggtgtgattgaaggtggattaaatgtcactctcaccatccggctacttatgcatggaaaggaagttggcagtatcatcggaaagaaaggagaatcagttaagaagatgcgcgaggagagtggtgcacgtatcaacatctcagaagggaattgtcctgagagaattatcactttggctggacccactaatgccatcttcaaagcctttgctatgatcattgacaaactggaagaggacataagcagctctatgaccaatagcacagctgccagtagacccccggtcaccctgaggctggtggtccctgctagtcagtgtggctctctcattggaaaaggtggatgcaagatcaaggaaatacgagagagtacaggggctcaggtccaggtggcaggggatatgctacccaactcaactgagcgggccatcactattgctggcattccacaatccatcattgagtgtgtcaaacagatctgcgtggtcatgttggagtcccagtcccccccgaagggcgtgaccatcccgtaccggcccaagccgtccagctctccggtcatctttgcaggtggtcaggacaggtacagcacaggcagcgacagtgcgagctttccccacaccaccccgtccatgtgcctcaaccctgacctggagggaccacctctagaggcctataccattcaaggacagtatgccattccacagccagatttgaccaagctgcaccagttggcaatgcaacagtctcattttcccatgacgcatggcaacaccggattcagtggcattgaatccagctctccagaggtgaaaggctattgggcaggtttggatgcatctgctcagactacttctcatgaactcaccattccaaacgatttgattggctgcataatcgggcgtcaaggcgccaaaatcaatgagatccgtcagatgtctggggcgcagatcaaaattgcgaacccagtggaaggatctactgataggcaggttaccatcactggatctgctgccagcattagcctggctcaatatctaatcaatgtcaggctttcctcggagacgggtggcatggggagcagctagaacaatgcagattcatccataatccctttctgctgttcaccaccacccatgatccatctgtgtagtttctgaacagtcagcgattccaggttttaaatagtttgtaaattttcagtttctacacactttatcatccactcgtgattttttaattaaagcgttttaattcctttctctgttcagctgttgatgctgagatccatatttagttttataagcttctccctggttttttttttttttggggttttttttttgtgggcctcatggaattttcctggttggctcagtggaaattgttaagaagtgtggaattttaatcactttccagttaagtccgtgtaagtgctcgggaattttctcaaaaaatttaaaacagtttggccgggaaaaaaaaaaaataaaaaaaaaaaaaaaaaaacaaacaacaaggggggcggcgcggcgggcaataagaaaaatctccaccccggaggacggccccagaagttcttaccacagacacccccgattttctttgaaccagaggggggcgccccatcaagagggagggcgagtcaatacaagcagaaaagagaacgcggagccaggcataacaaaccaagcggctcgtgctgtcggacaacgctgcgacccctggacaacccctggggcacaggaaccccaccacgccggcgcgggggcgggcaaccacataggcgggccaccccacccacagccagggaaattacgagacacagccgcaggggaataacataaccaggggagcggctgtcgacctgggccccacccggcgcctctagatgatcgcgtggccgccaaaagatgaggaccccgccaactgatcatggcagcaaatcataggcaagcggccgcggatctataacaacaacagacacacaccgcaccaaacgcaacacgcaagataacgcacacacaaatcacagcacacgacgagatcacacacaagtgcccagaaacagaaggacaagcaaccactacacacacca

SEQ ID NO: 351197 - DNA, 1883 bp, Homo sapiens
attcggcacaggcctcgcgtatatttcccctcagtcgcctcgcgcctgcagtttttggctttcacccccaaccagtgaccaaagacttgaccactcaaagtccagctccccagaacactgctcgacatggacaccggtgtgattgaaggtggattaaatgtcactctcaccatccggctacttatgcatggaaaggaagttggcagtatcatcggaaagaaaggagaatcagttaagaagatgcgcgaggagagtggtgcacgtatcaacatctcagaagggaattgtcctgagagaattatcactttggctggacccactaatgccatcttcaaagcctttgctatgatcattgacaaactggaagaggacataagcagctctatgaccaatagcacagctgccagtagacccccggtcaccctgaggctggtggtccctgctagtcagtgtggctctctcattggaaaaggtggatgcaagatcaaggaaatacgagagagtacaggggctcaggtccaggtggcaggggatatgctacccaactcaactgagcgggccatcactattgctggcattccacaatccatcattgagtgtgtcaaacagatctgcgtggtcatgttggagtcccagtcccccccgaagggcgtgaccatcccgtaccggcccaagccgtccagctctccggtcatctttgcaggtggtcaggacaggtacagcacaggcagcgacagtgcgagctttccccacaccaccccgtccatgtgcctcaaccctgacctggagggaccacctctagaggcctataccattcaaggacagtatgccattccacagccagatttgaccaagctgcaccagttggcaatgcaacagtctcattttcccatgacgcatggcaacaccggattcagtggcattgaatccagctctccagaggtgaaaggctattgggcaggtttggatgcatctgctcagactacttctcatgaactcaccattccaaacgatttgattggctgcataatcgggcgtcaaggcgccaaaatcaatgagatccgtcagatgtctggggcgcagatcaaaattgcgaacccagtggaaggatctactgataggcaggttaccatcactggatctgctgccagcattagcctggctcaatatctaatcaatgtcaggctttcctcggagacgggtggcatggggagcagctagaacaatgcagattcatccataatccctttctgctgttcaccaccacccatgatccatctgtgtagtttctgaacagtcagcgattccaggttttaaatagtttgtaaattttcagtttctacacactttatcatccactcgtgattttttaattaaagcgttttaattcctttctctgttcagctgttgatgctgagatccatatttagttttataagcttctccctggtttttttttttttgggggtataggggccgcaaagagaaattccgtggtgtggcagggcaagtggtaagagggggcaatatcatactttccaaggtaagttctggaatggcggagatttttccaagaacaattcaaaaaggttggggtggaaaaaaaaaaaagaaaaaaaaaagaaaaaaaaagaaaacgaacagaagacaccgacagggggccgagcaggacaacacaagcagaagacacaacaggaggaggggagcgcgaacaacaaacaagagaagggggggggggcggacggcgagagagaagagaaagcgtggggcgcgcccgatagaagtgagccggtcgcgaacgcagaggcacgagggggcgatcaaaaaaggggggggaggtgaacacagggtgatcgtatagcagccgcaaaccacggcgggga

SEQ ID NO: 351198 - DNA, 2483 bp, Homo sapiens
attcggcacaggcctcgcgtatatttcccctcagtcgcctcgcgcctgcagtttttggctttcacccccaaccagtgaccaaagacttgaccactcaaagtccagctccccagaacactgctcgacatggacaccggtgtgattgaaggtggattaaatgtcactctcaccatccggctacttatgcatggaaaggaagttggcagtatcatcggaaagaaaggagaatcagttaagaagatgcgcgaggagagtggtgcacgtatcaacatctcagaagggaattgtcctgagagaattatcactttggctggacccactaatgccatcttcaaagcctttgctatgatcattgacaaactggaagaggacataagcagctctatgaccaatagcacagctgccagtagacccccggtcaccctgaggctggtggtccctgctagtcagtgtggctctctcattggaaaaggtggatgcaagatcaaggaaatacgagagagtacaggggctcaggtccaggtggcaggggatatgctacccaactcaactgagcgggccatcactattgctggcattccacaatccatcattgagtgtgtcaaacagatctgcgtggtcatgttggagtcccagtcccccccgaagggcgtgaccatcccgtaccggcccaagccgtccagctctccggtcatctttgcaggtggtcaggacaggtacagcacaggcagcgacagtgcgagctttccccacaccaccccgtccatgtgcctcaaccctgacctggagggaccacctctagaggcctataccattcaaggacagtatgccattccacagccagatttgaccaagctgcaccagttggcaatgcaacagtctcattttcccatgacgcatggcaacaccggattcagtgcaggtttggatgcatctgctcagactacttctcatgaactcaccattccaaacgatttgattggctgcataatcgggcgtcaaggcgccaaaatcaatgagatccgtcagatgtctggggcgcagatcaaaattgcgaacccagtggaaggatctactgataggcaggttaccatcactggatctgctgccagcattagcctggctcaatatctaatcaatgtcaggctttcctcggagacgggtggcatggggagcagctagaacaatgcagattcatccataatccctttctgctgttcaccaccacccatgatccatctgtgtagtttctgaacagtcagcgattccaggttttaaatagtttgtaaattttcagtttctacacactttatcatccactcgtgattttttaattaaagcgttttaattcctttctctgttcagctgttgatgctgagatccatatttagttttataagcttctccctggtttttttttttttttggttttttttttttggctcatgaatttttctgtttgtcatggaaatgtaagagtggaatattaatacatttcagtttagttctgtaatgtcaggaatttttcaaaaaaattaaaagatggactggagctttttctttgtgaatagaaactggatgccacagtgattcatgtgggttttattcctcttgtcttgctgttatttttgtaccttttatccctcaaaggacccttcttgggttttgaatggaagcctttattccggttaagatgttttcttctattttaccacttccatctttttttgtggccctcgatcctatttttccctgactccatgcttggttggcccttataaaacttgtgcccaaaagattgaggattagactttccgaggacttacctgtcctaggggagtaggcaagcacttccactagggagggggtgggggaaaggaatgacacatgacatacatggcatacacattaagcagttgatcatatgtctgactgggttccagtttcttgggaatgttggtccccttgttcaggcttgcatattttaaactaaaaatttcagtctattgtttttagtaacttcatttatagtcctccataacaagttagaaggatgtatctgctaccatttattcctataattttagaaagttggggcttgacattatactcatttagtgagagtagatgcaaaaaagtggaggggcaggagaacttctccagacacctcagataaagtccggagcccaaggctttatcttaaccatgtatggtaccccattcattcatcaagaaaaccctcaacagctgggcctgcatggagtgttatatttcaaggtttttcacaggggttacagtaggacagtccccaccccaatcaggcaccaggataaaagcagggacttaaacagcaccccggttcttcagcctgagccatcacatgctatcagtctcctaacctccccctgggccttaagacagggcttgggcagagaagataaatggtgggacaaaaaaatgagttacattgccacctgagaaac

SEQ ID NO: 351199 - DNA, 1775 bp, Homo sapiens
attcggcacaggcctcgcgtatatttcccctcagtcgcctcgcgcctgcagtttttggctttcacccccaaccagtgaccaaagacttgaccactcaaagtccagctccccagaacactgctcgacatggacaccggtgtgattgaaggtggattaaatgtcactctcaccatccggctacttatgcatggaaaggaagttggcagtatcatcggaaagaaaggagaatcagttaagaagatgcgcgaggagagtggtgcacgtatcaacatctcagaagggaattgtcctgagagaattatcactttggctggacccactaatgccatcttcaaagcctttgctatgatcattgacaaactggaagaggacataagcagctctatgaccaatagcacagctgccagtagacccccggtcaccctgaggctggtggtccctgctagtcagtgtggctctctcattggaaaaggtggatgcaagatcaaggaaatacgagagagtacaggggctcaggtccaggtggcaggggatatgctacccaactcaactgagcgggccatcactattgctggcattccacaatccatcattgagtgtgtcaaacagatctgcgtggtcatgttggagtcccagtcccccccgaagggcgtgaccatcccgtaccggcccaagccgtccagctctccggtcatctttgcaggtggtcaggacaggtacagcacaggcagcgacagtgcgagctttccccacaccaccccgtccatgtgcctcaaccctgacctggagggaccacctctagaggcctataccattcaaggacagtatgccattccacagccagatttgaccaagctgcaccagttggcaatgcaacagtctcattttcccatgacgcatggcaacaccggattcagtggcattgaatccagctctccagaggtgaaaggctattgggcaggtttggatgcatctgctcagactacttctcatgaactcaccattccaaacgatttgattggctgcataatcgggcgtcaaggcgccaaaatcaatgagatccgtcagatgtctggggcgcagatcaaaattgcgaacccagtggaaggatctactgataggcaggttaccatcactggatctgctgccagcattagcctggctcaatatctaatcaatgtcaggctttcctcggagacgggtggcatggggagcagctagaacaatgcagattcatccataatccctttctgctgttcaccaccacccatgatccatctgtgtagtttctgaacagtcagcgattccaggttttaaatagtttgtaaattttcagtttctacacactttatcatccactcgtgattttttaattaaagcgttttaattcctttctctgttcagctgtaaaaaaaaaaaaaaaaaaaacaacaagaagaaaatgacacacgacacaacaacacaaaaaaaggggggcaccgaataaagtacccacgcgagggcccaaaaaacagaaccagattcgtgaacaagtggcccaaaagagcgccgaaaaagcacaccacggaccacatgtaaaacagagcggacgggaaacaaccccacccgcggaccctctgggagaaagcccaccaccggggggcgaccacgatgcgccccacccccccagaaataaacccccgaggaaacacaacctcacgcgtacaagggtaacacaagcgaatatcgcaggagaaaatgtcacggaaatgatatgaatagcgcacaccgaagaa

SEQ ID NO: 351200 - DNA, 3966 bp, Homo sapiens
attcggcacaggcctcgcgtatatttcccctcagtcgcctcgcgcctgcagtttttggctttcacccccaaccagtgaccaaagacttgaccactcaaagtccagctccccagaacactgctcgacatggacaccggtgtgattgaaggtggattaaatgtcactctcaccatccggctacttatgcatggaaaggaagttggcagtatcatcggaaagaaaggagaatcagttaagaagatgcgcgaggagagtggtgcacgtatcaacatctcagaagggaattgtcctgagagaattatcactttggctggacccactaatgccatcttcaaagcctttgctatgatcattgacaaactggaagaggacataagcagctctatgaccaatagcacagctgccagtagacccccggtcaccctgaggctggtggtccctgctagtcagtgtggctctctcattggaaaaggtggatgcaagatcaaggaaatacgagagagtacaggggctcaggtccaggtggcaggggatatgctacccaactcaactgagcgggccatcactattgctggcattccacaatccatcattgagtgtgtcaaacagatctgcgtggtcatgttggagtcccagtcccccccgaagggcgtgaccatcccgtaccggcccaagccgtccagctctccggtcatctttgcaggtggtcaggacaggtacagcacaggcagcgacagtgcgagctttccccacaccaccccgtccatgtgcctcaaccctgacctggagggaccacctctagaggcctataccattcaaggacagtatgccattccacagccagatttgaccaagctgcaccagttggcaatgcaacagtctcattttcccatgacgcatggcaacaccggattcagtggtatggatacctcagtgtttatttctgtaaggtgtagtgcaagagagaggccagtcccaaggtctcagcttgacatctgtttaaaacaaacttcgttatccagcatcctgctggtttaaacttgcctgtctactatggctaagcccaaggaggtaatgtgtttgttaacgtggttttcatttggggtcagttattctaaaagaaaaaaaaagccctggaaggtttgggggtgaggtttggggatgcttgtcaggcaaagggtaggctgatatttctttgagcccatcctgactgctgcccccttgatctgatcagcaccccctttctctccaccagcaattcacaggcttgggtagagaccatccatttgtgccaaattgtgtagtgttttttttgtttttgtttttgtttttattttgtttcgtttttggggcttttctgtataaggaataacttgtccgatagggttaggatgagaccaccaaactcattttcacttgtatcttaacaggcattgaatccagctctccagaggtgaaaggctattggggtaatgattaaaaaaaaaaaaatctgtagtattctactgttatattaataaactggtgggagtcttgtttcactgcccatgaaccataccagcaacatgcacatggcagagaggagctgagagagcaaaggggtgggcctggagcccccgagggtcccttgatggatctggccaacccccttctaaaaatgatgagacagcagccatagctgagatcaggactaagcttgagtgttagccagctggcctggttcagtccaggtgttgttaaagatgggtacgggtatttgctgatgggatttttttttctttctttttctttggaaaacaaaatgaaagccagaacaaaattattgaacaaaagacagggactaaatctggagaaatgaagtcccctcacctgactgccatttcattctatctgaccttccagtctaggttaggagaatagggggtggaggggattaatctgatacaggtatatttaaagcaactctgcatgtgtgccagaagtccatggtacccattaacaggcataatattggcactggtgctagtgagcatcaggtgagatacaatttggaacacaacaggaaaggggtagaagtacagaaggacttgtttagacattggtcctttttgaggataccacactcccttgcccttgcttccatcccccatccctaataggctgggctttgcaggaaatggcatgaaatcagctcttctgagtgtacagaagaacctttcgagcattatttctacacccttctcccccactctttcctctttggaggcttccaagttagtgatgaatcccaacagctaatgatgctgggtttccagtttatttccttctgttagtttaatgtgcaagtcagtgaggttttgaatgctgtgcattgaatttgcttgctctcttctgtcttttagcaggtttggatgcatctgctcagactacttctcatgaactcaccattccaaacgatttgattggctgcataatcgggcgtcaaggcgccaaaatcaatgagatccgtcagatgtctggggcgcagatcaaaattgcgaacccagtggaaggatctactgataggcaggttaccatcactggatctgctgccagcattagcctggctcaatatctaatcaatgtcaggctttcctcggagacgggtggcatggggagcagctagaacaatgcagattcatccataatccctttctgctgttcaccaccacccatgatccatctgtgtagtttctgaacagtcagcgattccaggttttaaatagtttgtaaattttcagtttctacacactttatcatccactcgtgattttttaattaaagcgttttaattcctttctctgttcagctgttgatgctgagatccatatttagttttataagcttctccctggtttttttttttttttggttttttttttttggctcatgaatttttctgtttgtcatggaaatgtaagagtggaatattaatacatttcagtttagttctgtaatgtcaggaatttttcaaaaaaattaaaagatggactggagctttttctttgtgaatagaaactggatgccacagtgattcatgtgggttttattcctcttgtcttgctgttatttttgtaccttttatccctcaaaggacccttcttgggttttgaatggaagcctttattccggttaagatgttttcttctattttaccacttccatctttttttgtggccctcgatcctatttttccctgactccatgcttggttggcccttataaaacttgtgcccaaaagattgaggattagactttccgaggacttacctgtcctaggggagtaggcaagcacttccactagggagggggtgggggaaaggaatgacacatgacatacatggcatacacattaagcagttgatcatatgtctgactgggttccagtttcttgggaatgttggtccccttgttcaggcttgcatattttaaactaaaaatttcagtctattgtttttagtaacttcatttatagtcctccataacaagttagaaggatgtatctgctaccatttattcctataattttagaaagttggggcttgacattatactcatttagtgagagtagatgcaaaaaagtggaggggcaggagaacttctccagacacctcagataaagtccggagcccaaggctttatcttaaccatgtatggtaccccattcattcatcaagaaaaccctcaacagctgggcctgcatggagtgttatatttcaaggtttttcacaggggttacagtaggacagtccccaccccaatcaggcaccaggataaaagcagggacttaaacagcaccccggttcttcagcctgagccatcacatgctatcagtctcctaacctccccctgggccttaagacagggcttgggcagagaagataaatggtgggacaaaaaaatgagttacattgccacctgagaaac

SEQ ID NO: 351201 - DNA, 1369 bp, Homo sapiens
attcggcacaggcctcgcgtatatttcccctcagtcgcctcgcgcctgcagtttttggctttcacccccaaccagtgaccaaagacttgaccactcaaagtccagctccccagaacactgctcgacatggacaccggtgtgattgaaggtggattaaatgtcactctcaccatccggctacttatgcatggaaaggaagttggcagtatcatcggaaagaaaggagaatcagttaagaagatgcgcgaggagagtggtgcacgtatcaacatctcagaagggaattgtcctgagagaattatcactttggctggacccactaatgccatcttcaaagcctttgctatgatcattgacaaactggaagaggacataagcagctctatgaccaatagcacagctgccagtagacccccggtcaccctgaggctggtggtccctgctagtcagtgtggctctctcattggaaaaggtggatgcaagatcaaggaaatacgagagagtacaggggctcaggtccaggtggcaggggatatgctacccaactcaactgagcgggccatcactattgctggcattccacaatccatcattgagtgtgtcaaacagatctgcgtggtcatgttggagtcccagtcccccccgaagggcgtgaccatcccgtaccggcccaagccgtccagctctccggtcatctttgcaggtggtcaggacaggtacagcacaggcagcgacagtgcgagctttccccacaccaccccgtccatgtgcctcaaccctgacctggagggaccacctctagaggcctataccattcaaggacagtatgccattccacagccagatttgaccaagctgcaccagttggcaatgcaacagtctcattttcccatgacgcatggcaacaccggattcagtgcaggtttggatgcatctgctcagactacttctcatgaactcaccattccaaacgatttgattggctgcataatcgggcgtcaaggcgccaaaatcaatgagatccgtcagatgtctggggcgcagatcaaaattgcgaacccagtggaaggatctactgataggcaggttaccatcactggatctgctgccagcattagcctggctcaatatctaatcaatgtcaggctttcctcggagacgggtggcatggggagcagctagaacaatgcagattcatccataatccctttctgctgttcaccaccacccatgatccatctgtgtagtttctgaacagtcagcgattccaggttttaaatagtttgtaaattttcagtttctacacactttatcatccactcgtgattttttaattaaagcgttttaattcctttctctgttcagctgt

SEQ ID NO: 351202 - DNA, 3799 bp, Homo sapiens
attcggcacaggcctcgcgtatatttcccctcagtcgcctcgcgcctgcagtttttggctttcacccccaaccagtgaccaaagacttgaccactcaaagtccagctccccagaacactgctcgacatggacaccggtgtgattgaaggtggattaaatgtcactctcaccatccggctacttatgcatggaaaggaagttggcagtatcatcggaaagaaaggagaatcagttaagaagatgcgcgaggagagtggtgcacgtatcaacatctcagaagggaattgtcctgagagaattatcactttggctggacccactaatgccatcttcaaagcctttgctatgatcattgacaaactggaagaggacataagcagctctatgaccaatagcacagctgccagtagacccccggtcaccctgaggctggtggtccctgctagtcagtgtggctctctcattggaaaaggtggatgcaagatcaaggaaatacgagagagtacaggggctcaggtccaggtggcaggggatatgctacccaactcaactgagcgggccatcactattgctggcattccacaatccatcattgagtgtgtcaaacagatctgcgtggtcatgttggagtcccagtcccccccgaagggcgtgaccatcccgtaccggcccaagccgtccagctctccggtcatctttgcaggtggtcaggacaggtacagcacaggcagcgacagtgcgagctttccccacaccaccccgtccatgtgcctcaaccctgacctggagggaccacctctagaggcctataccattcaaggacagtatgccattccacagccagatttgaccaagctgcaccagttggcaatgcaacagtctcattttcccatgacgcatggcaacaccggattcagtggtatggatacctcagtgtttatttctgtaaggtgtagtgcaagagagaggccagtcccaaggtctcagcttgacatctgtttaaaacaaacttcgttatccagcatcctgctggtttaaacttgcctgtctactatggctaagcccaaggaggtaatgtgtttgttaacgtggttttcatttggggtcagttattctaaaagaaaaaaaaagccctggaaggtttgggggtgaggtttggggatgcttgtcaggcaaagggtaggctgatatttctttgagcccatcctgactgctgcccccttgatctgatcagcaccccctttctctccaccagcaattcacaggcttgggtagagaccatccatttgtgccaaattgtgtagtgttttttttgtttttgtttttgtttttattttgtttcgtttttggggcttttctgtataaggaataacttgtccgatagggttaggatgagaccaccaaactcattttcacttgtatcttaacaggcattgaatccagctctccagaggtgaaaggctattggggtaatgattaaaaaaaaaaaaatctgtagtattctactgttatattaataaactggtgggagtcttgtttcactgcccatgaaccataccagcaacatgcacatggcagagaggagctgagagagcaaaggggtgggcctggagcccccgagggtcccttgatggatctggccaacccccttctaaaaatgatgagacagcagccatagctgagatcaggactaagcttgagtgttagccagctggcctggttcagtccaggtgttgttaaagatgggtacgggtatttgctgatgggatttttttttctttctttttctttggaaaacaaaatgaaagccagaacaaaattattgaacaaaagacagggactaaatctggagaaatgaagtcccctcacctgactgccatttcattctatctgaccttccagtctaggttaggagaatagggggtggaggggattaatctgatacaggtatatttaaagcaactctgcatgtgtgccagaagtccatggtacccattaacaggcataatattggcactggtgctagtgagcatcaggtgagatacaatttggaacacaacaggaaaggggtagaagtacagaaggacttgtttagacattggtcctttttgaggataccacactcccttgcccttgcttccatcccccatccctaataggctgggctttgcaggaaatggcatgaaatcagctcttctgagtgtacagaagaacctttcgagcattatttctacacccttctcccccactctttcctctttggaggcttccaagttagtgatgaatcccaacagctaatgatgctgggtttccagtttatttccttctgttagtttaatgtgcaagtcagtgaggttttgaatgctgtgcattgaatttgcttgctctcttctgtcttttagcaggtttggatgcatctgctcagactacttctcatgaactcaccattccaaacgatcaggctttcctcggagacgggtggcatggggagcagctagaacaatgcagattcatccataatccctttctgctgttcaccaccacccatgatccatctgtgtagtttctgaacagtcagcgattccaggttttaaatagtttgtaaattttcagtttctacacactttatcatccactcgtgattttttaattaaagcgttttaattcctttctctgttcagctgttgatgctgagatccatatttagttttataagcttctccctggtttttttttttttttggttttttttttttggctcatgaatttttctgtttgtcatggaaatgtaagagtggaatattaatacatttcagtttagttctgtaatgtcaggaatttttcaaaaaaattaaaagatggactggagctttttctttgtgaatagaaactggatgccacagtgattcatgtgggttttattcctcttgtcttgctgttatttttgtaccttttatccctcaaaggacccttcttgggttttgaatggaagcctttattccggttaagatgttttcttctattttaccacttccatctttttttgtggccctcgatcctatttttccctgactccatgcttggttggcccttataaaacttgtgcccaaaagattgaggattagactttccgaggacttacctgtcctaggggagtaggcaagcacttccactagggagggggtgggggaaaggaatgacacatgacatacatggcatacacattaagcagttgatcatatgtctgactgggttccagtttcttgggaatgttggtccccttgttcaggcttgcatattttaaactaaaaatttcagtctattgtttttagtaacttcatttatagtcctccataacaagttagaaggatgtatctgctaccatttattcctataattttagaaagttggggcttgacattatactcatttagtgagagtagatgcaaaaaagtggaggggcaggagaacttctccagacacctcagataaagtccggagcccaaggctttatcttaaccatgtatggtaccccattcattcatcaagaaaaccctcaacagctgggcctgcatggagtgttatatttcaaggtttttcacaggggttacagtaggacagtccccaccccaatcaggcaccaggataaaagcagggacttaaacagcaccccggttcttcagcctgagccatcacatgctatcagtctcctaacctccccctgggccttaagacagggcttgggcagagaagataaatggtgggacaaaaaaatgagttacattgccacctgagaaac

SEQ ID NO: 351203 - DNA, 2468 bp, Homo sapiens
attcggcacaggcctcgcgtatatttcccctcagtcgcctcgcgcctgcagtttttggctttcacccccaaccagtgaccaaagacttgaccactcaaagtccagctccccagaacactgctcgacatggacaccggtgtgattgaaggtggattaaatgtcactctcaccatccggctacttatgcatggaaaggaagttggcagtatcatcggaaagaaaggagaatcagttaagaagatgcgcgaggagagtggtgcacgtatcaacatctcagaagggaattgtcctgagagaattatcactttggctggacccactaatgccatcttcaaagcctttgctatgatcattgacaaactggaagaggacataagcagctctatgaccaatagcacagctgccagtagacccccggtcaccctgaggctggtggtccctgctagtcagtgtggctctctcattggaaaaggtggatgcaagatcaaggaaatacgagagagtacaggggctcaggtccaggtggcaggggatatgctacccaactcaactgagcgggccatcactattgctggcattccacaatccatcattgagtgtgtcaaacagatctgcgtggtcatgttggagtcccagtcccccccgaagggcgtgaccatcccgtaccggcccaagccgtccagctctccggtcatctttgcaggtggtcaggacaggtacagcacaggcagcgacagtgcgagctttccccacaccaccccgtccatgtgcctcaaccctgacctggagggaccacctctagaggcctataccattcaaggacagtatgccattccacagccagatttgaccaagctgcaccagttggcaatgcaacagtctcattttcccatgacgcatggcaacaccggattcagtggcattgaatccagctctccagaggtgaaaggctattgggcaggtttggatgcatctgctcagactacttctcatgaactcaccattccaaacgatttgattggctgcataatcgggcgtcaaggcgccaaaatcaatgagatccgtcagatgtctggggcgcagatctctgctgccagcattagcctggctcaatatctaatcaatgtcaggctttcctcggagacgggtggcatggggagcagctagaacaatgcagattcatccataatccctttctgctgttcaccaccacccatgatccatctgtgtagtttctgaacagtcagcgattccaggttttaaatagtttgtaaattttcagtttctacacactttatcatccactcgtgattttttaattaaagcgttttaattcctttctctgttcagctgttgatgctgagatccatatttagttttataagcttctccctggtttttttttttttttggttttttttttttggctcatgaatttttctgtttgtcatggaaatgtaagagtggaatattaatacatttcagtttagttctgtaatgtcaggaatttttcaaaaaaattaaaagatggactggagctttttctttgtgaatagaaactggatgccacagtgattcatgtgggttttattcctcttgtcttgctgttatttttgtaccttttatccctcaaaggacccttcttgggttttgaatggaagcctttattccggttaagatgttttcttctattttaccacttccatctttttttgtggccctcgatcctatttttccctgactccatgcttggttggcccttataaaacttgtgcccaaaagattgaggattagactttccgaggacttacctgtcctaggggagtaggcaagcacttccactagggagggggtgggggaaaggaatgacacatgacatacatggcatacacattaagcagttgatcatatgtctgactgggttccagtttcttgggaatgttggtccccttgttcaggcttgcatattttaaactaaaaatttcagtctattgtttttagtaacttcatttatagtcctccataacaagttagaaggatgtatctgctaccatttattcctataattttagaaagttggggcttgacattatactcatttagtgagagtagatgcaaaaaagtggaggggcaggagaacttctccagacacctcagataaagtccggagcccaaggctttatcttaaccatgtatggtaccccattcattcatcaagaaaaccctcaacagctgggcctgcatggagtgttatatttcaaggtttttcacaggggttacagtaggacagtccccaccccaatcaggcaccaggataaaagcagggacttaaacagcaccccggttcttcagcctgagccatcacatgctatcagtctcctaacctccccctgggccttaagacagggcttgggcagagaagataaatggtgggacaaaaaaatgagttacattgccacctgagaaac

SEQ ID NO: 351204 - DNA, 2973 bp, Homo sapiens
attcggcacaggcctcgcgtatatttcccctcagtcgcctcgcgcctgcagtttttggctttcacccccaaccagtgaccaaagacttgaccactcaaagtccagctccccagaacactgctcgacatggacaccggtgtgattgaaggtggattaaatgtcactctcaccatccggctacttatgcatggaaaggaagttggcagtatcatcggaaagaaaggagaatcagttaagaagatgcgcgaggagagtggtgcacgtatcaacatctcagaagggaattgtcctgagagaattatcactttggctggacccactaatgccatcttcaaagcctttgctatgatcattgacaaactggaagaggacataagcagctctatgaccaatagcacagctgccagtagacccccggtcaccctgaggctggtggtccctgctagtcagtgtggctctctcattggaaaaggtggatgcaagatcaaggaaatacgagagagtacaggggctcaggtccaggtggcaggggatatgctacccaactcaactgagcgggccatcactattgctggcattccacaatccatcattgagtgtgtcaaacagatctgcgtggtcatgttggagtcccagtcccccccgaagggcgtgaccatcccgtaccggcccaagccgtccagctctccggtcatctttgcaggtggtcaggacaggtacagcacaggcagcgacagtgcgagctttccccacaccaccccgtccatgtgcctcaaccctgacctggagggaccacctctagaggcctataccattcaaggacagtatgccattccacagccagatttgaccaagctgcaccagttggcaatgcaacagtctcattttcccatgacgcatggcaacaccggattcagtggcattgaatccagctctccagaggtgaaaggctattgggcaggtttggatgcatctgctcagactacttctcatgaactcaccattccaaacgatttgattggctgcataatcgggcgtcaaggcgccaaaatcaatgagatccgtcagatgtctggggcgcagatcaaaattgcgaacccagtggaaggatctactgataggcaggttaccatcactggatctgctgccagcattagcctggctcaatatctaatcaatgttttagaaaacgctaaaccctcctcccaggcagcctccgtcacgatccctgatcacctcagcatcaacctctctcaaccctccaccccttcttcttcttcctcctccaccaccaccccctcgctcgccacagcggggacctccgacgcaccctccagcctccccaaccctcttccgaccgccccttgtgtctccagtctgcttggcatgaaacccatccctctcctggctctaaatgttgtgtctgctgctaagggtaccggggcttcagctaccaccaccaccacctctgccgtgccatgtgtaactaacaaactgaaaggcgagaaacagagattctctccctactgattgcataccttgaggcacctcctccagtattattttgttcattttgttttcctttgttaacattggtgagaatgaaactattgtgagcttgttaccgtttcctttttactactttgggggataactgggtgggggtgggggagtggtaacccttgtttaggtttaggccatttcagctgagtgcctgtttcagggtctgacttgaattctttatctagagccacagttttctcttctttcttgtttgttacttttctttgtagctttattctgccttgcaatataacaatgtgttaggctctgtgttaatgaataaaagctgcttcgttaacttttttttttttttttaagaattatttaatggttaagctatcagcaggccttcttggccatatttgtgtttctagctgtaataaagttggcgcagtaagaaccttagtacactgtgtgctgtgaagggtaaagggttgggggcttgtgacttgtggctattcagctaggaagcctgtataactgacatgggctttttgaatcccaagtgaattttatagtcgtttgtcaatatttccacaaagagataacgagtctgtggcagtttagatcctgaaggtcctctgtaattggcaacaagcttcactagtgaggaagtttatctgacttctcagatggccttaccttgccagcagcagctaacaaggtgttcatcccaggattcctctggtgaatggttaccatgaggatctcttccaagtcatacattcaaagaacatacttctttacccagaatgaaggggaggggcaaagtgggataagtctaataaaattaggcagcttctgtctgcattcctctgaattagcattatgcctctttctgtgacattaggtatatctcagccaacccgtgacattatccacaacttgacatgatgccatccactagtcctaaaccaactctgtcaaccaagtttctttacccttttttctattcctggccgtatcctttctgctccccaccagcactatcaggagtaggaagtgacatgcttagatttggaaggaaccttaaggatcaactaatctgtaacacattgatcccctcattttacagattaaaaaatagaggccctaagataatttaaattcataggttatgagtgactagccaggactaacaacttaagctttacttttactcaatcgtactaacctccctgaaatcttgttcattttcttatactaagatgggcacaggcctctcataaaacagtagaaatgttcttagtatggtggtataaggcctctgatagccttccattcaacgagagtacacgttgccacagtgctgaaagtgtaatgctcttcccagggcattagagaactcagtgtagagatagtttccctgatgaccttttcccagcatcaccattggctgacaaaaaaaaa

SEQ ID NO: 351205 - DNA, 1301 bp, Homo sapiens
attcggcacaggcctcgcgtatatttcccctcagtcgcctcgcgcctgcagtttttggctttcacccccaaccagtgaccaaagacttgaccactcaaagtccagctccccagaacactgctcgacatggacaccggtgtgattgaaggtggattaaatgtcactctcaccatccggctacttatgcatggaaaggaagttggcagtatcatcggaaagaaaggagaatcagttaagaagatgcgcgaggagagtggtgcacgtatcaacatctcagaagggaattgtcctgagagaattatcactttggctggacccactaatgccatcttcaaagcctttgctatgatcattgacaaactggaagaggacataagcagctctatgaccaatagcacagctgccagtagacccccggtcaccctgaggctggtggtccctgctagtcagtgtggctctctcattggaaaaggtggatgcaagatcaaggaaatacgagagagtacaggggctcaggtccaggtggcaggggatatgctacccaactcaactgagcgggccatcactattgctggcattccacaatccatcattgagtgtgtcaaacagatctgcgtggtcatgttggagtcccagtcccccccgaagggcgtgaccatcccgtaccggcccaagccgtccagctctccggtcatctttgcaggtggtcaggacaggtacagcacaggcagcgacagtgcgagctttccccacaccaccccgtccatgtgcctcaaccctgacctggagggaccacctctagaggcctataccattcaaggacagtatgccattccacagccagatttgaccaagctgcaccagttggcaatgcaacagtctcattttcccatgacgcatggcaacaccggattcagtggcattgaatccagctctccagaggtgaaaggctattgggcaggtttggatgcatctgctcagactacttctcatgaactcaccattccaaacgatttgattggctgcataatcgggcgtcaaggcgccaaaatcaatgagatccgtcagatgtctggggcgcagatcaaaattgcgaacccagtggaaggatctactgataggcaggttaccatcactggatctgctgccagcattagcctggctcaatatctaatcaatgtcaggctttcctcggagacgggtggcatggggagcagctagaacaatgcagattcatccataatccctttctgctgttctccacatctcctcatgatgatgccaccatcaatgttcccaca

SEQ ID NO: 351206 - DNA, 2441 bp, Homo sapiens
attcggcacaggcctcgcgtatatttcccctcagtcgcctcgcgcctgcagtttttggctttcacccccaaccagtgaccaaagacttgaccactcaaagtccagctccccagaacactgctcgacatggacaccggtgtgattgaaggtggattaaatgtcactctcaccatccggctacttatgcatggaaaggaagttggcagtatcatcggaaagaaaggagaatcagttaagaagatgcgcgaggagagtggtgcacgtatcaacatctcagaagggaattgtcctgagagaattatcactttggctggacccactaatgccatcttcaaagcctttgctatgatcattgacaaactggaagaggacataagcagctctatgaccaatagcacagctgccagtagacccccggtcaccctgaggctggtggtccctgctagtcagtgtggctctctcattggaaaaggtggatgcaagatcaaggaaatacgagagagtacaggggctcaggtccaggtggcaggggatatgctacccaactcaactgagcgggccatcactattgctggcattccacaatccatcattgagtgtgtcaaacagatctgcgtggtcatgttggagtcccagtcccccccgaagggcgtgaccatcccgtaccggcccaagccgtccagctctccggtcatctttgcaggtggtcaggacaggtacagcacaggcagcgacagtgcgagctttccccacaccaccccgtccatgtgcctcaaccctgacctggagggaccacctctagaggcctataccattcaaggacagtatgccattccacagccagatttgaccaagctgcaccagttggcaatgcaacagtctcattttcccatgacgcatggcaacaccggattcagtggtatggatacctcagtgtttatttctgtaaggtgtagtgcaagagagaggccagtcccaaggtctcagcttgacatctgtttaaaacaaacttcgttatccagcatcctgctggtttaaacttgcctgtctactatggctaagcccaaggaggtaatgtgtttgttaacgtggttttcatttggggtcagttattctaaaagaaaaaaaaagccctggaaggtttgggggtgaggtttggggatgcttgtcaggcaaagggtaggctgatatttctttgagcccatcctgactgctgcccccttgatctgatcagcaccccctttctctccaccagcaattcacaggcttgggtagagaccatccatttgtgccaaattgtgtagtgttttttttgtttttgtttttgtttttattttgtttcgtttttggggcttttctgtataaggaataacttgtccgatagggttaggatgagaccaccaaactcattttcacttgtatcttaacaggcattgaatccagctctccagaggtgaaaggctattggggtaatgattaaaaaaaaaaaaatctgtagtattctactgttatattaataaactggtgggagtcttgtttcactgcccatgaaccataccagcaacatgcacatggcagagaggagctgagagagcaaaggggtgggcctggagcccccgagggtcccttgatggatctggccaacccccttctaaaaatgatgagacagcagccatagctgagatcaggactaagcttgagtgttagccagctggcctggttcagtccaggtgttgttaaagatgggtacgggtatttgctgatgggatttttttttctttctttttctttggaaaacaaaatgaaagccagaacaaaattattgaacaaaagacagggactaaatctggagaaatgaagtcccctcacctgactgccatttcattctatctgaccttccagtctaggttaggagaatagggggtggaggggattaatctgatacaggtatatttaaagcaactctgcatgtgtgccagaagtccatggtacccattaacaggcataatattggcactggtgctagtgagcatcaggtgagatacaatttggaacacaacaggaaaggggtagaagtacagaaggacttgtttagacattggtcctttttgaggataccacactcccttgcccttgcttccatcccccatccctaataggctgggctttgcaggaaatggcatgaaatcagctcttctgagtgtacagaagaacctttcgagcattatttctacacccttctcccccactctttcctctttggaggcttccaagttagtgatgaatcccaacagctaatgatgctgggtttccagtttatttccttctgttagtttaatctccagacccactgagacacggatctggctatgaatatgcttgcggtcttccgtgccttcgctgtacactggaatcgctacgacagatacaggattcacgcc

SEQ ID NO: 351207 - DNA, 2232 bp, Homo sapiens
attcggcacaggcctcgcgtatatttcccctcagtcgcctcgcgcctgcagtttttggctttcacccccaaccagtgaccaaagacttgaccactcaaagtccagctccccagaacactgctcgacatggacaccggtgtgattgaaggtggattaaatgtcactctcaccatccggctacttatgcatggaaaggaagttggcagtatcatcggaaagaaaggagaatcagttaagaagatgcgcgaggagagtggtgcacgtatcaacatctcagaagggaattgtcctgagagaattatcactttggctggacccactaatgccatcttcaaagcctttgctatgatcattgacaaactggaagaggacataagcagctctatgaccaatagcacagctgccagtagacccccggtcaccctgaggctggtggtccctgctagtcagtgtggctctctcattggaaaaggtggatgcaagatcaaggaaatacgagagagtacaggggctcaggtccaggtggcaggggatatgctacccaactcaactgagcgggccatcactattgctggcattccacaatccatcattgagtgtgtcaaacagatctgcgtggtcatgttggagtcccagtcccccccgaagggcgtgaccatcccgtaccggcccaagccgtccagctctccggtcatctttgcaggtggtcaggacaggtacagcacaggcagcgacagtgcgagctttccccacaccaccccgtccatgtgcctcaaccctgacctggagggaccacctctagaggcctataccattcaaggacagtatgccattccacagccagatttgaccaagctgcaccagttggcaatgcaacagtctcattttcccatgacgcatggcaacaccggattcagtggtatggatacctcagtgtttatttctgtaaggtgtagtgcaagagagaggccagtcccaaggtctcagcttgacatctgtttaaaacaaacttcgttatccagcatcctgctggtttaaacttgcctgtctactatggctaagcccaaggaggtaatgtgtttgttaacgtggttttcatttggggtcagttattctaaaagaaaaaaaaagccctggaaggtttgggggtgaggtttggggatgcttgtcaggcaaagggtaggctgatatttctttgagcccatcctgactgctgcccccttgatctgatcagcaccccctttctctccaccagcaattcacaggcttgggtagagaccatccatttgtgccaaattgtgtagtgttttttttgtttttgtttttgtttttattttgtttcgtttttggggcttttctgtataaggaataacttgtccgatagggttaggatgagaccaccaaactcattttcacttgtatcttaacaggcattgaatccagctctccagaggtgaaaggctattggggtaatgattaaaaaaaaaaaaatctgtagtattctactgttatattaataaactggtgggagtcttgtttcactgcccatgaaccataccagcaacatgcacatggcagagaggagctgagagagcaaaggggtgggcctggagcccccgagggtcccttgatggatctggccaacccccttctaaaaatgatgagacagcagccatagctgagatcaggactaagcttgagtgttagccagctggcctggttcagtccaggtgttgttaaagatgggtacgggtatttgctgatgggatttttttttctttctttttctttggaaaacaaaatgaaagccagaacaaaattattgaaccattctatctgaccttccagtctaggttaggagaatagggggtggaggggattaatctgatacaggtatatttaaagcaactctgcatgtgtgccagaagtccatggtacccattaacaggcataatattggcactggtgctagtgagcatcaggtgagatacaatttggaacacaacaggaaaggggtagaagtacagaaggacttgtttagacattggtcctttttgaggataccacactcccttgcccttgcttccatcccccatccctaataggctgggctttgcaggaaatggcatgaaatcagctcttctgagtgtacagaagaacctttcgagcattatttctacacccttctcccccactcttccccttcttctcttctcaggatcctctagagca

SEQ ID NO: 351208 - DNA, 1975 bp, Homo sapiens
attcggcacaggcctcgcgtatatttcccctcagtcgcctcgcgcctgcagtttttggctttcacccccaaccagtgaccaaagacttgaccactcaaagtccagctccccagaacactgctcgacatggacaccggtgtgattgaaggtggattaaatgtcactctcaccatccggctacttatgcatggaaaggaagttggcagtatcatcggaaagaaaggagaatcagttaagaagatgcgcgaggagagtggtgcacgtatcaacatctcagaagggaattgtcctgagagaattatcactttggctggacccactaatgccatcttcaaagcctttgctatgatcattgacaaactggaagaggacataagcagctctatgaccaatagcacagctgccagtagacccccggtcaccctgaggctggtggtccctgctagtcagtgtggctctctcattggaaaaggtggatgcaagatcaaggaaatacgagagagtacaggggctcaggtccaggtggcaggggatatgctacccaactcaactgagcgggccatcactattgctggcattccacaatccatcattgagtgtgtcaaacagatctgcgtggtcatgttggagtcccagtcccccccgaagggcgtgaccatcccgtaccggcccaagccgtccagctctccggtcatctttgcaggtggtcaggacaggtacagcacaggcagcgacagtgcgagctttccccacaccaccccgtccatgtgcctcaaccctgacctggagggaccacctctagaggcctataccattcaaggacagtatgccattccacagccagatttgaccaagctgcaccagttggcaatgcaacagtctcattttcccatgacgcatggcaacaccggattcagtggtatggatacctcagtgtttatttctgtaaggtgtagtgcaagagagaggccagtcccaaggtctcagcttgacatctgtttaaaacaaacttcgttatccagcatcctgctggtttaaacttgcctgtctactatggctaagcccaaggaggtaatgtgtttgttaacgtggttttcatttggggtcagttattctaaaagaaaaaaaaagccctggaaggtttgggggtgaggtttggggatgcttgtcaggcaaagggtaggctgatatttctttgagcccatcctgactgctgcccccttgatctgatcagcaccccctttctctccaccagcaattcacaggcttgggtagagaccatccatttgtgccaaattgtgtagtgttttttttgtttttgtttttgtttttattttgtttcgtttttggggcttttctgtataaggaataacttgtccgatagggttaggatgagaccaccaaactcattttcacttgtatcttaacaggcattgaatccagctctccagaggtgaaaggctattggggtaatgattaaaaaaaaaaaaatctgtagtattctactgttatattaataaactggtgggagtcttgtttcactgcccatgaaccataccagcaacatgcacatggcagagaggagctgagagagcaaaggggtgggcctggagcccccgagggtcccttgatggatctggccaacccccttctaaaaatgatgagacagcagccatagctgagatcaggactaagcttgagtgttagccagctggcctggttcagtccaggtgttgttaaagatgggtacgggtatttgctgatgggatttttttttctttctttttctttggaaaacaaaatgaaagccagaacaaaattattgaacaaaagacagggactaaatctggagaaatgaagtcccctcacctgactgccatttcattctatctgaccttccagtctaggttaggagaatagggggtggaggggattaatctgatacaggtattgaagctcatggtgctagctctct

SEQ ID NO: 351209 - DNA, 863 bp, Homo sapiens
attcggcacaggcctcgcgtatatttcccctcagtcgcctcgcgcctgcagtttttggctttcacccccaaccagtgaccaaagacttgaccactcaactgagcgggccatcactattgctggcattccacaatccatcattgagtgtgtcaaacagatctgcgtggtcatgttggagtcccagtcccccccgaagggcgtgaccatcccgtaccggcccaagccgtccagctctccggtcatctttgcaggtggtcaggcctataccattcaaggacagtatgccattccacagccagatttgaccaagctgcaccagttggcaatgcaacagtctcattttcccatgacgcatggcaacaccggattcagtggcattgaatccagctctccagaggtgaaaggctattgggcaggtttggatgcatctgctcagactacttctcatgaactcaccattccaaacgatttgattggctgcataatcgggcgtcaaggcgccaaaatcaatgagatccgtcagatgtctggggcgcagatcaaaattgcgaacccagtggaaggatctactgataggcaggttaccatcactggatctgctgccagcattagcctggctcaatatctaatcaatgtcaggctttcctcggagacgggtggcatggggagcagctagaacaatgcagattcatccataatccctttctgctgttcaccaccacccatgatccatctgtgtagtttctgaacagtcagcgattccaggttttaaatagtttgtaaattttcagtttctacacactttatcatccactcgtgattttttaattaaagcgttttaattcctttctctgttcagctgt

SEQ ID NO: 351210 - DNA, 1977 bp, Homo sapiens
attcggcacaggcctcgcgtatatttcccctcagtcgcctcgcgcctgcagtttttggctttcacccccaaccagtgaccaaagacttgaccactcaactgagcgggccatcactattgctggcattccacaatccatcattgagtgtgtcaaacagatctgcgtggtcatgttggagtcccagtcccccccgaagggcgtgaccatcccgtaccggcccaagccgtccagctctccggtcatctttgcaggtggtcaggcctataccattcaaggacagtatgccattccacagccagatttgaccaagctgcaccagttggcaatgcaacagtctcattttcccatgacgcatggcaacaccggattcagtggcattgaatccagctctccagaggtgaaaggctattgggcaggtttggatgcatctgctcagactacttctcatgaactcaccattccaaacgatttgattggctgcataatcgggcgtcaaggcgccaaaatcaatgagatccgtcagatgtctggggcgcagatcaaaattgcgaacccagtggaaggatctactgataggcaggttaccatcactggatctgctgccagcattagcctggctcaatatctaatcaatgtcaggctttcctcggagacgggtggcatggggagcagctagaacaatgcagattcatccataatccctttctgctgttcaccaccacccatgatccatctgtgtagtttctgaacagtcagcgattccaggttttaaatagtttgtaaattttcagtttctacacactttatcatccactcgtgattttttaattaaagcgttttaattcctttctctgttcagctgttgatgctgagatccatatttagttttataagcttctccctggtttttttttttttttggttttttttttttggctcatgaatttttctgtttgtcatggaaatgtaagagtggaatattaatacatttcagtttagttctgtaatgtcaggaatttttcaaaaaaattaaaagatggactggagctttttctttgtgaatagaaactggatgccacagtgattcatgtgggttttattcctcttgtcttgctgttatttttgtaccttttatccctcaaaggacccttcttgggttttgaatggaagcctttattccggttaagatgttttcttctattttaccacttccatctttttttgtggccctcgatcctatttttccctgactccatgcttggttggcccttataaaacttgtgcccaaaagattgaggattagactttccgaggacttacctgtcctaggggagtaggcaagcacttccactagggagggggtgggggaaaggaatgacacatgacatacatggcatacacattaagcagttgatcatatgtctgactgggttccagtttcttgggaatgttggtccccttgttcaggcttgcatattttaaactaaaaatttcagtctattgtttttagtaacttcatttatagtcctccataacaagttagaaggatgtatctgctaccatttattcctataattttagaaagttggggcttgacattatactcatttagtgagagtagatgcaaaaaagtggaggggcaggagaacttctccagacacctcagataaagtccggagcccaaggctttatcttaaccatgtatggtaccccattcattcatcaagaaaaccctcaacagctgggcctgcatggagtgttatatttcaaggtttttcacaggggttacagtaggacagtccccaccccaatcaggcaccaggataaaagcagggacttaaacagcaccccggttcttcagcctgagccatcacatgctatcagtctcctaacctccccctgggccttaagacagggcttgggcagagaagataaatggtgggacaaaaaaatgagttacattgccacctgagaaac

SEQ ID NO: 351211 - DNA, 1297 bp, Homo sapiens
attcggcacaggcctcgcgtatatttcccctcagtcgcctcgcgcctgcagtttttggctttcacccccaaccagtgaccaaagacttgaccactcaaagtccagctccccagaacactgctcgacatggacaccggtgtgattgaaggtggattaaatgtcactctcaccatccggctacttatgcatggaaaggaagttggcagtatcatcggaaagaaaggagaatcagttaagaagatgcgcgaggagagtggtgcacgtatcaacatctcagaagggaattgtcctgagagaattatcactttggctggacccactaatgccatcttcaaagcctttgctatgatcattgacaaactggaagaggacataagcagctctatgaccaatagcacagctgccagtagacccccggtcaccctgaggctggtggtccctgctagtcagtgtggctctctcattggaaaaggtggatgcaagatcaaggaaatacgagagagtacaggggctcaggtccaggtggcaggggatatgctacccaactcaactgagcgggccatcactattgctggcattccacaatccatcattgagtgtgtcaaacagatctgcgtggtcatgttggagtcccagtcccccccgaagggcgtgaccatcccgtaccggcccaagccgtccagctctccggtcatctttgcaggtggtcaggacaggtacagcacaggcagcgacagtgcgagctttccccacaccaccccgtccatgtgcctcaaccctgacctggagggaccacctctagaggcctataccattcaaggacagtatgccattccacagccagatttgaccaagctgcaccagttggcaatgcaacagtctcattttcccatgacgcatggcaacaccggattcagtggtatggatacctcagtgtttatttctgtaaggtgtagtgcaagagagaggccagtcccaaggtctcagcttgacatctgtttaaaacaaacttcgttatccagcatcctgctggtttaaacttgcctgtctactatggctaagcccaaggaggtaatgtgtttgttaacgtggttttcatttggggtcagttattctaaaagaaaaaaataggctgatatttctttgagcccatcctgactgctgcccccttgatctgatcagcaccccctttctctccaccagcaattcacaggcttgggtagagaccatccatttgtgccaaattgtgtagtggtttttttggttttggttttgtgtttattttggttcggttttg

SEQ ID NO: 351212 - DNA, 1938 bp, Homo sapiens
attcggcacaggcctcgcgtatatttcccctcagtcgcctcgcgcctgcagtttttggctttcacccccaaccagtgaccaaagacttgaccactcaactgagcgggccatcactattgctggcattccacaatccatcattgagtgtgtcaaacagatctgcgtggtcatgttggagtcccagtcccccccgaagggcgtgaccatcccgtaccggcccaagccgtccagctctccggtcatctttgcaggtggtcaggcctataccattcaaggacagtatgccattccacagccagatttgaccaagctgcaccagttggcaatgcaacagtctcattttcccatgacgcatggcaacaccggattcagtgcaggtttggatgcatctgctcagactacttctcatgaactcaccattccaaacgatttgattggctgcataatcgggcgtcaaggcgccaaaatcaatgagatccgtcagatgtctggggcgcagatcaaaattgcgaacccagtggaaggatctactgataggcaggttaccatcactggatctgctgccagcattagcctggctcaatatctaatcaatgtcaggctttcctcggagacgggtggcatggggagcagctagaacaatgcagattcatccataatccctttctgctgttcaccaccacccatgatccatctgtgtagtttctgaacagtcagcgattccaggttttaaatagtttgtaaattttcagtttctacacactttatcatccactcgtgattttttaattaaagcgttttaattcctttctctgttcagctgttgatgctgagatccatatttagttttataagcttctccctggtttttttttttttttggttttttttttttggctcatgaatttttctgtttgtcatggaaatgtaagagtggaatattaatacatttcagtttagttctgtaatgtcaggaatttttcaaaaaaattaaaagatggactggagctttttctttgtgaatagaaactggatgccacagtgattcatgtgggttttattcctcttgtcttgctgttatttttgtaccttttatccctcaaaggacccttcttgggttttgaatggaagcctttattccggttaagatgttttcttctattttaccacttccatctttttttgtggccctcgatcctatttttccctgactccatgcttggttggcccttataaaacttgtgcccaaaagattgaggattagactttccgaggacttacctgtcctaggggagtaggcaagcacttccactagggagggggtgggggaaaggaatgacacatgacatacatggcatacacattaagcagttgatcatatgtctgactgggttccagtttcttgggaatgttggtccccttgttcaggcttgcatattttaaactaaaaatttcagtctattgtttttagtaacttcatttatagtcctccataacaagttagaaggatgtatctgctaccatttattcctataattttagaaagttggggcttgacattatactcatttagtgagagtagatgcaaaaaagtggaggggcaggagaacttctccagacacctcagataaagtccggagcccaaggctttatcttaaccatgtatggtaccccattcattcatcaagaaaaccctcaacagctgggcctgcatggagtgttatatttcaaggtttttcacaggggttacagtaggacagtccccaccccaatcaggcaccaggataaaagcagggacttaaacagcaccccggttcttcagcctgagccatcacatgctatcagtctcctaacctccccctgggccttaagacagggcttgggcagagaagataaatggtgggacaaaaaaatgagttacattgccacctgagaaac

SEQ ID NO: 351213 - DNA, 824 bp, Homo sapiens
attcggcacaggcctcgcgtatatttcccctcagtcgcctcgcgcctgcagtttttggctttcacccccaaccagtgaccaaagacttgaccactcaactgagcgggccatcactattgctggcattccacaatccatcattgagtgtgtcaaacagatctgcgtggtcatgttggagtcccagtcccccccgaagggcgtgaccatcccgtaccggcccaagccgtccagctctccggtcatctttgcaggtggtcaggcctataccattcaaggacagtatgccattccacagccagatttgaccaagctgcaccagttggcaatgcaacagtctcattttcccatgacgcatggcaacaccggattcagtgcaggtttggatgcatctgctcagactacttctcatgaactcaccattccaaacgatttgattggctgcataatcgggcgtcaaggcgccaaaatcaatgagatccgtcagatgtctggggcgcagatcaaaattgcgaacccagtggaaggatctactgataggcaggttaccatcactggatctgctgccagcattagcctggctcaatatctaatcaatgtcaggctttcctcggagacgggtggcatggggagcagctagaacaatgcagattcatccataatccctttctgctgttcaccaccacccatgatccatctgtgtagtttctgaacagtcagcgattccaggttttaaatagtttgtaaattttcagtttctacacactttatcatccactcgtgattttttaattaaagcgttttaattcctttctctgttcagctgt

SEQ ID NO: 351214 - DNA, 873 bp, Homo sapiens
attcggcacaggcctcgcgtatatttcccctcagtcgcctcgcgcctgcagtttttggctttcacccccaaccagtgaccaaagacttgaccactcaactgagcgggccatcactattgctggcattccacaatccatcattgagtgtgtcaaacagatctgcgtggtcatgttggagtcccagtcccccccgaagggcgtgaccatcccgtaccggcccaagccgtccagctctccggtcatctttgcaggtggtcagttgaccaagctgcaccagttggcaatgcaacagtctcattttcccatgacgcatggcaacaccggattcagtggcattgaatccagctctccagaggtgaaaggctattgggcaggtttggatgcatctgctcagactacttctcatgaactcaccattccaaacgatttgattggctgcataatcgggcgtcaaggcgccaaaatcaatgagatccgtcagatgtctggggcgcagatcaaaattgcgaacccagtggaaggatctactgataggcaggttaccatcactggatctgctgccagcattagcctggctcaatatctaatcaatgtcaggctttcctcggagacgggtggcatggggagcagctagaacaatgcagattcatccataatccctttctgctgttcaccaccacccatgatccatctgtgtagtttctgaacagtcagcgattccaggttcaaatacgctgggaatttcaggtctccacccttttagtcccaccggatgcaccaaaccggtaatccttcgggtaggtggaaccgcaccactaaaggtgaaaggccggtgcagggatatgacaaaggacacaaaaaaaggaacgacag

SEQ ID NO: 351215 - DNA, 693 bp, Homo sapiens
attcggcacaggcctcgcgtatatttcccctcagtcgcctcgcgcctgcagtttttggctttcacccccaaccagtgaccaaagacttgaccactcaactgagcgggccatcactattgctggcattccacaatccatcattgagtgtgtcaaacagatctgcgtggtcatgttggagtcccagtcccccccgaagggcgtgaccatcccgtaccggcccaagccgtccagctctccggtcatctttgcaggtggtcaggcctataccattcaaggacagtatgccattccacagccagatttgaccaagctgcaccagttggcaatgcaacagtctcattttcccatgacgcatggcaacaccggattcagtggtatggatacctcagtgtttatttctgtaaggtgtagtgcaagagagaggccagtcccaaggtctcagcttgacatctgtttaaaacaaacttcgttatccagcatcctgctggtttaaacttgcctgtctactatggctaagcccaaggaggtaatgtgtttgttaacgtggttttcatttggggtcagttattctaaaagaaaaaaacactacacaatttggcacaaatggatggtctctacccaagcctgtgaattgctggtggagagacagggggtgctgatcagatcaagggggcaccaatcaggatgggctcc

SEQ ID NO: 351216 - DNA, 1875 bp, Homo sapiens
gcctccgataagggcctgaaggggctgtcgcgctcctggcggtgtgataaggagggcggggggaggccgcgggaaggcgtcggggtttgaggtccccgcctggcgacccgggatcggggcaggaaaggcggctgggcggggagagggcggggcggggcgtctggcttggccacgcccaccgtcatccggggtcctggcccgctaagatggcgatggctgcggtagcagcggcggcggctgttgcctggcccggtaccctggggacgggggccgagtagcgccttccccgggccccgtgaaccggctgcgggtcgcccttggggggcagcggccgcagccccccacctgggccctcggtccgccctcccggcgcgtccatgaactcagtgtcgccggccgccgcgcagtaccggagcagcagcccggaggacgcgcgccgccggcccgaggcccgcaggccgcggggtcccagaggcccagaccccaacggcctggggccttccggagccagcggccccgctcttggctctcccggggctggcccgagtgagccggacgaagtggacaagttcaaggccaagttcctgacagcctggaacaacgtcaagtacggttgggtggttaaaagccggaccagctttagcaagatctccagcatccacctctgtggccgccgctaccgtttcgagggcgagggtgacatacagcgtttccagcgggactttgtgtcccgcctgtggctcacataccgccgggacttcccgccccttcctgggggctgcctgacctcggactgtggctgggggtgcatgttacgcagcggccagatgatgctggcacagggccttctgctgcatttcctgcccagaggaaagccgtggagagctgctccgacgtcacccgcctggtggtgtacgtttctcaggactgcacagtgtacaaggcggatgtggcacgcctggtggccaggccagaccccacagccgagtggaagtctgtggtcatcctggtgcccgtgcgactgggtggcgagactctcaaccccgtgtatgtgccctgcgtgaaggaactcctgcgttgcgagctgtgcctgggcatcatgggtgggaaaccgcgacactcactgtacttcattggctaccaagatgacttcctgctgtacctggaccctcactactgccagcccactgtggatgtcagccaggccgacttccccctggagtccttccactgcacctcgccccgcaagatggcctttgccaagatggacccaagctgtaccgtgggcttctatgctggagacaggaaggagtttgagacactctgctcagagctgaccagggtcctcagctcctcctcagccacagagcggtaccccatgttcaccctggccgagggccatgctcaggaccacagcctggacgacctctgctcccagctcgcccagcccacactccggctccctcgcacagggcggctcctcagggccaaacgccccagctctgaggactttgtgtttttataaagggaggggatgaggggaaagatacaacactatttatttttttatttatgtcatgtcgggtgtgggatcttgagctctggcagtgatgatggtacttcctgttgtcagcccctcaagcccagctgcaaccagtctggggccattcagccagggacagagcccacagagcccatacacctgtctcccaccagcggggccctcctggcagggtagggaaggaggaccccgggcacccccctcagggcctgactcacgtactgtagtttgcactggacgcccgggccctccctgtcccaaagcccccttgggggaactgtggctgctgggggccaataaagctgtgtaacttg

SEQ ID NO: 351217 - DNA, 2267 bp, Homo sapiens
gcctccgataagggcctgaaggggctgtcgcgctcctggcggtgtgataaggagggcggggggaggccgcgggaaggcgtcggggtttgaggtccccgcctggcgacccgggatcggggcaggaaaggcggctgggcggggagagggcggggcggggcgtctggcttggccacgcccaccgtcatccggggtcctggcccgctaagatggcgatggctgcggtagcagcggcggcggctgttgcctggcccggtaccctggggacgggggccgagtagcgccttccccgggccccgtgaaccggctgcgggtcgcccttggggggcagcggccgcagccccccacctgggccctcggtccgccctcccggcgcgtccatgaactcagtgtcgccggccgccgcgcagtaccggagcagcagcccggaggacgcgcgccgccggcccgaggcccgcaggccgcggggtcccagaggcccagaccccaacggcctggggccttccggagccagcggccccgctcttggctctcccggggctggcccgagtgagccggacgaagtggacaagttcaaggccaagttcctgacagcctggaacaacgtcaagtacggttgggtggttaaaagccggaccagctttagcaagatctccagcatccacctctgtggccgccgctaccgtttcgagggcgagggtgacatacagcgtttccagcgggactttgtgtcccgcctgtggctcacataccgccgggacttcccgccccttcctgggggctgcctgacctcggactgtggctgggggtgcatgttacgcagcggccagatgatgctggcacagggccttctgctgcatttcctgcccagagactggacatgggccgagggcatgggcctgggcccccctgagctgtcagggtcagcctctcccagccggtaccatgggcctgcccgctggatgcccccacgctgggcccagggtgcccctgagctggagcaggaacgccggcaccggcagattgtgtcctggttcgccgaccacccccgggccccctttggcctacaccggctggtggagcttgggcagagctcaggcaagaaggcaggtgactggaaagccgtggagagctgctccgacgtcacccgcctggtggtgtacgtttctcaggactgcacagtgtacaaggcggatgtggcacgcctggtggccaggccagaccccacagccgagtggaagtctgtggtcatcctggtgcccgtgcgactgggtggcgagactctcaaccccgtgtatgtgccctgcgtgaaggaactcctgcgttgcgagctgtgcctgggcatcatgggtgggaaaccgcgacactcactgtacttcattggctaccaagatgacttcctgctgtacctggaccctcactactgccagcccactgtggatgtcagccaggccgacttccccctggagtccttccactgcacctcgccccgcaagatggcctttgccaagatggacccaagctgtaccgtgggcttctatgctggagacaggaaggagtttgagacactctgctcagagctgaccagggtcctcagctcctcctcagccacagagcggtaccccatgttcaccctggccgagggccatgctcaggaccacagcctggacgacctctgctcccagctcgcccagcccacactccggctccctcgcacagggcggctcctcagggccaaacgccccagctctgaggactttgtgtttttataaagggaggggatgaggggaaagatacaacactatttatttttttatttatgtcatgtcgggtgtgggatcttgagctctggcagtgatgatggtacttcctgttgtcagcccctcaagcccagctgcaaccagtctggggccattcagccagggacagagcccacagagcccatacacctgtctcccaccagcggggccctcctggcagggtagggaaggaggaccccgggcacccccctcagggcctgactcacgtactgtagtttgcactggacgcccgggccctccctgtcccaaagcccccttgggggaactgtggctgctgggggccaataaagctgtgtaacttgatcgtgggtgtggctgggcgcagcgttctgaggggatgtggggtctgggaggtgtctcgaggtgagagctccaagtcacgggaagtttaagtcagcctcagtttccacatccataaaatgggacgacttccttacccacagctacacg

SEQ ID NO: 351218 - DNA, 1958 bp, Homo sapiens
gcctccgataagggcctgaaggggctgtcgcgctcctggcggtgtgataaggagggcggggggaggccgcgggaaggcgtcggggtttgaggtccccgcctggcgacccgggatcggggcaggaaaggcggctgggcggggagagggcggggcggggcgtctggcttggccacgcccaccgtcatccggggtcctggcccgctaagatggcgatggctgcggtagcagcggcggcggctgttgcctggcccggtaccctggggacgggggccgagtagcgccttccccgggccccgtgaaccggctgcgggtcgcccttggggggcagcggccgcagccccccacctgggccctcggtccgccctcccggcgcgtccatgaactcagtgtcgccggccgccgcgcagtaccggagcagcagcccggaggacgcgcgccgccggcccgaggcccgcaggccgcggggtcccagaggcccagaccccaacggcctggggccttccggagccagcggccccgctcttggctctcccggggctggcccgagtgagccggacgaagtggacaagttcaaggccaagttcctgacagcctggaacaacgtcaagtacggttgggtggttaaaagccggaccagctttagcaagatctccagcatccacctctgtggccgccgctaccgtttcgagggcgagggtgacatacagcgtttccagcgggactttgtgtcccgcctgtggctcacataccgccgggacttcccgccccttcctgggggctgcctgacctcggactgtggctgggggtgcatgttacgcagcggccagatgatgctggcacagggccttctgctgcatttcctgcccagagtgtacaaggcggatgtggcacgcctggtggccaggccagaccccacagccgagtggaagtctgtggtcatcctggtgcccgtgcgactgggtggcgagactctcaaccccgtgtatgtgccctgcgtgaaggaactcctgcgttgcgagctgtgcctgggcatcatgggtgggaaaccgcgacactcactgtacttcattggctaccaagatgacttcctgctgtacctggaccctcactactgccagcccactgtggatgtcagccaggccgacttccccctggagtccttccactgcacctcgccccgcaagatggcctttgccaagatggacccaagctgtaccgtgggcttctatgctggagacaggaaggagtttgagacactctgctcagagctgaccagggtcctcagctcctcctcagccacagagcggtaccccatgttcaccctggccgagggccatgctcaggaccacagcctggacgacctctgctcccagctcgcccagcccacactccggctccctcgcacagggcggctcctcagggccaaacgccccagctctgaggactttgtgtttttataaagggaggggatgaggggaaagatacaacactatttatttttttatttatgtcatgtcgggtgtgggatcttgagctctggcagtgatgatggtacttcctgttgtcagcccctcaagcccagctgcaaccagtctggggccattcagccagggacagagcccacagagcccatacacctgtctcccaccagcggggccctcctggcagggtagggaaggaggaccccgggcacccccctcagggcctgactcacgtactgtagtttgcactggacgcccgggccctccctgtcccaaagcccccttgggggaactgtggctgctgggggccaataaagctgtgtaacttgatcgtgggtgtggctgggcgcagcgttctgaggggatgtggggtctgggaggtgtctcgaggtgagagctccaagtcacgggaagtttaagtcagcctcagtttccacatccataaaatgggacgacttccttacccacagctacacg

SEQ ID NO: 351219 - DNA, 1717 bp, Homo sapiens
gcctccgataagggcctgaaggggctgtcgcgctcctggcggtgtgataaggagggcggggggaggccgcgggaaggcgtcggggtttgaggtccccgcctggcgacccgggatcggggcaggaaaggcggctgggcggggagagggcggggcggggcgtctggcttggccacgcccaccgtcatccggggtcctggcccgctaagatggcgatggctgcggtagcagcggcggcggctgttgcctggcccggtaccctggggacgggggccgagtagcgccttccccgggccccgtgaaccggctgcgggtcgcccttggggggcagcggccgcagccccccacctgggccctcggtccgccctcccggcgcgtccatgaactcagtgtcgccggccgccgcgcagtaccggagcagcagcccggaggacgcgcgccgccggcccgaggcccgcaggccgcggggtcccagaggcccagaccccaacggcctggggccttccggagccagcggccccgctcttggctctcccggggctggcccgagtgagccggacgaagtggacaagttcaaggccaagttcctgacagcctggaacaacgtcaagtacggttgggtggttaaaagccggaccagctttagcaagatctccagcatccacctctgtggccgccgctaccgtttcgagggcgagggtgacatacagcgtttccagcgggactttgtgtcccgcctgtggctcacataccgccgggacttcccgccccttcctgggggctgcctgacctcggactgtggctgggggtgcatgttacgcagcggccagatgatgctggcacagggccttctgctgcatttcctgcccagagactggacatgggccgagggcatgggcctgggcccccctgagctgtcagggtcagcctctcccagccggtaccatgggcctgcccgctggatgcccccacgctgggcccagggtgcccctgagctggagcaggaacgccggcaccggcagattgtgtcctggttcgccgaccacccccgggccccctttggcctacaccggctggtggagcttgggcagagctcaggcaagaaggcaggtgactggtatgggccatcgctagtggcacacatcctcaggaaagccgtggagagctgctccgacgtcacccgcctggtggtgtacgtttctcaggactgcacagtgtacaaggcggatgtggcacgcctggtggccaggccagaccccacagccgagtggaagtctgtggtcatcctggtgcccgtgcgactgggtggcgagactctcaaccccgtgtatgtgccctgcgtgaaggaactcctgcgttgcgagctgtgcctgggcatcatgggtgggaaaccgcgacactcactgtacttcattggctaccaagatgacttcctgctgtacctggaccctcactactgccagcccactgtggatgtcagccaggccgacttccccctggagtccttccactgcagctcgcccctgagttctgcaaactcaggggcgagctgctgtttgtccactgcatttatgttggctccagcctgcagcagcacatggcagatctccacggagcccctctcgggcggctgcatgcatggggcgtgcgtcctctgctctgcatgtcgctctcgcgaatatgagctccatcctgcctatcagcctcagactcactcatt

SEQ ID NO: 351220 - DNA, 1370 bp, Homo sapiens
gcctccgataagggcctgaaggggctgtcgcgctcctggcggtgtgataaggagggcggggggaggccgcgggaaggcgtcggggtttgaggtccccgcctggcgacccgggatcggggcaggaaaggcggctgggcggggagagggcggggcggggcgtctggcttggccacgcccaccgtcatccggggtcctggcccgctaagatggcgatggctgcggtagcagcggcggcggctgttgcctggcccggtaccctggggacgggggccgagtagcgccttccccgggccccgtgaaccggctgcgggtcgcccttggggggcagcggccgcagccccccacctgggccctcggtccgccctcccggcgcgtccatgaactcagtgtcgccggccgccgcgcagtaccggagcagcagcccggaggacgcgcgccgccggcccgaggcccgcaggccgcggggtcccagaggcccagaccccaacggcctggggccttccggagccagcggccccgctcttggctctcccactgtggatgtcagccaggccgacttccccctggagtccttccactgcacctcgccccgcaagatggcctttgccaagatggacccaagctgtaccgtgggcttctatgctggagacaggaaggagtttgagacactctgctcagagctgaccagggtcctcagctcctcctcagccacagagcggtaccccatgttcaccctggccgagggccatgctcaggaccacagcctggacgacctctgctcccagctcgcccagcccacactccggctccctcgcacagggcggctcctcagggccaaacgccccagctctgaggactttgtgtttttataaagggaggggatgaggggaaagatacaacactatttatttttttatttatgtcatgtcgggtgtgggatcttgagctctggcagtgatgatggtacttcctgttgtcagcccctcaagcccagctgcaaccagtctggggccattcagccagggacagagcccacagagcccatacacctgtctcccaccagcggggccctcctggcagggtagggaaggaggaccccgggcacccccctcagggcctgactcacgtactgtagtttgcactggacgcccgggccctccctgtcccaaagcccccttgggggaactgtggctgctgggggccaataaagctgtgtaacttgatcgtgggtgtggctgggcgcagcgttctgaggggatgtggggtctgggaggtgtctcgaggtgagagctccaagtcacgggaagtttaagtcagcctcagtttccacatccataaaatgggacgacttccttacccacagctacacg

SEQ ID NO: 351221 - DNA, 391 bp, Homo sapiens
ggccaaacgccccagctctgaggactttgtgtttttataaagggaggggatgaggggaaagatacaacactatttatttttttatttatgtcatgtcgggtgtgggatcttgagctctggcagtgatgatggtacttcctgttgtcagcccctcaagcccagctgcaaccagtctggggccattcagccagggacagagcccacagagcccatacacctgtctcccaccagcggggccctcctggcagggtagggaaggaggaccccgggcacccccctcagggcctgactcacgtactgtagtttgcactggacgcccgggccctccctgtcccaaagcccccttgggggaactgtggctgctgggggccaataaagctgtgtaacttga

SEQ ID NO: 351222 - DNA, 2300 bp, Homo sapiens
gcctccgataagggcctgaaggggctgtcgcgctcctggcggtgtgataaggagggcggggggaggccgcgggaaggcgtcggggtttgaggtccccgcctggcgacccgggatcggggcaggaaaggcggctgggcggggagagggcggggcggggcgtctggcttggccacgcccaccgtcatccggggtcctggcccgctaagatggcgatggctgcggtagcagcggcggcggctgttgcctggcccggtaccctggggacgggggccgagtagcgccttccccgggccccgtgaaccggctgcgggtcgcccttggggggcagcggccgcagccccccacctgggccctcggtccgccctcccggcgcgtccatgaactcagtgtcgccggccgccgcgcagtaccggagcagcagcccggaggacgcgcgccgccggcccgaggcccgcaggccgcggggtcccagaggcccagaccccaacggcctggggccttccggagccagcggccccgctcttggctctcccggggctggcccgagtgagccggacgaagtggacaagttcaaggccaagttcctgacagcctggaacaacgtcaagtacggttgggtggttaaaagccggaccagctttagcaagatctccagcatccacctctgtggccgccgctaccgtttcgagggcgagggtgacatacagcgtttccagcgggactttgtgtcccgcctgtggctcacataccgccgggacttcccgccccttcctgggggctgcctgacctcggactgtggctgggggtgcatgttacgcagcggccagatgatgctggcacagggccttctgctgcatttcctgcccagagactggacatgggccgagggcatgggcctgggcccccctgagctgtcagggtcagcctctcccagccggtaccatgggcctgcccgctggatgcccccacgctgggcccagggtgcccctgagctggagcaggaacgccggcaccggcagattgtgtcctggttcgccgaccacccccgggccccctttggcctacaccggctggtggagcttgggcagagctcaggcaagaaggcaggtgactggtatgggccatcgctagtggcacacatcctcaggaaagccgtggagagctgctccgacgtcacccgcctggtggtgtacgtttctcaggactgcacagtgtacaaggcggatgtggcacgcctggtggccaggccagaccccacagccgagtggaagtctgtggtcatcctggtgcccgtgcgactgggtggcgagactctcaaccccgtgtatgtgccctgcgtgaaggaactcctgcgttgcgagctgtgcctgggcatcatgggtgggaaaccgcgacactcactgtacttcattggctaccaagatgacttcctgctgtacctggaccctcactactgccagcccactgtggatgtcagccaggccgacttccccctggagtccttccactgcacctcgccccgcaagatggcctttgccaagatggacccaagctgtaccgtgggcttctatgctggagacaggaaggagtttgagacactctgctcagagctgaccagggtcctcagctcctcctcagccacagagcggtaccccatgttcaccctggccgagggccatgctcaggaccacagcctggacgacctctgctcccagctcgcccagcccacactccggctccctcgcacagggcggctcctcagggccaaacgccccagctctgaggactttgtgtttttataaagggaggggatgaggggaaagatacaacactatttatttttttatttatgtcatgtcgggtgtgggatcttgagctctggcagtgatgatggtacttcctgttgtcagcccctcaagcccagctgcaaccagtctggggccattcagccagggacagagcccacagagcccatacacctgtctcccaccagcggggccctcctggcagggtagggaaggaggaccccgggcacccccctcagggcctgactcacgtactgtagtttgcactggacgcccgggccctccctgtcccaaagcccccttgggggaactgtggctgctgggggccaataaagctgtgtaacttgatcgtgggtgtggctgggcgcagcgttctgaggggatgtggggtctgggaggtgtctcgaggtgagagctccaagtcacgggaagtttaagtcagcctcagtttccacatccataaaatgggacgacttccttacccacagctacacg

SEQ ID NO: 351223 - DNA, 2374 bp, Homo sapiens
gcctccgataagggcctgaaggggctgtcgcgctcctggcggtgtgataaggagggcggggggaggccgcgggaaggcgtcggggtttgaggtccccgcctggcgacccgggatcggggcaggaaaggcggctgggcggggagagggcggggcggggcgtctggcttggccacgcccaccgtcatccggggtcctggcccgctaagatggcgatggctgcggtagcagcggcggcggctgttgcctggcccggtaccctggggacgggggccgagtagcgccttccccgggccccgtgaaccggctgcgggtcgcccttggggggcagcggccgcagccccccacctgggccctcggtccgccctcccggcgcgtccatgaactcagtgtcgccggccgccgcgcagtaccggagcagcagcccggaggacgcgcgccgccggcccgaggcccgcaggccgcggggtcccagaggcccagaccccaacggcctggggccttccggagccagcggccccgctcttggctctcccggggctggcccgagtgagccggacgaagtggacaagttcaaggccaagttcctgacagcctggaacaacgtcaagtacgatgggggaatggaagcgctgttgctgtcatgcaagtgcttcatctcgctgggcgctgcccctacgtctccccaggttgggtggttaaaagccggaccagctttagcaagatctccagcatccacctctgtggccgccgctaccgtttcgagggcgagggtgacatacagcgtttccagcgggactttgtgtcccgcctgtggctcacataccgccgggacttcccgccccttcctgggggctgcctgacctcggactgtggctgggggtgcatgttacgcagcggccagatgatgctggcacagggccttctgctgcatttcctgcccagagactggacatgggccgagggcatgggcctgggcccccctgagctgtcagggtcagcctctcccagccggtaccatgggcctgcccgctggatgcccccacgctgggcccagggtgcccctgagctggagcaggaacgccggcaccggcagattgtgtcctggttcgccgaccacccccgggccccctttggcctacaccggctggtggagcttgggcagagctcaggcaagaaggcaggtgactggtatgggccatcgctagtggcacacatcctcaggaaagccgtggagagctgctccgacgtcacccgcctggtggtgtacgtttctcaggactgcacagtgtacaaggcggatgtggcacgcctggtggccaggccagaccccacagccgagtggaagtctgtggtcatcctggtgcccgtgcgactgggtggcgagactctcaaccccgtgtatgtgccctgcgtgaaggaactcctgcgttgcgagctgtgcctgggcatcatgggtgggaaaccgcgacactcactgtacttcattggctaccaagatgacttcctgctgtacctggaccctcactactgccagcccactgtggatgtcagccaggccgacttccccctggagtccttccactgcacctcgccccgcaagatggcctttgccaagatggacccaagctgtaccgtgggcttctatgctggagacaggaaggagtttgagacactctgctcagagctgaccagggtcctcagctcctcctcagccacagagcggtaccccatgttcaccctggccgagggccatgctcaggaccacagcctggacgacctctgctcccagctcgcccagcccacactccggctccctcgcacagggcggctcctcagggccaaacgccccagctctgaggactttgtgtttttataaagggaggggatgaggggaaagatacaacactatttatttttttatttatgtcatgtcgggtgtgggatcttgagctctggcagtgatgatggtacttcctgttgtcagcccctcaagcccagctgcaaccagtctggggccattcagccagggacagagcccacagagcccatacacctgtctcccaccagcggggccctcctggcagggtagggaaggaggaccccgggcacccccctcagggcctgactcacgtactgtagtttgcactggacgcccgggccctccctgtcccaaagcccccttgggggaactgtggctgctgggggccaataaagctgtgtaacttgatcgtgggtgtggctgggcgcagcgttctgaggggatgtggggtctgggaggtgtctcgaggtgagagctccaagtcacgggaagtttaagtcagcctcagtttccacatccataaaatgggacgacttccttacccacagctacacg

SEQ ID NO: 351224 - DNA, 1827 bp, Homo sapiens
gcctccgataagggcctgaaggggctgtcgcgctcctggcggtgtgataaggagggcggggggaggccgcgggaaggcgtcggggtttgaggtccccgcctggcgacccgggatcggggcaggaaaggcggctgggcggggagagggcggggcggggcgtctggcttggccacgcccaccgtcatccggggtcctggcccgctaagatggcgatggctgcggtagcagcggcggcggctgttgcctggcccggtaccctggggacgggggccgagtagcgccttccccgggccccgtgaaccggctgcgggtcgcccttggggggcagcggccgcagccccccacctgggccctcggtccgccctcccggcgcgtccatgaactcagtgtcgccggccgccgcgcagtaccggagcagcagcccggaggacgcgcgccgccggcccgaggcccgcaggccgcggggtcccagaggcccagaccccaacggcctggggccttccggagccagcggccccgctcttggctctcccggggctggcccgagtgagccggacgaagtggacaagttcaaggccaagttcctgacagcctggaacaacgtcaagtacggttgggtggttaaaagccggaccagctttagcaagatctccagcatccacctctgtggccgccgctaccgtttcgagggcgagggtgacatacagcgtttccagcgggactttgtgtcccgcctgtggctcacataccgccgggacttcccgccccttcctgggggctgcctgacctcggactgtggctgggggtgcatgttacgcagcggccagatgatgctggcacagggccttctgctgcatttcctgcccagaggaactcctgcgttgcgagctgtgcctgggcatcatgggtgggaaaccgcgacactcactgtacttcattggctaccaagatgacttcctgctgtacctggaccctcactactgccagcccactgtggatgtcagccaggccgacttccccctggagtccttccactgcacctcgccccgcaagatggcctttgccaagatggacccaagctgtaccgtgggcttctatgctggagacaggaaggagtttgagacactctgctcagagctgaccagggtcctcagctcctcctcagccacagagcggtaccccatgttcaccctggccgagggccatgctcaggaccacagcctggacgacctctgctcccagctcgcccagcccacactccggctccctcgcacagggcggctcctcagggccaaacgccccagctctgaggactttgtgtttttataaagggaggggatgaggggaaagatacaacactatttatttttttatttatgtcatgtcgggtgtgggatcttgagctctggcagtgatgatggtacttcctgttgtcagcccctcaagcccagctgcaaccagtctggggccattcagccagggacagagcccacagagcccatacacctgtctcccaccagcggggccctcctggcagggtagggaaggaggaccccgggcacccccctcagggcctgactcacgtactgtagtttgcactggacgcccgggccctccctgtcccaaagcccccttgggggaactgtggctgctgggggccaataaagctgtgtaacttgatcgtgggtgtggctgggcgcagcgttctgaggggatgtggggtctgggaggtgtctcgaggtgagagctccaagtcacgggaagtttaagtcagcctcagtttccacatccataaaatgggacgacttccttacccacagctacacg

SEQ ID NO: 351225 - DNA, 508 bp, Homo sapiens
ggtggtcctgagaagcacctactaaataaacctgggctaaggaatatggcttggcactgtttgtggctgaccctgtctccctcttcccgccaggtcctcagctcctcctcagccacagagcggtaccccatgttcaccctggccgagggccatgctcaggaccacagcctggacgacctctgctcccagctcgcccagcccacactccggctccctcgcacagggcggctcctcagggccaaacgccccagctctgaggactttgtgtttttataaagggaggggatgaggggaaagatacaacactatttatttttttatttatgtcatgtcgggtgtgggatcttgagctctggcagtgatgatggtacttcctgttgtcagcccctcaagcccagctgcaaccagtctggggccattcagccagggacagagcccacagagcccatacacctgtctcccaccagcggggccctcctggcagggtagggaaggaggaccccgggca

SEQ ID NO: 351226 - DNA, 3038 bp, Homo sapiens
tgagcttctccggcggcgaggggatagctggttaccagaaggacttctttgcagggccagtggtttctgtcagattttcgccggtcacgactgctgaatatgagacgatctgcagcaccaagtcagttgcaggggaattccttcaaaaaaccaaaatttatacctccaggaagaagtaatccaggtctgaatgaagagattacaaaactgaatccagatataaaattatttgagggtgttgcaattaataacacctttctcccgtcacaaaatgatcttagaatatgcagtttaaatctgcctagtgaagaaagtactagagaaatcaataacagagataattgcagtggaaaatattgttttgaagcacctacactggcaacattagatccacctcatacagttcattcggctcctaaagaagtagcagtgtccaaggaacaagaagagaaatctgatagcctagttaaatatttcagtgttgtttggtgtaagccttcaaagaaaaaacataaaaagtgggaaggtgatgctgttcttattgtaaaaggaaagtcatttatattaaagaatttggaaggcaaagacattggaagaggcattggttataaattcaaagagcttgaaaagattgaagagggccaaacactgatgatttgtggaaaagaaatagaagtcatgggtgtaatctctccagatgacttcagcagtggcaggtgttttcagcttggaggaggaagtactgctatctcgcattcttctcaggttgccaggaaatgtttctctaaccctttcaaaagtgtttgtaaaccaagttcaaaggaaaatagacagaatgatttccaaaattgcaaaccacgccatgacccatatacgccaaattccctcgttatgccacgaccagataagaatcaccagtgggtattcaataagaactgtttccctcttgtggatgtagtgattgatccttaccttgtatatcatcttcgaccacatcagaaagaaggaatcatattcctttatgaatgtgtaatgggaatgagaatgaatggcagatgtggagctattcttgctgatgaaatgggtttagggaagacattgcaatgtatttcgctcatctggaccctgcagtgtcagggaccctatggaggcaagccagtaataaagaagacactaattgtcacacctggaagcttggtgaataattggaagaaagaatttcaaaaatggctaggaagtgaaaggatcaagatatttactgttgatcaggaccacaaagttgaagaattcatcaagtctatattttattctgttcttattatcagttatgaaatgttacttcgttccctggatcaaattaagaatataaaatttgatcttctaatctgtgacgaggggcatcgtttgaagaacagtgccattaagacaactacagccctcattagcctttcttgtgagaaaagaataattctaactggtactccaattcagaatgatctgcaagaattttttgcattaattgattttgtaaatccaggaatattaggctctttgtcatcttataggaaaatatatgaagaacccatcattttatcgagagaaccttctgcttctgaggaagaaaaggagttaggagaaagaagagcagctgaacttacttgcctcactggactctttatccttagaagaacccaagaaattataaataaatatctcccacctaaaatagagaatgttgtcttttgccgaccaggagcactacagattgagctttatcgaaagctgttaaattctcaggttgtcaggttctgccttcaagggttgttggaaaatagtccccatctaatatgtataggagctcttaaaaaactgtgcaatcacccctgccttttgttcaactctataaaggaaaaggaatgtagctcaacttgtgataaaaatgaagaaaagagtctatacaaaggcttgctaagtgtgtttcctgctgactacaaccctctcctgtttactgaaaaggagtcaggaaaactacaggtgttgtccaagctcttagcggttatccacgaacttcgacctactgaaaaggtggtgttggtatccaactatacacaaaccttgaacattttacaagaagtatgtaagcgtcatggatatgcttatacaagacttgatggacaaacaccaatctctcaaaggcagcagattgttgatggctttaacagtcaacactcttctttttttatttttttgttaagttcaaaagctggtggtgtaggacttaacctcattggaggatctcacttaattctctatgacattgattggaatccagccactgacattcaggcaatgtctagagtatggagagatggtcagaaatatcctgtacatatttacagactcctaactacaggtacaatagaagaaaagatctatcaaaggcagatcagtaagcaaggtctttgtggggcagttgtcgacctcaccaagacatctgaacatattcagttttcagtagaagaacttaaaaatttgttcacattacatgaaagttcagattgtgttactcatgatctgcttgactgtgagtgtacaggagaagaagttcatacaggtgattcgttggaaaaattcattgtctctagagattgtcagcttggtccacatcaccagaaatctaactccctgaaacctctttctatgtcccagctgaagcaatggaaacatttttctggagatcatttaaatcttacagatccttttcttgaaagaataacagaaaatgtgtcattcatttttcagaatataaccactcaagctactggcacatagtgaaagattacttctgacattccattgctcttcttttgaaaattagtatggtaattaaatgtactttttgaaaattaatagaattatttaaattacagtatatgttgcaaaatatatcacttttgatacaatagtcaaaattgagtggtttaatgttttgtaaatattaagtgtttaaatgaaaaataaagatgtgcttatatcat

SEQ ID NO: 351227 - DNA, 493 bp, Homo sapiens
ttccccagatttccagtttttgcctggtaagagacaggaaccacatacaaaggcaacaatttgggatgaatcccaaagacattatgctgaatgggagaaatcatttttgaaacggttgtatactgtatgattccatttattcgacgttctcaaaaagaaaacaatattcatggaaaacagttcattcggctcctaaagaagtagcagtgtccaaggaacaagaagagaaatctgatagcctagttaaatatttcagtgttgtttggtgtaagccttcaaagaaaaaacataaaaagtgggaaggtgatgctgttcttattgtaaaaggaaagtcatttatattaaagaatttggaaggcaaagacattggaagaggaaaaaaaaaaaaccagtatgtgaaacaaagtttaagagtaaaagaaaagcttctagcgactgagatgtttgaaagagtcacctttggatcaagatcatctatggatctaaatgaaat

SEQ ID NO: 351228 - DNA, 2277 bp, Homo sapiens
cttattttccttctttagtggaccgtagttagaagggtgctggttataagttcctaaatcattgtaatttccacttccataatttcctcctccatagttgtcataaccacctccgtggcccccaccctggttgccatatccagataagaatcaccagtgggtattcaataagaactgtttccctcttgtggatgtagtgattgatccttaccttgtatatcatcttcgaccacatcagaaagaaggaatcatattcctttatgaatgtgtaatgggaatgagaatgaatggcagatgtggagctattcttgctgatgaaatgggtttagggaagacattgcaatgtatttcgctcatctggaccctgcagtgtcagggaccctatggaggcaagccagtaataaagaagacactaattgtcacacctggaagcttggtgaataattggaagaaagaatttcaaaaatggctaggaagtgaaaggatcaagatatttactgttgatcaggaccacaaagttgaagaattcatcaagtctatattttattctgttcttattatcagttatgaaatgttacttcgttccctggatcaaattaagaatataaaatttgatcttctaatctgtgacgaggggcatcgtttgaagaacagtgccattaagacaactacagccctcattagcctttcttgtgagaaaagaataattctaactggtactccaattcagaatgatctgcaagaattttttgcattaattgattttgtaaatccaggaatattaggctctttgtcatcttataggaaaatatatgaagaacccatcattttatcgagagaaccttctgcttctgaggaagaaaaggagttaggagaaagaagagcagctgaacttacttgcctcactggactctttatccttagaagaacccaagaaattataaataaatatctcccacctaaaatagagaatgttgtcttttgccgaccaggagcactacagattgagctttatcgaaagctgttaaattctcaggttgtcaggttctgccttcaagggttgttggaaaatagtccccatctaatatgtataggagctcttaaaaaactgtgcaatcacccctgccttttgttcaactctataaaggaaaaggaatgtagctcaacttgtgataaaaatgaagaaaagagtctatacaaaggcttgctaagtgtgtttcctgctgactacaaccctctcctgtttactgaaaaggagtcaggaaaactacaggtgttgtccaagctcttagcggttatccacgaacttcgacctactgaaaaggtggtgttggtatccaactatacacaaaccttgaacattttacaagaagtatgtaagcgtcatggatatgcttatacaagacttgatggacaaacaccaatctctcaaaggcagcagattgttgatggctttaacagtcaacactcttctttttttatttttttgttaagttcaaaagctggtggtgtaggacttaacctcattggaggatctcacttaattctctatgacattgattggaatccagccactgacattcaggcaatgtctagagtatggagagatggtcagaaatatcctgtacatatttacagactcctaactacaggtacaatagaagaaaagatctatcaaaggcagatcagtaagcaaggtctttgtggggcagttgtcgacctcaccaagacatctgaacatattcagttttcagtagaagaacttaaaaatttgttcacattacatgaaagttcagattgtgttactcatgatctgcttgactgtgagtgtacaggagaagaagttcatacaggtgattcgttggaaaaattcattgtctctagagattgtcagcttggtccacatcaccagaaatctaactccctgaaacctctttctatgtcccagctgaagcaatggaaacatttttctggagatcatttaaatcttacagatccttttcttgaaagaataacagaaaatgtgtcattcatttttcagaatataaccactcaagctactggcacatagtgaaagattacttctgacattccattgctcttcttttgaaaattagtatggtaattaaatgtactttttgaaaattaatagaattatttaaattacagtatatgttgcaaaatatatcacttttgatacaatagtcaaaattgagtggtttaatgttttgtaaatattaagtgtttaaatgaaaaataaagatgtgcttatatcat

SEQ ID NO: 351229 - DNA, 446 bp, Homo sapiens
gttgccaggaaatgtttctctaaccctttcaaaagtgtttgtaaaccaagttcaaaggaaaatagacagaatgatttccaaaattgcaaaccacgccatgacccatatacgccaagtaagattttaaaaataatttgaattttctgtttttactgtcaaaatgttttttgtgtgtgaatttgaagtttaaattttgttttaaaagttttaggtgaaagtatacattattcttgagatatataatctgacataagagataatgttgaagtcaaataacaatatagtttgggaattatttcatatgtaaatgaataattctaagaatacagtaataaaaatactgtacatgtgttgaaggaaacatatctaaattgtatgtgtatacattacacatacatgtgtataattttgaataaaatctgactttttagtaaggagagaaatta

SEQ ID NO: 351230 - DNA, 3084 bp, Homo sapiens
tgagcttctccggcggcgaggggatagctggttaccagaaggacttctttgcagggccagtggtttctgtcagattttcgccggtcacgactgctgaatatgagacgatctgcagcaccaagtcagttgcaggggaattccttcaaaaaaccaaaatttatacctccaggaagaagtaatccaggtctgaatgaagagattacaaaactgaatccagatataaaattatttgagggtgttgcaattaataacacctttctcccgtcacaaaatgatcttagaatatgcagtttaaatctgcctagtgaagaaagtactagagaaatcaataacagagataattgcagtggaaaatattgttttgaagcacctacactggcaacattagatccacctcatacagtgcaaacttggatgaggaggcacaggctggtaccagttcactacagttcattcggctcctaaagaagtagcagtgtccaaggaacaagaagagaaatctgatagcctagttaaatatttcagtgttgtttggtgtaagccttcaaagaaaaaacataaaaagtgggaaggtgatgctgttcttattgtaaaaggaaagtcatttatattaaagaatttggaaggcaaagacattggaagaggcattggttataaattcaaagagcttgaaaagattgaagagggccaaacactgatgatttgtggaaaagaaatagaagtcatgggtgtaatctctccagatgacttcagcagtggcaggtgttttcagcttggaggaggaagtactgctatctcgcattcttctcaggttgccaggaaatgtttctctaaccctttcaaaagtgtttgtaaaccaagttcaaaggaaaatagacagaatgatttccaaaattgcaaaccacgccatgacccatatacgccaaattccctcgttatgccacgaccagataagaatcaccagtgggtattcaataagaactgtttccctcttgtggatgtagtgattgatccttaccttgtatatcatcttcgaccacatcagaaagaaggaatcatattcctttatgaatgtgtaatgggaatgagaatgaatggcagatgtggagctattcttgctgatgaaatgggtttagggaagacattgcaatgtatttcgctcatctggaccctgcagtgtcagggaccctatggaggcaagccagtaataaagaagacactaattgtcacacctggaagcttggtgaataattggaagaaagaatttcaaaaatggctaggaagtgaaaggatcaagatatttactgttgatcaggaccacaaagttgaagaattcatcaagtctatattttattctgttcttattatcagttatgaaatgttacttcgttccctggatcaaattaagaatataaaatttgatcttctaatctgtgacgaggggcatcgtttgaagaacagtgccattaagacaactacagccctcattagcctttcttgtgagaaaagaataattctaactggtactccaattcagaatgatctgcaagaattttttgcattaattgattttgtaaatccaggaatattaggctctttgtcatcttataggaaaatatatgaagaacccatcattttatcgagagaaccttctgcttctgaggaagaaaaggagttaggagaaagaagagcagctgaacttacttgcctcactggactctttatccttagaagaacccaagaaattataaataaatatctcccacctaaaatagagaatgttgtcttttgccgaccaggagcactacagattgagctttatcgaaagctgttaaattctcaggttgtcaggttctgccttcaagggttgttggaaaatagtccccatctaatatgtataggagctcttaaaaaactgtgcaatcacccctgccttttgttcaactctataaaggaaaaggaatgtagctcaacttgtgataaaaatgaagaaaagagtctatacaaaggcttgctaagtgtgtttcctgctgactacaaccctctcctgtttactgaaaaggagtcaggaaaactacaggtgttgtccaagctcttagcggttatccacgaacttcgacctactgaaaaggtggtgttggtatccaactatacacaaaccttgaacattttacaagaagtatgtaagcgtcatggatatgcttatacaagacttgatggacaaacaccaatctctcaaaggcagcagattgttgatggctttaacagtcaacactcttctttttttatttttttgttaagttcaaaagctggtggtgtaggacttaacctcattggaggatctcacttaattctctatgacattgattggaatccagccactgacattcaggcaatgtctagagtatggagagatggtcagaaatatcctgtacatatttacagactcctaactacaggtacaatagaagaaaagatctatcaaaggcagatcagtaagcaaggtctttgtggggcagttgtcgacctcaccaagacatctgaacatattcagttttcagtagaagaacttaaaaatttgttcacattacatgaaagttcagattgtgttactcatgatctgcttgactgtgagtgtacaggagaagaagttcatacaggtgattcgttggaaaaattcattgtctctagagattgtcagcttggtccacatcaccagaaatctaactccctgaaacctctttctatgtcccagctgaagcaatggaaacatttttctggagatcatttaaatcttacagatccttttcttgaaagaataacagaaaatgtgtcattcatttttcagaatataaccactcaagctactggcacatagtgaaagattacttctgacattccattgctcttcttttgaaaattagtatggtaattaaatgtactttttgaaaattaatagaattatttaaattacagtatatgttgcaaaatatatcacttttgatacaatagtcaaaattgagtggtttaatgttttgtaaatattaagtgtttaaatgaaaaataaagatgtgcttatatcat

SEQ ID NO: 351231 - DNA, 822 bp, Homo sapiens
ttgatggggttgtttttttcttgtaaatttgtttgagttcattgtagattgtggtgtaggacttaacctcattggaggatctcacttaattctctatgacattgattggaatccagccactgacattcaggcaatgtctagagtatggagagatggtcagaaatatcctgtacatatttacagactcctaactacaggtacaatagaagaaaagatctatcaaaggcagatcagtaagcaaggtctttgtggggcagttgtcgacctcaccaagacatctgaacatattcagttttcagtagaagaacttaaaaatttgttcacattacatgaaagttcagattgtgttactcatgatctgcttgactgtgagtgtacaggagaagaagttcatacaggtgattcgttggaaaaattcattgtctctagagattgtcagcttggtccacatcaccagaaatctaactccctgaaacctctttctatgtcccagctgaagcaatggaaacatttttctggagatcatttaaatcttacagatccttttcttgaaagaataacagaaaatgtgtcattcatttttcagaatataaccactcaagctactggcacatagtgaaagattacttctgacattccattgctcttcttttgaaaattagtatggtaattaaatgtactttttgaaaattaatagaattatttaaattacagtatatgttgcaaaatatatcacttttgatacaatagtcaaaattgagtggtttaatgttttgtaaatattaagtgtttaaatgaaaaataaagatgtgcttatatcat

SEQ ID NO: 351232 - DNA, 899 bp, Homo sapiens
aattcgcggccgcgtcgacgctcctcccgccgcccaagatgccgaaaggaaagaaggccaagggaaagaaggtggctccggccccagctgtcgtgaagaagcaggaggctaagaaagtggtgaatcccctgtttgagaaaaggcctaagaattttggcattggacaggacatccagcccaaaagagacctcacccgctttgtgaaatggccccgctatatcaggttgcagcggcagagagccatcctctataagcggctgaaagtgcctcctgcgattaaccagttcacccaggccctggaccgccaaacagctactcagctgcttaagctggcccacaagtacagaccagagacaaagcaagagaagaagcagagactgttggcccgggccgagaagaaggctgctggcaaaggggacgtcccaacgaagagaccacctgtccttcgagcaggagttaacaccgtcaccaccttggtggagaacaagaaagctcagctggtggtgattgcacacgacgtggatcccatcgagctggttgtcttcttgcctgccctgtgtcgtaaaatgggggtcccttactgcattatcaagggaaaggcaagactgggacgtctagtccacaggaagacctgcaccactgtcgccttcacacaggtgaactcggaagacaaaggcgctttggctaagctggtggaagctatcaggaccaattacaatgacagatacgatgagatccgccgtcactggggtggcaatgtcctgggtcctaagtctgtggctcgtatcgccaagctcgaaaaggcaaaggctaaagaacttgccactaaactgggttaaatgtacactgttgagttttctgtacataaaaataattgaaataatacaaattttccttca

SEQ ID NO: 351233 - DNA, 332 bp, Homo sapiens
  misc_feature (276)..(276): n is a, c, g, or t
ggctgacttagcaccacccgattagcgagcttcatcaaagagacacctgtccttcgagcaggagttaacaccgtcaccaccttggtggagaacaagaaagctcagctggtggtgattgcacacgacgtggatcccatcgagctggttgtcttcttgcctgccctgtgtcgtaaaatgggggtcccttactgcattatcaagggaaaggcaagactgggacgtctagtccacaggaagacctgcaccactgtcgccttcacacaggtgaactccaanaggcgctttggctaagttgatggaagcgtcgcgcataggatcctctagagcacctg

SEQ ID NO: 351234 - DNA, 932 bp, Homo sapiens
cctcctggattcatgccagccatttcggaattttagaccaaccgggggcacttctgcaatcacctgccccccagtaacaaatgtgccccggaaggacttcgtgcaatctcgtttcactgagagccccaagtgtccccgagcgcgggatccttgggcccgaacattgattaggccccaaagattcgccaatcggctatatggccggcgtttgggcattttggggtgggcaggcacgagccgagtaccctgtgactctcgtagcgtgcccgaggccttcatggcgtgctttccgcggtttgcctcctgcgattaaccagttcacccaggccctggaccgccaaacagctactcagctgcttaagctggcccacaagtacagaccagagacaaagcaagagaagaagcagagactgttggcccgggccgagaagaaggctgctggcaaaggggacgtcccaacgaagagaccacctgtccttcgagcaggagttaacaccgtcaccaccttggtggagaacaagaaagctcagctggtggtgattgcacacgacgtggatcccatcgagctggttgtcttcttgcctgccctgtgtcgtaaaatgggggtcccttactgcattatcaagggaaaggcaagactgggacgtctagtccacaggaagacctgcaccactgtcgccttcacacaggtgaactcggaagacaaaggcgctttggctaagctggtggaagctatcaggaccaattacaatgacagatacgatgagatccgccgtcactggggtggcaatgtcctgggtcctaagtctgtggctcgtatcgccaagctcgaaaaggcaaaggctaaagaacttgccactaaactgggttaaatgtacactgttgagttttctgtacataaaaataattgaaataatacaaattttccttca

SEQ ID NO: 351235 - DNA, 1223 bp, Homo sapiens
caccaccccacaccacccaccccccccccaactaggctcagtgtcaaagccggtgttacgaggcagtactatacgtctagtacgagctggtgcgagatgcgaaagaagaggcaggaaagaaggtggctccggccccagctgtcgtgaagaagcaggaggctaagaaagtggtgaatcccctgtttgagaaaaggcctaagaattttggcattggacaggacatccagcccaaaagagacctcacccgctttgtgaaatggccccgctatatcaggttgcagcggcagagagccatcctctataagcggctgaaagtgcctcctgcgattaaccagttcacccaggccctggaccgccaaacagctactcagctgcttaagctggcccacaagtacagaccagagacaaagcaagagaagaagcagagactgttggcccgggccgagaagaaggctgctggcaaaggggacgtcccaacgaagagaccacctgtccttcgagcaggagttaacaccgtcaccaccttggtggagaacaagaaagctcagctggtggtgattgcacacgacgtggatcccatcgagctggttgtcttcttgcctgccctgtgtcgtaaaatgggggtcccttactgcattatcaagggaaaggcaagactgggacgtctagtccacaggaagacctgcaccactgtcgccttcacacaggtgaactcggaagacaaaggcgctttggctaagctggtggaagctatcaggaccaattacaatgacagatacgatgagatccgccgtcactggggtggcaatgtcctgggtcctaagtctgtggctcgtatcgccaagctcgaaaaggcaaaggctaaagaacttgccactaaactgggttaaatgtacactgttgagttttctgtacataaaaataattgaaataatacaaattttccttcaaaacacgcgacaccacaacaacacacaagcaagaacaactacacaaatagaataacgatacaatacatcaaacaacccaaataaagaagcagggggagggacgcgagaaacgacagacggaagcagagaagatcagacgtgcgggactgagccgcggaagtgcgatgacgagaagacaagagagagagtgaccacaaacacagcatgaggaagcagaagagagcggagggcaggagcaaaagagaaaaagagagatgacatacggactcgacg

SEQ ID NO: 351236 - DNA, 876 bp, Homo sapiens
  misc_feature (31)..(31): n is a, c, g, or t
  misc_feature (831)..(831): n is a, c, g, or t
  misc_feature (841)..(841): n is a, c, g, or t
  misc_feature (848)..(848): n is a, c, g, or t
  misc_feature (850)..(850): n is a, c, g, or t
  misc_feature (855)..(858): n is a, c, g, or t
taacgctaggtacgagccggtgtaaatcggncgaggacaggacatccagcccaaaagagacctcacccgctttgtgaaatggccccgctatatcaggttgcagcggcagagagccatcctctataagcggctgaaagtgcctcctgcgattaaccagttcacccaggccctggaccgccaaacagctactcagctgcttaagctggcccacaagtacagaccagagacaaagcaagagaagaagcagagactgttggcccgggccgagaagaaggctgctggcaaaggggacgtcccaacgaagagaccacctgtccttcgagcaggagttaacaccgtcaccaccttggtggagaacaagaaagctcagctggtggtgattgcacacgacgtggatcccatcgagctggttgtcttcttgcctgccctgtgtcgtaaaatgggggtcccttactgcattatcaagggaaaggcaagactgggacgtctagtccacaggaagacctgcaccactgtcgccttcacacaggtgaactcggaagacaaaggcgctttggctaagctggtggaagctatcaggaccaattacaatgacagatacgatgagatccgccgtcactggggtggcaatgtcctgggtcctaagtctgtggctcgtatcgccaagctcgaaaaggcaaaggctaaagaacttgccactaaactgggttaaatgtacactgttgagttttctgtacataaaaataattgaaataatacaaattttccttcaaaaaaaaaaaaacccgggcattggggggggaaaaggttgaagggcctggtagggtccgnccatttgganagggaangngcccnnnngacgtaatcgaagcagac

SEQ ID NO: 351237 - DNA, 944 bp, Homo sapiens
  misc_feature (899)..(899): n is a, c, g, or t
  misc_feature (909)..(909): n is a, c, g, or t
  misc_feature (916)..(916): n is a, c, g, or t
  misc_feature (918)..(918): n is a, c, g, or t
  misc_feature (923)..(926): n is a, c, g, or t
accaacaaaccgccaaacaattgcatgatgggccgggtatacggacgaggcccgttgagaaaatgctatgaagtttggcatggacaggacatccagcccaaaagagacctcacccgctttgtgaaatggccccgctatatcaggttgcagcggcagagagccatcctctataagcggctgaaagtgcctcctgcgattaaccagttcacccaggccctggaccgccaaacagctactcagctgcttaagctggcccacaagtacagaccagagacaaagcaagagaagaagcagagactgttggcccgggccgagaagaaggctgctggcaaaggggacgtcccaacgaagagaccacctgtccttcgagcaggagttaacaccgtcaccaccttggtggagaacaagaaagctcagctggtggtgattgcacacgacgtggatcccatcgagctggttgtcttcttgcctgccctgtgtcgtaaaatgggggtcccttactgcattatcaagggaaaggcaagactgggacgtctagtccacaggaagacctgcaccactgtcgccttcacacaggtgaactcggaagacaaaggcgctttggctaagctggtggaagctatcaggaccaattacaatgacagatacgatgagatccgccgtcactggggtggcaatgtcctgggtcctaagtctgtggctcgtatcgccaagctcgaaaaggcaaaggctaaagaacttgccactaaactgggttaaatgtacactgttgagttttctgtacataaaaataattgaaataatacaaattttccttcattatgaatattcaatttcttcaaaaaaaaaaaacccgggcattggggggggaaaaggttgaagggcctggtagggtccgnccatttgganagggaangngcccnnnngacgtaatcgaagcagac

SEQ ID NO: 351238 - DNA, 952 bp, Homo sapiens
aacgataggcaggtagcgaggctgggtgggacaggacatccagcccaaaagagacctcacccgctttgtgaaatggccccgctatatcaggttgcagcggcagagagccatcctctataagcggctgaaagtgcctcctgcgattaaccagttcacccaggccctggaccgccaaacagctactcagctgcttaagctggcccacaagtacagaccagagacaaagcaagagaagaagcagagactgttggcccgggccgagaagaaggctgctggcaaaggggacgtcccaacgaagagaccacctgtccttcgagcaggagttaacaccgtcaccaccttggtggagaacaagaaagctcagctggtggtgattgcacacgacgtggatcccatcgagctggttgtcttcttgcctgccctgtgtcgtaaaatgggggtcccttactgcattatcaagggaaaggcaagactgggacgtctagtccacaggaagacctgcaccactgtcgccttcacacaggtgaactcggaagacaaaggcgctttggctaagctggtggaagctatcaggaccaattacaatgacagatacgatgagatccgccgtcactggggtggcaatgtcctgggtcctaagtctgtggctcgtatcgccaagctcgaaaaggcaaaggctaaagaacttgccactaaactgggttaaatgtacactgttgagttttctgtacataaaaataattgaaataatacaaattttccttcacttccaaaaaaaaaaaaaacccgagctttattccgggcggcaaaaggtatgatggcatgcctagctgtcctgcccgtttcttgccagtgcgaatcgcggccctaaggggcggtaatcgagcgcggtttgtaaagaagggtcacccctcagcacccctctacaaccccccaccaccctaccagccca

SEQ ID NO: 351239 - DNA, 323 bp, Homo sapiens
cgcggccgcgcgaccggctgcgagagacgacagaaggggacgtctagtccacaggagactgcaccatgtcgcccacacaggtgaactcggaagacaaaggcgctttggctaagctggtggaagctatcaggaccaattacaatgacagatacgatgagatccgccgtcactggggtggcaatgtcctgggtcctaagtctgtggctcgtatcgccaagctcgaaaaggcaaaggctaaagaacttgccactaaactgggttaaatgtacactgttgagttttctgtacataaaaataattgaaataatacaaattttccttca

SEQ ID NO: 351240 - DNA, 1024 bp, Homo sapiens
  misc_feature (979)..(979): n is a, c, g, or t
  misc_feature (989)..(989): n is a, c, g, or t
  misc_feature (996)..(996): n is a, c, g, or t
  misc_feature (998)..(998): n is a, c, g, or t
  misc_feature (1003)..(1006): n is a, c, g, or t
aattcgcggccgcgtcgacgctcctcccgccgcccaagatgccgaaaggaaagaaggccaagggaaagaaggtggctccggccccagctgtcgtgaagaagcaggaggctaagaaagtggtgaatcccctgtttgagaaaaggcctaagaattttggcattggacaggacatccagcccaaaagagacctcacccgctttgtgaaatggccccgctatatcaggttgcagcggcagagagccatcctctataagcggctgaaagtgcctcctgcgattaaccagttcacccaggccctggaccgccaaacagctactcagctgcttaagctggcccacaagtacagaccagagacaaagcaagagaagaagcagagactgttggcccgggccgagaagaaggctgctggcaaaggggacgtcccaacgaagagaccacctgtccttcgagcaggagttaacaccgtcaccaccttggtggagaacaagaaagctcagctggtggtgattgcacacgacgtggatcccatcgagctggttgtcttcttgcctgccctgtgtcgtaaaatgggggtcccttactgcattatcaagggaaaggcaagactgggacgtctagtccacaggaagacctgcaccactgtcgccttcacacaggtgaactcggaagacaaaggcgctttggctaagctggtggaagctatcaggaccaattacaatgacagatacgatgagatccgccgtcactggggtggcaatgtcctgggtcctaagtctgtggctcgtatcgccaagctcgaaaaggcaaaggctaaagaacttgccactaaactgggttaaatgtacactgttgagttttctgtacataaaaataattgaaataatacaaattttccttcattatgaatattcaatttcttcaaaaaaaaaaaacccgggcattggggggggaaaaggttgaagggcctggtagggtccgnccatttgganagggaangngcccnnnngacgtaatcgaagcagac

SEQ ID NO: 351241 - DNA, 1172 bp, Homo sapiens
aattcgcggccgcgtcgacgctcctcccgccgcccaagatgccgaaaggaaagaaggccaagggaaagaaggtggctccggccccagctgtcgtgaagaagcaggaggctaagaaagtggtgaatcccctgtttgagaaaaggcctaagaattttggcattggacaggacatccagcccaaaagagacctcacccgctttgtgaaatggccccgctatatcaggttgcagcggcagagagccatcctctataagcggctgaaagtgcctcctgcgattaaccagttcacccaggccctggaccgccaaacagctactcagctgcttaagctggcccacaagtacagaccagagacaaagcaagagaagaagcagagactgttggcccgggccgagaagaaggctgctggcaaaggggacgtcccaacgaagagaccacctgtccttcgagcaggagttaacaccgtcaccaccttggtggagaacaagaaagctcagctggtggtgattgcacacgacgtggatcccatcgagctggttgtcttcttgcctgccctgtgtcgtaaaatgggggtcccttactgcattatcaagggaaaggcaagactgggacgtctagtccacaggaagacctgcaccactgtcgccttcacacaggtgaactcggaagacaaaggcgctttggctaagctggtggaagctatcaggaccaattacaatgacagatacgatgagatccgccgtcactggggtggcaatgtcctgggtcctaagtctgtggctcgtatcgccaagctcgaaaaggcaaaggctaaagaacttgccactaaactgggttaaatgtacactgttgagttttctgtacataaaaataattgaaataatacaaattttccttcaaaacacgcgacaccacaacaacacacaagcaagaacaactacacaaatagaataacgatacaatacatcaaacaacccaaataaagaagcagggggagggacgcgagaaacgacagacggaagcagagaagatcagacgtgcgggactgagccgcggaagtgcgatgacgagaagacaagagagagagtgaccacaaacacagcatgaggaagcagaagagagcggagggcaggagcaaaagagaaaaagagagatgacatacggactcgacg

SEQ ID NO: 351242 - DNA, 1300 bp, Homo sapiens
aattcgcggccgcgtcgacgctcctcccgccgcccaagatgccgaaaggaaagaaggccaagggaaagaaggtggctccggccccagctgtcgtgaagaagcaggaggctaagaaagtggtgaatcccctgtttgagaaaaggcctaagaattttggcattggacaggacatccagcccaaaagagacctcacccgctttgtgaaatggccccgctatatcaggttgcagcggcagagagccatcctctataagcggctgaaagtgcctcctgcgattaaccagttcacccaggccctggaccgccaaacagctactcagctgcttaagctggcccacaagtacagaccagagacaaagcaagagaagaagcagagactgttggcccgggccgagaagaaggctgctggcaaaggggacgtcccaacgaagagaccacctgtccttcgagcaggagttaacaccgtcaccaccttggtggagaacaagaaagctcagctggtggtgattgcacacgacgtggatcccatcgagctggttgtcttcttgcctgccctgtgtcgtaaaatgggggtcccttactgcattatcaagggaaaggcaagactgggacgtctagtccacaggaagacctgcaccactgtcgccttcacacaggtgaactcggaagacaaaggcgctttggctaagctggtggaagctatcaggaccaattacaatgacagatacgatgagatccgccgtcactggggtggcaatgtcctgggtcctaagtctgtggctcgtatcgccaagctcgaaaaggcaaaggctaaagaacttgccactaaactgggttaaatgtacactgttgagttttctgtacataaaaataattgaaataatacaaattttccttcataatacaaattttccttcaaacagtgtctgttgagtatctcgggttgaatcttacttggggttagcaagtatctttttgagacacagcctcactctgtcgcccaggctggagtgcagtggtgtgatgtcaaagcaaccttcgcctcccaggtttaggatattctggtgcctcagcatcccaactggctggcccatatttgtgtttttggtagagatggggtttcaccatgttagccaggctggtctgagctcctgaccgcacccggcccttcccacccttaaatacattcttaaaccaggcattttgttccctagagatgtaacttgcatatcaagttttgggaaagttctttggactgaaaccaagccaggattttatgatgaaccagtcatgagctcat

SEQ ID NO: 351243 - DNA, 939 bp, Homo sapiens
aattcgcggccgcgtcgacgctcctcccgccgcccaagatgccgaaaggaaagaaggccaagggaaagaaggtggctccggccccagctgtcgtgaagaagcaggaggctaagaaagtggtgaatcccctgtttgagaaaaggcctaagaattttggcattggacaggacatccagcccaaaagagacctcacccgctttgtgaaatggccccgctatatcaggttgcagcggcagagagccatcctctataagcggctgaaagtgcctcctgcgattaaccagttcacccaggccctggaccgccaaacagctactcagctgcttaagctggcccacaagtacagaccagagacaaagcaagagaagaagcagagactgttggcccgggccgagaagaaggctgctggcaaaggggacgtcccaacgaagagaccacctgtccttcgagcaggagttaacaccgtcaccaccttggtggagaacaagaaagctcagctggtggtgattgcacacgacgtggatcccatcgagctggttgtcttcttgcctgccctgtgtcgtaaaatgggggtcccttactgcattatcaagggaaaggcaagactgggacgtctagtccacaggaagacctgcaccactgtcgccttcacacaggtgaactcggaagacaaaggcgctttggctaagctggtggaagctatcaggaccaattacaatgacagatacgatgagatccgccgtcactggggtggcaatgtcctgggtcctaagtctgtggctcgtatcgccaagctcgaaaaggcaaaggctaaagaacttgccactaaactgggttaaatgtacactgttgagttttctgtacataaaaataattgaaataatacaaattttccttcattgtattatttcaattatttttgtcgacgcggccgcgaat

SEQ ID NO: 351244 - DNA, 1471 bp, Homo sapiens
aattcgcggccgcgtcgacgctcctcccgccgcccaagatgccgaaaggaaagaaggccaagggaaagaaggtggctccggccccagctgtcgtgaagaagcaggaggctaagaaagtggtgaatcccctgtttgagaaaaggcctaagaattttggcattggacaggacatccagcccaaaagagacctcacccgctttgtgaaatggccccgctatatcaggttgcagcggcagagagccatcctctataagcggctgaaagtgcctcctgcgattaaccagttcacccaggccctggaccgccaaacagctactcagctgcttaagctggcccacaagtacagaccagagacaaagcaagagaagaagcagagactgttggcccgggccgagaagaaggctgctggcaaaggggacgtcccaacgaagagaccacctgtccttcgagcaggagttaacaccgtcaccaccttggtggagaacaagaaagctcagctggtggtgattgcacacgacgtggatcccatcgagctggttgtcttcttgcctgccctgtgtcgtaaaatgggggtcccttactgcattatcaagggaaaggcaagactgggacgtctagtccacaggaagacctgcaccactgtcgccttcacacaggtgaactcggaagacaaaggcgctttggctaagctggtggaagctatcaggaccaattacaatgacagatacgatgagatccgccgtcactggggtggcaatgtcctgggtcctaagtctgtggctcgtatcgccaagctcgaaaaggcaaaggctaaagaacttgccactaaactgggttaaatgtacactgttgagttttctgtacataaaaataattgaaataatacaaattttccttcaaatactgagcccaagaagccgtgaagcgtgtcgccagagcccgacgaaggcccatggaaccacatggctggaactaatgggggcgcgaggagcacacctgtcacgtcggctcgggggcgaaccttttgacccctgccaatcacttgatatagacccccggacgagcccaaacaagtcagggggactatgatagggactcagctggggccccgtcatcatataaatgcagcttgtggcgtcatagacacgtccttcaaacaccgagcacttcattaacagacagcctatcattattctaggtggagcgtccgtaaccatgtccatcatgtgcctgtcccacaatgagtaaagcctacgctgcttcggtgcataaaatgggtgcaattcaccccagagttggatcccagtcggtctcaagcctccgtctgagtccttgtgcacagcaggccctagtaaattttatcctcacgcgagtcatgtcatgttgcagcagatcatttgtcaccggcacgttactgttatatcaaaaccgatcatcccgccctgacaatttctccgttaatatcaggata

SEQ ID NO: 351245 - DNA, 1064 bp, Homo sapiens
aattcgcggccgcgtcgacgctcctcccgccgcccaagatgccgaaaggaaagaaggccaagggaaagaaggtggctccggccccagctgtcgtgaagaagcaggaggctaagaaagtggtgaatcccctgtttgagaaaaggcctaagaattttggcattggtgtttgtgtgcagatgatgtaaaagaatatttgctatctgagagatggtgatgacattttaaaccaccaagatcgctgatgcaccaacacccttcctagtggccccagacatgaacttgacatggaatttgagcctcactcggtgtcaccctttacttctcagggacaggacatccagcccaaaagagacctcacccgctttgtgaaatggccccgctatatcaggttgcagcggcagagagccatcctctataagcggctgaaagtgcctcctgcgattaaccagttcacccaggccctggaccgccaaacagctactcagctgcttaagctggcccacaagtacagaccagagacaaagcaagagaagaagcagagactgttggcccgggccgagaagaaggctgctggcaaaggggacgtcccaacgaagagaccacctgtccttcgagcaggagttaacaccgtcaccaccttggtggagaacaagaaagctcagctggtggtgattgcacacgacgtggatcccatcgagctggttgtcttcttgcctgccctgtgtcgtaaaatgggggtcccttactgcattatcaagggaaaggcaagactgggacgtctagtccacaggaagacctgcaccactgtcgccttcacacaggtgaactcggaagacaaaggcgctttggctaagctggtggaagctatcaggaccaattacaatgacagatacgatgagatccgccgtcactggggtggcaatgtcctgggtcctaagtctgtggctcgtatcgccaagctcgaaaaggcaaaggctaaagaacttgccactaaactgggttaaatgtacactgttgagttttctgtacataaaaataattgaaataatacaaattttccttca

SEQ ID NO: 351246 - DNA, 1274 bp, Homo sapiens
aattcgcggccgcgtcgacgctcctcccgccgcccaagatgccgaaaggaaagaaggccaagggaaagaaggtggctccggccccagctgtcgtgaagaagcaggaggctaagaaagtggtgaatcccctgtttgagaaaaggcctaagaattttggcattggacaggacatccagcccaaaagagacctcacccgctttgtgaaatggccccgctatatcaggttgcagcggcagagagccatcctctataagcggctgaaagtgcctcctgcgattaaccagttcacccaggccctggaccgccaaacagctactcagctgcttaagctggcccacaagtacagaccagagacaaagcaagagaagaagcagagactgttggcccgggccgagaagaaggctgctggcaaaggggacgtcccaacgaagagaccacctgtccttcgagcaggagttaacaccgtcaccaccttggtggagaacaagaaagctcagctggtggtgattgcacacgacgtggatcccatcgagctggttgtcttcttgcctgccctgtgtcgtaaaatgggggtcccttactgcattatcaagggaaaggcaagactgggacgtctagtccacaggaagacctgcaccactgtcgccttcacacaggtgaactcggaagacaaaggcgctttggctaagctggtggaagctatcaggaccaattacaatgacagatacgatgagatccgccgtcactggggtggcaatgtcctgggtcctaagtctgtggctcgctaaagaacttgccactaaactgggttaaatgtacactgttgagttttctgtacataaaaataattgaaataatacaaattttccttcataatacaaattttccttcaaacagtgtctgttgagtatctcgggttgaatcttacttggggttagcaagtatctttttgagacacagcctcactctgtcgcccaggctggagtgcagtggtgtgatgtcaaagcaaccttcgcctcccaggtttaggatattctggtgcctcagcatcccaactggctggcccatatttgtgtttttggtagagatggggtttcaccatgttagccaggctggtctgagctcctgaccgcacccggcccttcccacccttaaatacattcttaaaccaggcattttgttccctagagatgtaacttgcatatcaagttttgggaaagttctttggactgaaaccaagccaggattttatgatgaaccagtcatgagctcat

SEQ ID NO: 351247 - DNA, 1490 bp, Homo sapiens
aattcgcggccgcgtcgacgctcctcccgccgcccaagatgccgaaaggaaagaaggccaagggaaagaaggtggctccggccccagctgtcgtgaagaagcaggaggctaagaaagtggtgaatcccctgtttgagaaaaggcctaagaattttggcattggacaggacatccagcccaaaagagacctcacccgctttgtgaaatggccccgctatatcaggttgcagcggcagagagccatcctctataagcggctgaaagtgcctcctgcgattaaccagttcacccaggccctggaccgccaaacagctactcagctgcttaagctggcccacaagtacagaccagagacaaagcaagagaagaagcagagactgttggcccgggccgagaagaaggctgctggcaaaggggacgtcccaacgaagagaccacctgtccttcgagcaggagttaacaccgtcaccaccttggtggagaacaagaaagctcagctggtggtgattgcacacgacgtggatcccatcgagctggttgtcttcttgcctgccctgtgtcgtaaaatgggggtcccttactgcattatcaagggaaaggcaagactgggacgtctagtccacaggaagacctgcaccactgtcgccttcacacaggtgaactcggaagacaaaggcgctttggctaagctggtggaagctatcaggaccaattacaatgacagatacgatgaggtaagaggcagctttacaccaaaatactgtcattcacaaatctttctcccaaataactggctggcttaacctatgagaagttctatctgacgatcagcttggaacagccaaacagaattaacgcaactaataaccttgaaaatctcagaaaacagtaagccaagctaactgcctctttttgtcttttcagatccgccgtcactggggtggcaatgtcctgggtcctaagtctgtggctcgtatcgccaagctcgaaaaggcaaaggctaaagaacttgccactaaactgggttaaatgtacactgttgagttttctgtacataaaaataattgaaataatacaaattttccttcataatacaaattttccttcaaacagtgtctgttgagtatctcgggttgaatcttacttggggttagcaagtatctttttgagacacagcctcactctgtcgcccaggctggagtgcagtggtgtgatgtcaaagcaaccttcgcctcccaggtttaggatattctggtgcctcagcatcccaactggctggcccatatttgtgtttttggtagagatggggtttcaccatgttagccaggctggtctgagctcctgaccgcacccggcccttcccacccttaaatacattcttaaaccaggcattttgttccctagagatgtaacttgcatatcaagttttgggaaagttctttggactgaaaccaagccaggattttatgatgaaccagtcatgagctcat

SEQ ID NO: 351248 - DNA, 1764 bp, Homo sapiens
aattcgcggccgcgtcgacgctcctcccgccgcccaagatgccgaaaggaaagaaggccaagggaaagaaggtggctccggccccagctgtcgtgaagaagcaggaggctaagaaagtggtgaatcccctgtttgagaaaaggcctaagaattttggcattggacaggacatccagcccaaaagagacctcacccgctttgtgaaatggccccgctatatcaggttgcagcggcagagagccatcctctataagcggctgaaagtgcctcctgcgattaaccagttcacccaggccctggaccgccaaacagctactcagctgcttaagctggcccacaagtacagaccagagacaaagcaagagaagaagcagagactgttggcccgggccgagaagaaggctgctggcaaaggggacgtcccaacgaagagaccacctgtccttcgagcaggagttaacaccgtcaccaccttggtggagaacaagaaagctcagctggtggtgattgcacacgacgtggatcccatcgagctggttgtcttcttgcctgccctgtgtcgtaaaatgggggtcccttactgcattatcaagggaaaggcaagactgggacgtctagtccacaggaagacctgcaccactgtcgccttcacacaggtgaactcgtaagtacacagcctggccccaaacttccccccagttcatttaatccatgcctcacagttgtttccttttgccttaaaggccaatcttttagtttaagaaatatatttatctgaacttttgccaatgatggttaagaatttcttcacctgaataaaccatgtggtcagcattgcatctgaggcaaaagactgtcttgagctaaaaggtatttttgcattctaaaagggaaactaaggcaaaaaacccacttttgtttcccctcctgccttttagggaagacaaaggcgctttggctaagctggtggaagctatcaggaccaattacaatgacagatacgatgaggtaagaggcagctttacaccaaaatactgtcattcacaaatctttctcccaaataactggctggcttaacctatgagaagttctatctgacgatcagcttggaacagccaaacagaattaacgcaactaataaccttgaaaatctcagaaaacagtaagccaagctaactgcctctttttgtcttttcagatccgccgtcactggggtggcaatgtcctgggtcctaagtctgtggctcgtatcgccaagctcgaaaaggcaaaggctaaagaacttgccactaaactgggttaaatgtacactgttgagttttctgtacataaaaataattgaaataatacaaattttccttcataatacaaattttccttcaaacagtgtctgttgagtatctcgggttgaatcttacttggggttagcaagtatctttttgagacacagcctcactctgtcgcccaggctggagtgcagtggtgtgatgtcaaagcaaccttcgcctcccaggtttaggatattctggtgcctcagcatcccaactggctggcccatatttgtgtttttggtagagatggggtttcaccatgttagccaggctggtctgagctcctgaccgcacccggcccttcccacccttaaatacattcttaaaccaggcattttgttccctagagatgtaacttgcatatcaagttttgggaaagttctttggactgaaaccaagccaggattttatgatgaaccagtcatgagctcat

SEQ ID NO: 351249 - DNA, 1363 bp, Homo sapiens
aattcgcggccgcgtcgacgctcctcccgccgcccaagatgccgaaaggaaagaaggccaagggaaagaaggtggctccggccccagctgtcgtgaagaagcaggaggctaagaaagtggtgaatcccctgtttgagaaaaggcctaagaattttggcattggacaggacatccagcccaaaagagacctcacccgctttgtgaaatggccccgctatatcaggttgcagcggcagagagccatcctctataagcggctgaaagtgcctcctgcgattaaccagttcacccaggccctggaccgccaaacagctactcagctgcttaagctggcccacaagtacagaccagagacaaagcaagagaagaagcagagactgttggcccgggccgagaagaaggctgctggcaaaggggacgtcccaacgaagagaccacctgtccttcgagcaggagttaacaccgtcaccaccttggtggagaacaagaaagctcagctggtggtgattgcacacgacgtggatcccatcgagctggttgtcttcttgcctgccctgtgtcgtaaaatgggggtcccttactgcattatcaagggaaaggcaagactgggacgtctagtccacaggaagacctgcaccactgtcgccttcacacaggtgaactcgtaagtacacagcctggccccaaacttccccccagttcatttaatccatgcctcacagttgtttccttttgccttaaaggccaatcttttagtttaagaaatatatttatctgaacttttgccaatgatggttaagaatttcttcacctgaataaaccatgtggtcagcattgcatctgaggcaaaagactgtcttgagctaaaaggtatttttgcattctaaaagggaaactaaggcaaaaaacccacttttgtttcccctcctgccttttagggaagacaaaggcgctttggctaagctggtggaagctatcaggaccaattacaatgacagatacgatgaggtaagaggcagctttacaccaaaatactgtcattcacaaatctttctcccaaataactggctggcttaacctatgagaagttctatctgacgatcagcttggaacagccaaacagaattaacgcaactaataaccttgaaaatctcagaaaacagtaagccaagctaactgcctctttttgtcttttcagatccgccgtcactggggtggcaatgtcctgggtcctaagtctgtggctcgtatcgccaagctcgaaaaggcaaaggctaaagaacttgccactaaactgggttaaatgtacactgttgagttttctgtacataaaaataattgaaataatacaaattttccttca

SEQ ID NO: 351250 - DNA, 724 bp, Homo sapiens
  misc_feature (668)..(668): n is a, c, g, or t
aattcgcggccgcgtcgacgctcctcccgccgcccaagatgccgaaaggaaagaaggccaagggaaagaaggtggctccggccccagctgtcgtgaagaagcaggaggctaagaaagtggtgaatcccctgtttgagaaaaggcctaagaattttggcattggacaggacatccagcccaaaagagacctcacccgctttgtgaaatggccccgctatatcaggttgcagcggcagagagccatcctctataagcggctgaaagtgcctcctgcgattaaccagttcacccaggccctggaccgccaaacagctactcagctgcttaagctggcccacaagtacagaccagagacaaagcaagagaagaagcagagactgttggcccgggccgagaagaaggctgctggcaaaggggacgtcccaacgaagagaccacctgtccttcgagcaggagttaacaccgtcaccaccttggtggagaacaagaaagctcagctggtggtgattgcacacgacgtggatcccatcgagctggttgtcttcttgcctgccctgtgtcgtaaaatgggggtcccttactgcattatcaagggaaaggcaagactgggacgtctagtccacaggaagacctgcaccactgtcgccttcacacaggtgaactccaanaggcgctttggctaagttgatggaagcgtcgcgcataggatcctctagagcacctg

SEQ ID NO: 351251 - DNA, 979 bp, Homo sapiens
  misc_feature (756)..(756): n is a, c, g, or t
  misc_feature (759)..(759): n is a, c, g, or t
  misc_feature (765)..(765): n is a, c, g, or t
  misc_feature (768)..(768): n is a, c, g, or t
  misc_feature (773)..(773): n is a, c, g, or t
aattcgcggccgcgtcgacgctcctcccgccgcccaagatgccgaaaggaaagaaggccaagggaaagaaggtggctccggccccagctgtcgtgaagaagcaggaggctaagaaagtggtgaatcccctgtttgagaaaaggcctaagaattttggcattggacaggacatccagcccaaaagagacctcacccgctttgtgaaatggccccgctatatcaggtgcagagactgttggcccgggccgagaagaaggctgctggcaaaggggacgtcccaacgaagagaccacctgtccttcgagcaggagttaacaccgtcaccaccttggtggagaacaagaaagctcagctggtggtgattgcacacgacgtggatcccatcgagctggttgtcttcttgcctgccctgtgtcgtaaaatgggggtcccttactgcattatcaagggaaaggcaagactgggacgtctagtccacaggaagacctgcaccactgtcgccttcacacaggtgaactcggaagacaaaggcgctttggctaagctggtggaagctatcaggaccaattacaatgacagatacgatgagatccgccgtcactggggtggcaatgtcctgggtcctaagtctgtggctcgtatcgccaagctcgaaaaggcaaaggctaaagaacttgccactaaactgggttaaatgtacactgttgagttttctgtacataaaaataattgaaataatacaaattttccttcaanaanacccanaanacaanaaatctgaggccctttcacctccaccgacatgacaagaacaaaagcacgctaacagcacacctgcgaccacgtggcacataggcggtatcctttagaccacaatttcttgaaacaaaggaggaaaatcttgcagcgttcccccattgaagagcacgatataaacccgcaaataggcccggtatcacggtagaacaagatgtatcaa

SEQ ID NO: 351252 - DNA, 813 bp, Homo sapiens
aattcgcggccgcgtcgacgctcctcccgccgcccaagatgccgaaaggaaagaaggccaagggaaagaaggtggctccggccccagctgtcgtgaagaagcaggaggctaagaaagtggtgaatcccctgtttgagaaaaggcctaagaattttggcattggacaggacatccagcccaaaagagacctcacccgctttgtgaaatggccccgctatatcaggttgcagcggcagagagccatcctctataagcggctgaaagtgcctcctgcgattaaccagttcacccaggccctggaccgccaaacagctactcagctgcttaagctggcccacaagtacagaccagagacaaagcaagagaagaagcagagactgttggcccgggccgagaagaaggctgctggcaaaggggacgtcccaacgaagagaccacctgtccttcgagcaggagttaacaccgtcaccaccttggtggagaacaagaaagctcagctggtggtgattgcacacgacgtggatcccatcgagccacaggaagacctgcaccactgtcgccttcacacaggtgaactcggaagacaaaggcgctttggctaagctggtggaagctatcaggaccaattacaatgacagatacgatgagatccgccgtcactggggtggcaatgtcctgggtcctaagtctgtggctcgtatcgccaagctcgaaaaggcaaaggctaaagaacttgccactaaactgggttaaatgtacactgttgagttttctgtacataaaaataattgaaataatacaaattttccttca

SEQ ID NO: 351253 - DNA, 790 bp, Homo sapiens
aattcgcggccgcgtcgacgctcctcccgccgcccaagatgccgaaaggaaagaaggccaagggaaagaaggtggctccggccccagctgtcgtgaagaagcaggaggctaagaaagtggtgaatcccctgtttgagaaaaggcctaagaattttggcattggacaggacatccagcccaaaagagacctcacccgctttgtgaaatggccccgctatatcaggttgcagcggcagagagccatcctctataagcggctgaaagtgcctcctgcgattaaccagttcacccaggccctggaccgccaaacagctactcagctgcttaagctggcccacaagtacagaccagagacaaagcaagagaagaagcagagactgttggcccgggccgagaagaaggctgctggcaaaggggacgtcccaacgaagagaccacctgtccttcgagcaggagttaacaccgtcaccaccttggtggagaacaagaaagctcagctggtggtgattgccacaggaagacctgcaccactgtcgccttcacacaggtgaactcggaagacaaaggcgctttggctaagctggtggaagctatcaggaccaattacaatgacagatacgatgagatccgccgtcactggggtggcaatgtcctgggtcctaagtctgtggctcgtatcgccaagctcgaaaaggcaaaggctaaagaacttgccactaaactgggttaaatgtacactgttgagttttctgtacataaaaataattgaaataatacaaattttccttca

SEQ ID NO: 351254 - DNA, 1017 bp, Homo sapiens
aattcgcggccgcgtcgacgctcctcccgccgcccaagatgccgaaaggaaagaaggccaagggaaagaaggtggctccggccccagctgtcgtgaagaagcaggaggctaagaaagtggtgaatcccctgtttgatgaacaatggtcctacatgaacttcttgtgcattggcatcagggagcagtccagacccaaatagagatcctcacccgtcgtttgtgaaactggccccgtctatagtcaggttgcagtcggcagacgagaccatccgtctatatagctggcgtgagatagtgccctcctggcgatttagagccatgttcacccagggcccttggtaaccgacgagagacagcgtagctcaggctggcttgaaaggctgggctccacagaggttaccatgacccaaggagaccacaagcgagaggagcaagcacagcgagcagcacttgttggggcccgtggcgcgagatacatgaaaggctgggtgggccaaagggggacgtgcccccagactgaaaggagcacctacctgggtcccttcgatgcaggacgttaaccacctgtcacctaccgttgcgtggatgaagccgaagagaaagctcagtcgtggtgagtgagttgcacacgacgatggattcccaatcgagctggttgtcttcttgcctgccctgtgtcgtaaaatgggggtcccttactgcattatcaagggaaaggcaagactgggacgtctagtccacaggaagacctgcaccactgtcgccttcacacaggtgaactcggaagacaaaggcgctttggctaagctggtggaagctatcaggaccaattacaatgacagatacgatgagatccgccgtcactggggtggcaatgtcctgggtcctaagtctgtggctcgtatcgccaagctcgaaaaggcaaaggctaaagaacttgccactaaactgggttaaatgtacactgttgagttttctgtacataaaaataattgaaataatacaaattttccttca

SEQ ID NO: 351255 - DNA, 236 bp, Homo sapiens
  misc_feature (176)..(176): n is a, c, g, or t
  misc_feature (236)..(236): n is a, c, g, or t
aattcgcggccgcgtcgacgctcctcccgccgcccaagatgccgaaaggaaagaaggccaagggaaagaaggtggctccggccccagctgtcgtgaagaagcaggaggctaagaaagtggtgaatcccctgtttgagaaaaggcctaagaattttggcattgcaaaggcatacccnccccaaaagagaaccctactcccttttgttggaaataggcccctttaattaaaagttcan

SEQ ID NO: 351256 - DNA, 1308 bp, Homo sapiens
  misc_feature (916)..(916): n is a, c, g, or t
  misc_feature (919)..(919): n is a, c, g, or t
  misc_feature (926)..(926): n is a, c, g, or t
  misc_feature (929)..(929): n is a, c, g, or t
aattcgcggccgcgtcgacgctcctcccgccgcccaagatgccgaaaggaaagaaggccaagggaaagaaggtggctccggccccagctgtcgtgaagaagcaggaggctaagaaagtggtgaatcccctgtttgagaaaaggcctaagaattttggcattggacaggacatccagcccaaaagagacctcacccgctttgtgaaatggccccgctatatcaggttgcagcggcagagagccatcctctataagcggctgaaagtgcctcctgcgattaaccagttcacccaggccctggaccgccaaacagctactcagctgcttaagctggcccacaagtacagaccagagacaaagcaagagaagaagcagagactgttggcccgggccgagaagaaggctgctggcaaaggggacgtcccaacgaagagaccacctgtccttcgagcaggagttaacaccgtcaccaccttggtggagaacaagaaagctcagctggtggtgattgcacacgacgtggatcccatcgagctggttgtcttcttgcctgccctgtgtcgtaaaatgggggtcccttactgcattatcaagggaaaggcaagactgggacgtctagtccacaggaagacctgcaccactgtcgccttcacacaggtgaactcggaagacaaaggcgctttggctaagctggtggaagctatcaggaccaattacaatgacagatacgatgagatccgccgtcactggggtggcaatgtcctgggtcctaagtctgtggctcgtatcgccaagctcgaaaaggcaaaggctaaagaacttgccactaaactgggttaaatgtacactgttgagttttctgtacataaaaataattgaaataatacaaattttccttcaaaaaacacaacacacancanaacaaanaanaccagagcacaaacacagggcggacaaagacgaacagacgcacatgcacacagggtcacacacccgtttgaaaaagggaacacacccgggcccaataggagacgatacgaagacacgggaacgctataacaaacgagacaacccagagaacaacgagagagcaccacaaccagaggagggacaacatgaaacaaaaaaaaatgcgaaagaacaaaacaatgcgacaaaacaaaaaaatacctctagaaaaaacacaagacaacaatcagccttatatacaactagaccacaaaacagagcaaagacagacaacatcaccatctcttacgaatctatacatcactaacaacaatgcaatcccagcaacacacacaacacc

SEQ ID NO: 351257 - DNA, 941 bp, Homo sapiens
gctggatgccttagaggaggagaagggcacgggagagaacgtggctccggccccagactgtcttgatgaaacacgcgaggctatttaaagtggtctaatctccctgattttggacgatacagatggacctactgaattttggcattggacaggacatcctaggccactactgaagacctcaccgcgcttctgtggaaagtaggtccgccgactatattcatgggttgtcacgtcagtgggagacgacgccctcctcttttaggctgggttgaaaagtgcctcctgggatttagatcaggtcagccctatgtgcccgtagtgcacccgacaatagccagctagctcgacgcctgctgtaaaggctggactcgagcaaatgatacacgtactcgatgagatcgacagtccgtaggcagagactgttggcccgggccgagaagaaggctgctggcaaaggggacgtcccaacgaagagaccacctgtccttcgagcaggagttaacaccgtcaccaccttggtggagaacaagaaagctcagctggtggtgattgcacacgacgtggatcccatcgagctggttgtcttcttgcctgccctgtgtcgtaaaatgggggtcccttactgcattatcaagggaaaggcaagactgggacgtctagtccacaggaagacctgcaccactgtcgccttcacacaggtgaactcggaagacaaaggcgctttggctaagctggtggaagctatcaggaccaattacaatgacagatacgatgagatccgccgtcactggggtggcaatgtcctgggtcctaagtctgtggctcgtatcgccaagctcgaaaaggcaaaggctaaagaacttgccactaaactgggttaaatgtacactgttgagttttctgtacataaaaataattgaaataatacaaattttccttca

SEQ ID NO: 351258 - DNA, 889 bp, Homo sapiens
tgttttcccagtcacgccgttgtgttttcccgatgccgacgttgtgtatttcccagtcacagagttgtggttctggcagctacggaagaagcaggaggctaagaaagtggtgaatcccctgtttgagaaaaggcctaagaattttggcattggacaggacatccagcccaaaagagacctcacccgctttgtgaaatggccccgctatatcaggttgcagcggcagagagccatcctctataagcggctgaaagtgcctcctgcgattaaccagttcacccaggccctggaccgccaaacagctactcagctgcttaagctggcccacaagtacagaccagagacaaagcaagagaagaagcagagactgttggcccgggccgagaagaaggctgctggcaaaggggacgtcccaacgaagagaccacctgtccttcgagcaggagttaacaccgtcaccaccttggtggagaacaagaaagctcagctggtggtgattgcacacgacgtggatcccatcgagctggttgtcttcttgcctgccctgtgtcgtaaaatgggggtcccttactgcattatcaagggaaaggcaagactgggacgtctagtccacaggaagacctgcaccactgtcgccttcacacaggtgaactcggaagacaaaggcgctttggctaagctggtggaagctatcaggaccaattacaatgacagatacgatgagatccgccgtcactggggtggcaatgtcctgggtcctaagtctgtggctcgtatcgccaagctcgaaaaggcaaaggctaaagaacttgccactaaactgggttaaatgtacactgttgagttttctgtacataaaaataattgaaataatacaaattttccttca

SEQ ID NO: 351259 - DNA, 989 bp, Homo sapiens
aattcgcggccgcgtcgacgctcctcccgccgcccaagatgccgaaaggaaagaaggccaagggaaagaaggtggctccggccccagctgtcgtgaagaagcaggaggctaagaaagtggtgaatcccctgtttgagaaaaggcctaagaattttggcattggacaggacatccagcccaaaagagacctcacccgctttgtgaaatggccccgctatatcaggttgcagcggcagagagccatcctctataagcggctgaaagtgcctcctgcgattaaccagttcacccaggccctggaccgccaaacagctactcagctgcttaagctggcccacaagtacagaccagagacaaagcaagagaagaagcagagactgttggcccgggccgagaagaaggctgctggcaaaggggacgtcccaacgaagagaccacctgtccttcgagcaggagttaacaccgtcaccaccttggtggagaacaagaaagctcagctggtggtgattgcacacgacgtggatcccatcgagctggttgtcttcttgcctgccctgtgtcgtaaaatgggggtcccttactgcattatcaagggaaaggcaagactgggacgtctagtccacaggaagacctgcaccactgtcgccttcacacaggtgaactcggaagacaaaggcgctttggctaagctggtggaagctatcaggaccaattacaatgacagatacgatgagatccgccgtcactggggtggcaatgtcctgggtcctaagtctgtggctcgtatcgccaagctcgaaaaggcaaaggctaaagaacttgccactaaactgggttaaatgtacactgttgagttttctgtacataaaaataattgaaataatacaaattttccttcactggcctacaatattgaatatcaaatttcctcaaaaaaaaaaaacaactccggcacctaatccaggggggaaaaaggtaccgaaggcaca

SEQ ID NO: 351260 - DNA, 1132 bp, Homo sapiens
  misc_feature (913)..(914): n is a, c, g, or t
aattcgcggccgcgtcgacgctcctcccgccgcccaagatgccgaaaggaaagaaggccaagggaaagaaggtggctccggccccagctgtcgtgaagaagcaggaggctaagaaagtggtgaatcccctgtttgagaaaaggcctaagaattttggcattggacaggacatccagcccaaaagagacctcacccgctttgtgaaatggccccgctatatcaggttgcagcggcagagagccatcctctataagcggctgaaagtgcctcctgcgattaaccagttcacccaggccctggaccgccaaacagctactcagctgcttaagctggcccacaagtacagaccagagacaaagcaagagaagaagcagagactgttggcccgggccgagaagaaggctgctggcaaaggggacgtcccaacgaagagaccacctgtccttcgagcaggagttaacaccgtcaccaccttggtggagaacaagaaagctcagctggtggtgattgcacacgacgtggatcccatcgagctggttgtcttcttgcctgccctgtgtcgtaaaatgggggtcccttactgcattatcaagggaaaggcaagactgggacgtctagtccacaggaagacctgcaccactgtcgccttcacacaggtgaactcggaagacaaaggcgctttggctaagctggtggaagctatcaggaccaattacaatgacagatacgatgagatccgccgtcactggggtggcaatgtcctgggtcctaagtctgtggctcgtatcgccaagctcgaaaaggcaaaggctaaagaacttgccactaaactgggttaaatgtacactgttgagttttctgtacataaaaataattgaaataatacaaattttccttcaacaaacacaatcanncaaaaacacctccgaagcgcactccaattgctcagaggttggcggacaacaggcggtcacacacacacatgcggcccacgtcggtccattagccgggttcaccctgaacccccaggttatctgtcgtcacccaacgtggccacaaaatctcgccgggtaccccataattggagacccggcattacattcggaacacgccagggttaacccggcttcag

SEQ ID NO: 351261 - DNA, 1411 bp, Homo sapiens
  misc_feature (1408)..(1408): n is a, c, g, or t
aattcgcggccgcgtcgacgctcctcccgccgcccaagatgccgaaaggaaagaaggccaagggaaagaaggtggctccggccccagctgtcgtgaagaagcaggaggctaagaaagtggtgaatcccctgtttgagaaaaggcctaagaattttggcattggacaggacatccagcccaaaagagacctcacccgctttgtgaaatggccccgctatatcaggttgcagcggcagagagccatcctctataagcggctgaaagtgcctcctgcgattaaccagttcacccaggccctggaccgccaaacagctactcagctgcttaagctggcccacaagtacagaccagagacaaagcaagagaagaagcagagactgttggcccgggccgagaagaaggctgctggcaaaggggacgtcccaacgaagagaccacctgtccttcgagcaggagttaacaccgtcaccaccttggtggagaacaagaaagctcagctggtggtgattgcacacgacgtggatcccatcgagctggttgtcttcttgcctgccctgtgtcgtaaaatgggggtcccttactgcattatcaagggaaaggcaagactgggacgtctagtccacaggaagacctgcaccactgtcgccttcacacaggtgaactcggaagacaaaggcgctttggctaagctggtggaagctatcaggaccaattacaatgacagatacgatgagatccgccgtcactggggtggcaatgtcctgggtcctaagtctgtggctcgtatcgccaagctcgaaaaggcaaaggctaaagaacttgccactaaactgggttaaatgtacactgttgagttttctgtacataaaaataattgaaataatacaaattttccttcaaacaaaaaaatacgaaaaacccggagggcgtctgatcgtgcgggcgtggggcagaaagggcggctgtgaactcggcgcactgtggcgcaagctggaatgcctgacgccaggttgcttgtgacccccggggttgcatctgcagagacccctattagggagcgcggatagatggcagaacagcgcaggtaagcctgcatatgcaccgccaaacagaagaaaaaaaaggatatcaacaaattacaactaccgagagatcgtaacccacctccctacataacacaccatacaataaaaacgatcgtaaacctacaaatccattaacccatatccgcaccacgacaactattaccaacatactataatataacaccaacactcacacagtatgttaaaccatccataaatacaaacaacaatctaaaaccatatagaatacagataaaaacaacgacgaaaatattaagaatactaaaaaaaaaaaaaaaaaaaaaaaaaaaacaaaaaaaaanaac

SEQ ID NO: 351262 - DNA, 1001 bp, Homo sapiens
aattcgcggccgcgtcgacgctcctcccgccgcccaagatgccgaaaggaaagaaggccaagggaaagaaggtggctccggccccagctgtcgtgaagaagcaggaggctaagaaagtggtgaatcccctgtttgagaaaaggcctaagaattttggcattggacaggacatccagcccaaaagagacctcacccgctttgtgaaatggccccgctatatcaggttgcagcggcagagagccatcctctataagcggctgaaagtgcctcctgcgattaaccagttcacccaggccctggaccgccaaacagctactcagctgcttaagctggcccacaagtacagaccagagacaaagcaagagaagaagcagagactgttggcccgggccgagaagaaggctgctggcaaaggggacgtcccaacgaagagaccacctgtccttcgagcaggagttaacaccgtcaccaccttggtggagaacaagaaagctcagctggtggtgattgcacacgacgtggatcccatcgagctggttgtcttcttgcctgccctgtgtcgtaaaatgggggtcccttactgcattatcaagggaaaggcaagactgggacgtctagtccacaggaagacctgcaccactgtcgccttcacacaggtgaactcggaagacaaaggcgctttggctaagctggtggaagctatcaggaccaattacaatgacagatacgatgagatccgccgtcactggggtggcaatgtcctgggtcctaagtctgtggctcgtatcgccaagctcgaaaaggcaaaggctaaagaacttgccactaaactgggttaaatgtacactgttgagttttctgtacataaaaataattgaaataatacaaattttccttcacaaaaaccccaaagaaacgcgggcaatatgtcgggggggacacggaatacaagggcaggcaagcgttacggcccctccgtgacaaggcagatcgcggcccta

SEQ ID NO: 351263 - DNA, 956 bp, Homo sapiens
aattcgcggccgcgtcgacgctcctcccgccgcccaagatgccgaaaggaaagaaggccaagggaaagaaggtggctccggccccagctgtcgtgaagaagcaggaggctaagaaagtggtgaatcccctgtttgagaaaaggcctaagaattttggcattggacaggacatccagcccaaaagagacctcacccgctttgtgaaatggccccgctatatcaggttgcagcggcagagagccatcctctataagcggctgaaagtgcctcctgcgattaaccagttcacccaggccctggaccgccaaacagctactcagctgcttaagctggcccacaagtacagaccagagacaaagcaagagaagaagcagagactgttggcccgggccgagaagaaggctgctggcaaaggggacgtcccaacgaagagaccacctgtccttcgagcaggagttaacaccgtcaccaccttggtggagaacaagaaagctcagctggtggtgattgcacacgacgtggatcccatcgagctggttgtcttcttgcctgccctgtgtcgtaaaatgggggtcccttactgcattatcaagggaaaggcaagactgggacgtctagtccacaggaagacctgcaccactgtcgccttcacacaggtgaactcggaagacaaaggcgctttggctaagctggtggaagctatcaggaccaattacaatgacagatacgatgagatccgccgtcactggggtggcaatgtcctgggtcctaagtctgtggctcgtatcgccaagctcgaaaaggcaaaggctaaagaacttgccactaaactgggttaaatgtacactgttgagttttctgtacataaaaataattgaaataatacaaattttccttcatgcgctcatacgtcctccaccgactcctgcgcccataaaaacacctcctataaagcc

SEQ ID NO: 351264 - DNA, 1173 bp, Homo sapiens
aattcgcggccgcgtcgacgctcctcccgccgcccaagatgccgaaaggaaagaaggccaagggaaagaaggtggctccggccccagctgtcgtgaagaagcaggaggctaagaaagtggtgaatcccctgtttgagaaaaggcctaagaattttggcattggacaggacatccagcccaaaagagacctcacccgctttgtgaaatggccccgctatatcaggttgcagcggcagagagccatcctctataagcggctgaaagtgcctcctgcgattaaccagttcacccaggccctggaccgccaaacagctactcagctgcttaagctggcccacaagtacagaccagagacaaagcaagagaagaagcagagactgttggcccgggccgagaagaaggctgctggcaaaggggacgtcccaacgaagagaccacctgtccttcgagcaggagttaacaccgtcaccaccttggtggagaacaagaaagctcagctggtggtgattgcacacgacgtggatcccatcgagctggttgtcttcttgcctgccctgtgtcgtaaaatgggggtcccttactgcattatcaagggaaaggcaagactgggacgtctagtccacaggaagacctgcaccactgtcgccttcacacaggtgaactcgtaagtacacagcctggccccaaacttccccccagttcatttaatccatgcctcacagttgtttccttttgccttaaaggccaatcttttagtttaagaaatatatttatctgaacttttgccaatgatggttaagaatttcttcacctgaataaaccatgtggtcagcattgcatctgaggcaaaagactgtcttgagctaaaaggtatttttgcattctaaaagggaaactaaggcaaaaaacccacttttgtttcccctcctgccttttagggaagacaaaggcgctttggctaagctggtggaagctatcaggaccaattacaatgacagatacgatgagatccgccgtcactggggtggcaatgtcctgggtcctaagtctgtggctcgtatcgccaagctcgaaaaggcaaaggctaaagaacttgccactaaactgggttaaatgtacactgttgagttttctgtacataaaaataattgaaataatacaaattttccttca

SEQ ID NO: 351265 - DNA, 1176 bp, Homo sapiens
aattcgcggccgcgtcgacgctcctcccgccgcccaagatgccgaaaggaaagaaggccaagggaaagaaggtggctccggccccagctgtcgtgaagaagcaggaggctaagaaagtggtgaatcccctgtttgagaaaaggcctaagaattttggcattggacaggacatccagcccaaaagagacctcacccgctttgtgaaatggccccgctatatcaggttgcagcggcagagagccatcctctataagcggctgaaagtgcctcctgcgattaaccagttcacccaggccctggaccgccaaacagctactcagctgcttaagctggcccacaagtacagaccagagacaaagcaagagaagaagcagagactgttggcccgggccgagaagaaggctgctggcaaaggggacgtcccaacgaagagaccacctgtccttcgagcaggagttaacaccgtcaccaccttggtggagaacaagaaagctcagctggtggtgattgcacacgacgtggatcccatcgaggtgcgtttgcctgttgactgctaacccaagggcttctggcagtaccaggaagagagagtagacctaatgccaagtcagtgatgggaccgaagtgggtgagggcagtactgacacagatccaacacatgcgtggctcttgcaatgatgtgaatctctcactgaattcaaccttgaagtgcgaatccatgagctttttaaccctgagcaattgttacaagctaactgaaatttgctgcttttggtcaaaatacagtcttcagctaatgctttcttccagctggttgtcttcttgcctgccctgtgtcgtaaaatgggggtcccttactgcattatcaagggaaaggcaagactgggacgtctagtccacaggaagacctgcaccactgtcgccttcacacaggtgaactcggaagacaaaggcgctttggctaagctggtggaagctatcaggaccaattacaatgacagatacgatgagatccgccgtcactggggtggcaatgtcctgggtcctaagtctgtggctcgtatcgccaagctcgaaaaggcaaaggctaaagaacttgccactaaactgggttaaatgtacactgttgagttttctgtacataaaaataattgaaataatacaaattttccttca

SEQ ID NO: 351266 - DNA, 1074 bp, Homo sapiens
aattcgcggccgcgtcgacgctcctcccgccgcccaagatgccgaaaggaaagaaggccaagggaaagaaggtggctccggccccagctgtcgtgaagaagcaggaggctaagaaagtggtgaatcccctgtttgagaaaaggcctaagaattttggcattggacaggacatccagcccaaaagagacctcacccgctttgtgaaatggccccgctatatcaggttgcagcggcagagagccatcctctataagcggctgaaagtgcctcctgcgattaaccagttcacccaggccctggaccgccaaacagctactcagctgcttaagctggcccacaagtacagaccagagacaaagcaagagaagaagcagagactgttggcccgggccgagaagaaggctgctggcaaaggggacgtcccaacgaagagaccacctgtccttcgagcaggagttaacaccgtcaccaccttggtggagaacaagaaagctcagctggtggtgattgcacacgacgtggatcccatcgaggtgcgtttgcctgttgactgctaacccaagggcttctggcagtaccaggaagagagagtagacctaatgccaagtcagtgatgggaccgaagtgggtgagggcagtactgacacagatccaacacatgcgtggctcttgcaatgatgtgaatctctcactgaattcaaccttgaactggttgtcttcttgcctgccctgtgtcgtaaaatgggggtcccttactgcattatcaagggaaaggcaagactgggacgtctagtccacaggaagacctgcaccactgtcgccttcacacaggtgaactcggaagacaaaggcgctttggctaagctggtggaagctatcaggaccaattacaatgacagatacgatgagatccgccgtcactggggtggcaatgtcctgggtcctaagtctgtggctcgtatcgccaagctcgaaaaggcaaaggctaaagaacttgccactaaactgggttaaatgtacactgttgagttttctgtacataaaaataattgaaataatacaaattttccttca

SEQ ID NO: 351267 - DNA, 1218 bp, Homo sapiens
  misc_feature (1215)..(1215): n is a, c, g, or t
aattcgcggccgcgtcgacgctcctcccgccgcccaagatgccgaaaggaaagaaggccaagggaaagaaggtggctccggccccagctgtcgtgaagaagcaggaggctaagaaagtggtgaatcccctgtttgagaaaaggcctaagaattttggcattggacaggacatccagcccaaaagagacctcacccgctttgtgaaatggccccgctatatcaggttgcagcggcagagagccatcctctataagcggctgaaagtgcctcctgcgattaaccagttcacccaggccctggaccgccaaacagctactcagctgcttaagctggcccacaagtacagaccagagacaaagcaagagaagaagcagagactgttggcccgggccgagaagaaggctgctggcaaaggggacgtcccaacgaagagaccacctgtccttcgagcaggagttaacaccgtcaccaccttggtggagaacaagaaagctcagctggtggtgattgcacacgacgtggatcccatcgaggtgcgtttgcctgttgactgctaacccaagggcttctggcagtaccaggaagagagagtagacctaatgccaagtcagtgatgggaccgaagtgggtgagggcagtactgacacagatccaacacatgcgtggctcttgcaatgatgtgaatctctcactgaattcaaccttgaagtgcgaatccatgagctttttaaccctgagcaattgttacaagctaactgaaatttgctgcttttggtcaaaatacagtcttcagctaatgctttcttccagctggttgtcttcttgcctgccctgtgtcgtaaaatgggggtcccttactgcattatcaagggaaaggcaagactgggacgtctagtccacaggaagacctgcaccactgtcgccttcacacaggtgaactcggaagacaaaggcgctttggctaagctggtggaagctatcaggaccaattacaatgacagatacgatgagatccgccgtcactggggtggcaatgtcctgggtcctaagtctgtggctcgtatcgccaagctcgaaaaggcaaaggctaaagaacttgccactaaactgggttaaatgtacactgttgagttttctgtacataaaaataattgaaataatacaaattttccttcaaaaaaaaaaaaaaaaaaaaaaaaaaaaacaaaaaaaaanaac

SEQ ID NO: 351268 - DNA, 1363 bp, Homo sapiens
aattcgcggccgcgtcgacgctcctcccgccgcccaagatgccgaaaggaaagaaggccaagggaaagaaggtggctccggccccagctgtcgtgaagaagcaggaggctaagaaagtggtgaatcccctgtttgagaaaaggcctaagaattttggcattggacaggacatccagcccaaaagagacctcacccgctttgtgaaatggccccgctatatcaggttgcagcggcagagagccatcctctataagcggctgaaagtgcctcctgcgattaaccagttcacccaggccctggaccgccaaacagctactcagctgcttaagctggcccacaagtacagaccagagacaaagcaagagaagaagcagagactgttggcccgggccgagaagaaggctgctggcaaaggggacgtcccaacgaagagaccacctgtccttcgagcaggtgagtaggccccaccttagggtgaacactgggggcgggctgttgcagtgatgtaaaatttcttggcctgaaattactgtgaagagtaaaaccgagctttttaacactgagtcagcagctgagcccagcagcttcttgtgactagagcaggccctgtgagtgctcacaaagtggttgtgtgttctaggagttaacaccgtcaccaccttggtggagaacaagaaagctcagctggtggtgattgcacacgacgtggatcccatcgaggtgcgtttgcctgttgactgctaacccaagggcttctggcagtaccaggaagagagagtagacctaatgccaagtcagtgatgggaccgaagtgggtgagggcagtactgacacagatccaacacatgcgtggctcttgcaatgatgtgaatctctcactgaattcaaccttgaagtgcgaatccatgagctttttaaccctgagcaattgttacaagctaactgaaatttgctgcttttggtcaaaatacagtcttcagctaatgctttcttccagctggttgtcttcttgcctgccctgtgtcgtaaaatgggggtcccttactgcattatcaagggaaaggcaagactgggacgtctagtccacaggaagacctgcaccactgtcgccttcacacaggtgaactcggaagacaaaggcgctttggctaagctggtggaagctatcaggaccaattacaatgacagatacgatgagatccgccgtcactggggtggcaatgtcctgggtcctaagtctgtggctcgtatcgccaagctcgaaaaggcaaaggctaaagaacttgccactaaactgggttaaatgtacactgttgagttttctgtacataaaaataattgaaataatacaaattttccttca

SEQ ID NO: 351269 - DNA, 819 bp, Homo sapiens
aattcgcggccgcgtcgacgctcctcccgccgcccaagatgccgaaaggaaagaaggccaagggaaagaaggtggctccggccccagctgtcgtgaagaagcaggaggctaagaaagtggtgaatcccctgtttgagaaaaggcctaagaattttggcattggacaggacatccagcccaaaagagacctcacccgctttgtgaaatggccccgctatatcaggttgcagcggcagagagccatcctctataagcggctgaaagtgcctcctgcgattaaccagttcacccaggccctggaccgccaaacagctactcagctgcttaagctggcccacaagtacagaccagagacaaagcaagagaagaagcagagactgttggcccgggccgagaagaaggctgctggcaaaggggacgtcccaacgaagagaccacctgtccttcgagcagctggttgtcttcttgcctgccctgtgtcgtaaaatgggggtcccttactgcattatcaagggaaaggcaagactgggacgtctagtccacaggaagacctgcaccactgtcgccttcacacaggtgaactcggaagacaaaggcgctttggctaagctggtggaagctatcaggaccaattacaatgacagatacgatgagatccgccgtcactggggtggcaatgtcctgggtcctaagtctgtggctcgtatcgccaagctcgaaaaggcaaaggctaaagaacttgccactaaactgggttaaatgtacactgttgagttttctgtacataaaaataattgaaataatacaaattttccttca

SEQ ID NO: 351270 - DNA, 1637 bp, Homo sapiens
aattcgcggccgcgtcgacgctcctcccgccgcccaagatgccgaaaggaaagaaggccaagggaaagaaggtggctccggccccagctgtcgtgaagaagcaggaggctaagaaagtggtgaatcccctgtttgagaaaaggcctaagaattttggcattggacaggacatccagcccaaaagagacctcacccgctttgtgaaatggccccgctatatcaggttgcagcggcagagagccatcctctataagcggctgaaagtgcctcctgcgattaaccagttcacccaggccctggaccgccaaacagctactcagctgcttaagctggcccacaagtacagaccagagacaaagcaagagaagaagcagagactgttggcccgggccgagaagaaggctgctggcaaaggggacgtcccaacgaagagaccacctgtccttcgagcaggtgagtaggccccaccttagggtgaacactgggggcgggctgttgcagtgatgtaaaatttcttggcctgaaattactgtgaagagtaaaaccgagctttttaacactgagtcagcagctgagcccagcagcttcttgtgactagagcaggccctgtgagtgctcacaaagtggttgtgtgttctaggagttaacaccgtcaccaccttggtggagaacaagaaagctcagctggtggtgattgcacacgacgtggatcccatcgaggtgcgtttgcctgttgactgctaacccaagggcttctggcagtaccaggaagagagagtagacctaatgccaagtcagtgatgggaccgaagtgggtgagggcagtactgacacagatccaacacatgcgtggctcttgcaatgatgtgaatctctcactgaattcaaccttgaagtgcgaatccatgagctttttaaccctgagcaattgttacaagctaactgaaatttgctgcttttggtcaaaatacagtcttcagctaatgctttcttccagctggttgtcttcttgcctgccctgtgtcgtaaaatgggggtcccttactgcattatcaagggaaaggcaagactgggacgtctagtccacaggaagacctgcaccactgtcgccttcacacaggtgaactcgtaagtacacagcctggccccaaacttccccccagttcatttaatccatgcctcacagttgtttccttttgccttaaaggccaatcttttagtttaagaaatatatttatctgaacttttgccaatgatggttaagaatttcttcacctgaataaaccatgtggtcagcattgcatctgaggcaaaagactgtcttgagctaaaaggtatttttgcattctaaaagggaaactaaggcaaaaaacccacttttgtttcccctcctgccttttagggaagacaaaggcgctttggctaagctggtggaagctatcaggaccaattacaatgacagatacgatgagatccgccgtcactggggtggcaatgtcctgggtcctaagtctgtggctcgtatcgccaagctcgaaaaggcaaaggctaaagaacttgccactaaactgggttaaatgtacactgttgagttttctgtacataaaaataattgaaataatacaaattttccttca

SEQ ID NO: 351271 - DNA, 605 bp, Homo sapiens
aattcgcggccgcgtcgacgctcctcccgccgcccaagatgccgaaaggaaagaaggccaagggaaagaaggtggctccggccccagctgtcgtgaagaagcaggaggctaagaaagtggtgaatcccctgtttgagaaaaggcctaagaattttggcattggacaggacatccagcccaaaagagacctcacccgctttgtgaaatggccccgctatatcaggttgcagcggcagagagccatcctctataagcggctgaaagtgcctcctgcgattaaccagttcacccaggccctggaccgccaaacagctactcagctgcttaagctggcccacaagtacagaccagagacaaagcaagagaagaaggaagacaaaggcgctttggctaagctggtggaagctatcaggaccaattacaatgacagatacgatgagatccgccgtcactggggtggcaatgtcctgggtcctaagtctgtggctcgtatcgccaagctcgaaaaggcaaaggctaaagaacttgccactaaactgggttaaatgtacactgttgagttttctgtacataaaaataattgaaataatacaaattttccttca

SEQ ID NO: 351272 - DNA, 924 bp, Homo sapiens
aggcccaaccgagtctgcctccactgctacgcattcctcactggaaatgtgctgcctgaggccaaggaggacaagaggcggggcatcctggagaaagggtcctcagccacgcctgaccagagcctgatgtgcagcttcctgcagctcatcggggacaagtggggcaagagcggcccccggggctggtgtgtgatccctcgggatgaccccctcgtgctctatgtctatgctgcccctcaggacatgagggctcacacctccatccccctgctgggctaccaggtgactgttgggccccagggggaccctcgggtcttccagctacagcagtcaggccagctctacaccttcaaggccgagacggaggagctgaagggccgctgggtgaaggccatggagcgggcggccagtggctggagccccagctggcccaacgatggggacctgtccgactgagccactgccagccgctctcctgcccacctctccccaccctgaacccagctcctgccacagactgaccctgtggcctcagtgacccactgccccaagtggtgctttcagagaattgattcagccatctgcgcccaggccacgtgtcccgatctgggattagaaaatatgggtccattcctttctagaaaggggacaaccaagtgtctcagtttgccttgcggggagggggctcctgggccatgggacttccagtgctaaaactgggaaagccccaggtaaccccggactggtggtcaccatagtatggtttttcatttgtatctcctggggagcttttaaagagtactggtgaaaaacacatagtaaattaattttaaaaatgtaaaaaacaatgcctgtactgaagtaccaccaccgatttaaatgggctgagttgggggaggcatggagtaaatggcaggggatcct

SEQ ID NO: 351273 - DNA, 468 bp, Homo sapiens
agaattccacgttacgagctgctgctcaaggagtacatcagaaagctgccagcccaggccccagaccaggccgatgcccagaaagccctggacatgatcttctcagctgcccagcactccaatgcagccatcactgagatggagcggctgcaggacctgtgggaggtgtaccagcgcctgggcctcgaggacgacatagtagacccctctaacaccctgctccgtgagggcccggtcctcaagatctccttccgccgcaacgaccccatggagcgctaccttttcttggtaagcctgtctctactaaaaatacaaaattagccgggtgtggtggtgtacacctgtaatcccagctactcgggaggctgaggagggagaatcgcttgaacccaggaggtggaggttgcagtgagcccagatcaccccactgtactccagcccaggcaacaaaagcaaaactccatctca

SEQ ID NO: 351274 - DNA, 870 bp, Homo sapiens
agaattccacgttacgagctgctgctcaaggagtacatcagaaagctgccagcccaggccccagaccaggccgatgcccagaaagccctggacatgatcttctcagctgcccagcactccaatgcagccatcactgagatggagcggctgcaggacctgtgggaggtgtaccagcgcctgggcctcgaggacgacatagtagacccctctaacaccctgctccgtgagggcccggtcctcaagatctccttccgccgcaacgaccccatggagcgctaccttttcttggtaagcttcaaggccgagacggaggagctgaagggccgctgggtgaaggccatggagcgggcggccagtggctggagccccagctggcccaacgatggggacctgtccgactgagccactgccagccgctctcctgcccacctctccccaccctgaacccagctcctgccacagactgaccctgtggcctcagtgacccactgccccaagtggtgctttcagagaattgattcagccatctgcgcccaggccacgtgtcccgatctgggattagaaaatatgggtccattcctttctagaaaggggacaaccaagtgtctcagtttgccttgcggggagggggctcctgggccatgggacttccagtgctaaaactgggaaagccccaggtaaccccggactggtggtcaccatagtatggtttttcatttgtatctcctggggagcttttaaagagtactggtgaaaaacacatagtaaattaattttaaaaatgtaaaaaacaatgcctgtactgaagtaccaccaccgatttaaatgggctgagttgggggaggcatggagtaaatggcaggggatcct

SEQ ID NO: 351275 - DNA, 894 bp, Homo sapiens
gctgtagtttatgccttcataaagctctttctgtttgtttcagttctgggacatggaaacagttgcttattgttttctgttaggttcttggtattttatgaatttttgagtttagcacttactatgttaagttgcagatttttttctcattttgtcactttttttttaatctgtgttgcagaagttttttgttgctaattgaatgtttatgtagtctggattttgcctgtagttagaaagagctttcctattcctggattattcaaagtagattaggttgtattgaatagtacacctttcctccactgatttgagaataccttctttatcttatactaaatttccacatgtatttgagtttgcttctagattttctgttctgttccagtggttggatatttcttcatacacgtctatcatactgttttgactatagaggcttttcagtgtcatttaatatctgtgatggcaatccctactcaaagctctttgttttcagtgttcctgtattgctcttttgttaatcccttaatataaaagtaaataataacccagttggcatattattttgatgacattaaattggggagaatagatactgtgatttttgaagcttcctacaaatatgatatgcttttcatttgtgcaagtactttagtataatgttaactggtggtggtaatggaggaaattctgtcatgttccttacttttagtttcctctagcgctttctatttttttattttttttcagatggagtcttgctctgtcttctatccaggctgaggcaggaggatcacttgaacccagtagttcaaggctgcagtgagctatggttacaccactgcactccagcctgggtgacagagcaagatgccatctcttaaaaaaaaa

SEQ ID NO: 351276 - DNA, 426 bp, Homo sapiens
catggaaaaagagtatttggctttttaaaccaatcgagtcacatgcatgctttcccccttccacgttggactacatcaatatttagtgttagtatttttataaatagataaatattgttcgcaaattttatttgctgtctattgctgtgtaacaaattcctccaaaattattggctttaaacaacatttattatcccatagtttctatgagttgagaatctaagcatggcttagctgggtccactagctcggggtctctcacaaggccacagatcaaggtgttggtcagtggtttgtgcccttagtcccagctacttgggaggctgaggcaggaggatcacttgaacccagtagttcaaggctgcagtgagctatggttacaccactgcactccagcctgggtgacagagcaagatgccatctctt

SEQ ID NO: 351277 - DNA, 149 bp, Homo sapiens
ggtgaacggcaccacctctcacctggctgctcaggatcacaggagtcactccccacttctccctcttcctccctcccccaacatccaatcagttgatcaagtcctccctgcatttacctataaacatctctggagcctgttcctcatct

SEQ ID NO: 351278 - DNA, 584 bp, Homo sapiens
ttcggtaaagaaaaataatgctttatattatgttgctgcataatttggacatatattgggagaaagcagagaggataatagcaaaaaaaaggaccaacctaagattgcagtggttcatggactcagagctaaaccctgtaaagtgagcctgcaaatacttaagtcacttacttaactctgattattttaaataacattagtggttactttggttatgttttcccaacttcttgtgaccttctggagacagagtgttgagaaattaacttgcaaaaaatgaaatgtgtaaattaggttgagggtttcttttctttttttaaaaaaacccacagaatatcctttttctttttaaatttgtaggttgcaataaaaataattgataaaacacgattagattcaagcaatttggagaaaaccaggtaaggggtcagcttgcctttctctgctaatcctggcaaatgtgttatattttatttccaacagcataagtctgcaatttctgaaggtggcttcccttttggggagtgtgtggaagttgggcatttggttgtataaggtaaatagattgatttttataggctgtg

SEQ ID NO: 351279 - DNA, 871 bp, Homo sapiens
acatgcggcgcggccccggaggcagcagcagcggcggcggcagccggagcagtaggcacccgagcagcgccagcggccgagcgggcggcttcctggcctgggcgctccggtggcggcggaggtgcgcgcggagccatggttatcatgtcggagttcagcgcggaccccgcgggccagggtcagggccagcagaagcccctccgggtgggtttttacgacatcgagcggaccctgggcaaaggcaacttcgcggtggtgaagctggcgcggcatcgagtcaccaaaacgcaggttgcaataaaaataattgataaaacacgattagattcaagcaatttggagaaaatctatcgtgaggttcagctgatgaagcttctgaaccatccacacatcataaagctttgttatggaaacaaaggacatgctttacatcgtcactgaatttgctaaaaatggagaaatgtttgattatttgacttccaacgggcacctgagtgagaacgaggcgcggaagaagttctggcaaatcctgtcggccgtggagtactgtcacgaccatcacatcgtccaccgggacctcaagaccgagaacctcctgctggatggcaacatggacatcaagctggcagtttgggaatttctacaagtcaggagagcctctgtccacgtggtgtgggagccccccgtatgccgccccggaagtctttgaggggaaggagtatgaaggcccccagctggacatctggagcctgggcgtggtgctgtacgtcctggtctgcggttctctccccttcgatgggcctaacctgccgacgctgagacagcgggtgctggagggccgcttccgcatccccttcttcatgtctcaagg

SEQ ID NO: 351280 - DNA, 4305 bp, Homo sapiens
cggctacgtcacggtggcaggttctaagcgctgctgggcaccgtaaggccgccgtgtgtaccttccagtagctacgggctggtggaagcgctgctcacagtcagtgtcggtacgtcttcgtccgcccttaccctccttatcctgctccaggtagcggagagccgcctcccgccgcgcccccgccaccgaggcccgggtcagaggctagaggccgcccgcccctgcgcggccctttcccctgagcccgcggagcccgccgccccgggcctcggggcgacgatgctggagtccattcgcgtgacggaaaagcttcactggcctgagcaagaacttgctaagaagtctattctaaatgcagaagattcattgatcattgacaacaaaagaagcatttcacatttgtcctcgggagtgctaaaagacattttcacaactggaaccagtagttacaatgtcctactacagagcaaggaggaaaaaaagtatcattcacaaaaacagtcttcctccacctactccaaaagatgtagaaaacccagcaaatctcctaacacttctcgtagcaaagatcctcgcaggatgaaagccctggtgcctgtgacaagcagtggtacttggtactgcctggagaggcggcctgctgtttttgtcactagttcagtgtcaagtcctgtaaagtttacacatgatatctctgttacagggaatggcatagtactgccacctaaacccaaaagcaaggtcaagtggtgccatttctccactcttccaaagccaaagcctcagctgtctagaagctttgaaaagggagatgacttttctgggaagaaattttgtatattgactgctataaaacccaccaacttagagaaagaaaaactgagattcttcaaatctgactatacctacaatcctcagtttgagtatgccaatcctgctctgccaagcgtattagctaagcatagccacgcatctgaccgatttcttaagcagattgtagttcatctcactgaggacctgctttcccgagcgtcaatgacagtagtaaatggatgtccgactctgactatcaatgtgtccactgcacgtgagcattggctggagggaatgctgaggcatgaaataggtacacattattttcgaggtattaacaacctccagcagccatggaacagttggactggacgtaaaaaacatgagctaaagccaaataatcccacagaggaaggactagcaagcattcacagtgttctgtttagaaaagacccttttttatggagggctgccctcctctactacactgtttatcaagccagccaaatgtctttttgtgaactctttaaagatattggcaggtttgtcaaggaccccaatacaagatgggattattgtgtacgggccaagaggggatggactgatacttcccaaccagggtgttttagtaaagaccaggtatacttggatggaattcttcaaatcctccgatacagagataccatagacttccatctgctgactgctctcgggaaggtttcttatgaagatgtggatcgcttaaaaggattggcagttaccgaaaacatgagggtccctcatttcctgcaggaccatggccgatatatggaacacttagagaagatcatggaagtgaatgaactgactgacagggaactgaaagatcttatatagtaattagcgttctggcaaacatagctaagctatgcctccatgtatattaccagttaggtgcagttagcaccagaagatttataaaagaagaaagactacttgtgttttctgaagaagggtcttcagtattcagcggaatttttaggttaagtacagatcttaaactatttccctaaaatgtttctataggctgcagggggaagttattcctattttctgaatctcgacagagtcagatgaaaatactactgctgagcatttttgaagactcttggtcaaattgcatgataaatttctgcctgagcagtaagcactggcctagtgcttctgcctaaatatggaggtcagctccaactggagactggctgaattccattgctgttcagactccaaagttatattttatttgataaataatggtaattattctcctttgaaaaattagttttgtgttgctccaaaaagctagctatatatctcagctttcttatttcttttatatgttgagggattttaaagggagaggaaaagcaatttgaaaatttttcattaagtgttttattttaacattattgtttcaccttatcagcttataggaactaaattagagaatcacctctttttgtccggttatctcttaactatgttttcatttgctgaaacatattgtacccttttaaattttttacagagttttaacgtcttttccactgcatcctttataaaaataagtacaaattccagagaggttttcctacacaaatacaaaataattggggaagggctactcaccttttttatgaaacagaatatgtaacaagcagaggacaaatagactgacctggttaaacgtaggttctggatgttgatgggtagcacctgcagtaaacttgaccatgctctgaaaaaagaaatttctgggtattgatggtttataaagccagctttgtgctattggttcagtatattttatcaaatctttgacttcatcaacccagtaatgacatagtttaaattttaaaatgagagttctgttttgctgtatttctcctgctagcctagctttgtattttatcatcagcttcagtatatacttgtatatatatacctggattcaaatggttcttcatacaacttaatgatcagaaagaatgctgctgtaaacaccccactcaagattgctgctggaatttctacccaaagctgtctgagagtttatctttacctcagtgcaggcttaaataatggtgctaatactggtagatatatactgtgaagcctggttcacattcatgctagaaaatgattttgggaaatcttttataggagaggttacatgatttttctctttcacatatctagaaggacttgcctcaaagaagaatgttgcagcaaacaggatatactctagctggtgcccaaaggttcttgcaaaaccatgaatcttgcttttagcagtaaagggccagacactttggagcattgaaaggccttagcccctgctccccaactacgtgccatgctgggtagtgtgtatcctgtacatctgtgtgccaggctggggcagactgtgccaatgctcaccaaacactagaatctgctcttacacctctagcatgtatctcgttgtagcagagttgtgcactttctcagcattgtgtagtgttttctaattgcatctaaaaacttatcaaaagtgattgtgaaaacagtgtcttagaagtataaacagaaatggcaatatttatgtcctgtgattcaagcccaaaggttataaattcaactttcacagggaatagcactgctaatcttactttatgatttaaatataaaggaaaatcacagcagccttaatttcctgttggtcggatcatttgcagcagttctagttcctgacttttaaaatggatgaaattttctctttgtctgatttggaaaaggaactgcttttttgccttactgctttggtataaggatgaaaaacatgagcactctgcagacaaaatgaccttaaatcacattgattaagatattttaaaagttagcagtgaaccaaaagtagtttcagattagcagaaataaagagctttaagttttaaaagttgagattgaatatttaatgaaagtttattaattctttttccaggaatagcagtaaggtcagtttttttccctaaaataaaaagttttaataaacagaaaattatagcaacagtacttaggagaatagttgaagattgtattaattttaattataatagttatttgtcataggctattgatgattagaatttcattagttttgtccactataattttaaaaatagttgtgtcaaatacaaattctggtaaactgttaggttttaacaccagacagtattcaaaggaaattaatgtttgcaaacataaatccatagtcttcatttctttatattgtcacctttgtaaaagtgtttaaaatttgtattgtttgttttgtatatctttgggcatcttgtgtctagctataataaaaagaaacggtgccaaggttctcagatgaagtgtgtggctatgtatgcatgtaacttggtttctttgaaaacccaattatatttgtattgtggtgtttcttgt

SEQ ID NO: 351281 - DNA, 837 bp, Homo sapiens
cggctacgtcacggtggcaggttctaagcgctgctgggcaccgtaaggccgccgtgtgtaccttccagtagctacgggctggtggaagcgctgctcacagtcagtgtcggtacgtcttcgtccgcccttaccctccttatcctgctccaggtagcggagagccgcctcccgccgcgcccccgccaccgaggcccgggtcagaggctagaggccgcccgcccctgcgcggccctttcccctgagcccgcggagcccgccgccccgggcctcggggcgacgatgctggagtccattcgcgtgacgggtgagtgccgggaagggctggccgcggcgggggtgcggggcggaccggggtcccgccgcccggggctcaggtaatggtagccaccggctgggcgcgccgctcgggactccaccctgcgccccgaccccttcggggcgcgcaggaggcgctcgcgaaaaacctgtggagggaagagagaaatcggccccttatcctttcgtcacttattatcagtaagtacctgctgtggaatctcgtggaaaagattgtaatattagaccggttgctggtcttacaaaggtacaatccaaagattgttaaatcctatttcaaaacacctaagcgaaagaacacatctggatatttcattatttatactgtgtatatttgtgtgtggatgcttttattcttaaacagtgagaacgttttgagttgatattattaataggccattttaccagtacgggttataccaagtggtaacacatgggtctttaaacagaccccaggtcagaaagtctggactttacctgcctttttttaaattcagttca

SEQ ID NO: 351282 - DNA, 4197 bp, Homo sapiens
ggcctagagcggtgggtcatggctggctgcacccgcaaactcactcacctccgtaaacggatccatcgccccaggcgtcggactacgagacgatggaaacggtggttcaaattcaggaagagaaaaggagagaaaaggccaagacctaatcataaggcagtggcaagaagagctaaactcaagttctctacctcagaaaagcttcactggcctgagcaagaacttgctaagaagtctattctaaatgcagaagattcattgatcattgacaacaaaagaagcatttcacatttgtcctcgggagtgctaaaagacattttcacaactggaaccagtagttacaatgtcctactacagagcaaggaggaaaaaaagtatcattcacaaaaacagtcttcctccacctactccaaaagatgtagaaaacccagcaaatctcctaacacttctcgtagcaaagatcctcgcaggatgaaagccctggtgcctgtgacaagcagtggtacttggtactgcctggagaggcggcctgctgtttttgtcactagttcagtgtcaagtcctgtaaagtttacacatgatatctctgttacagggaatggcatagtactgccacctaaacccaaaagcaaggtcaagtggtgccatttctccactcttccaaagccaaagcctcagctgtctagaagctttgaaaagggagatgacttttctgggaagaaattttgtatattgactgctataaaacccaccaacttagagaaagaaaaactgagattcttcaaatctgactatacctacaatcctcagtttgagtatgccaatcctgctctgccaagcgtattagctaagcatagccacgcatctgaccgatttcttaagcagattgtagttcatctcactgaggacctgctttcccgagcgtcaatgacagtagtaaatggatgtccgactctgactatcaatgtgtccactgcacgtgagcattggctggagggaatgctgaggcatgaaataggtacacattattttcgaggtattaacaacctccagcagccatggaacagttggactggacgtaaaaaacatgagctaaagccaaataatcccacagaggaaggactagcaagcattcacagtgttctgtttagaaaagacccttttttatggagggctgccctcctctactacactgtttatcaagccagccaaatgtctttttgtgaactctttaaagatattggcaggtttgtcaaggaccccaatacaagatgggattattgtgtacgggccaagaggggatggactgatacttcccaaccagggtgttttagtaaagaccaggtatacttggatggaattcttcaaatcctccgatacagagataccatagacttccatctgctgactgctctcgggaaggtttcttatgaagatgtggatcgcttaaaaggattggcagttaccgaaaacatgagggtccctcatttcctgcaggaccatggccgatatatggaacacttagagaagatcatggaagtgaatgaactgactgacagggaactgaaagatcttatatagtaattagcgttctggcaaacatagctaagctatgcctccatgtatattaccagttaggtgcagttagcaccagaagatttataaaagaagaaagactacttgtgttttctgaagaagggtcttcagtattcagcggaatttttaggttaagtacagatcttaaactatttccctaaaatgtttctataggctgcagggggaagttattcctattttctgaatctcgacagagtcagatgaaaatactactgctgagcatttttgaagactcttggtcaaattgcatgataaatttctgcctgagcagtaagcactggcctagtgcttctgcctaaatatggaggtcagctccaactggagactggctgaattccattgctgttcagactccaaagttatattttatttgataaataatggtaattattctcctttgaaaaattagttttgtgttgctccaaaaagctagctatatatctcagctttcttatttcttttatatgttgagggattttaaagggagaggaaaagcaatttgaaaatttttcattaagtgttttattttaacattattgtttcaccttatcagcttataggaactaaattagagaatcacctctttttgtccggttatctcttaactatgttttcatttgctgaaacatattgtacccttttaaattttttacagagttttaacgtcttttccactgcatcctttataaaaataagtacaaattccagagaggttttcctacacaaatacaaaataattggggaagggctactcaccttttttatgaaacagaatatgtaacaagcagaggacaaatagactgacctggttaaacgtaggttctggatgttgatgggtagcacctgcagtaaacttgaccatgctctgaaaaaagaaatttctgggtattgatggtttataaagccagctttgtgctattggttcagtatattttatcaaatctttgacttcatcaacccagtaatgacatagtttaaattttaaaatgagagttctgttttgctgtatttctcctgctagcctagctttgtattttatcatcagcttcagtatatacttgtatatatatacctggattcaaatggttcttcatacaacttaatgatcagaaagaatgctgctgtaaacaccccactcaagattgctgctggaatttctacccaaagctgtctgagagtttatctttacctcagtgcaggcttaaataatggtgctaatactggtagatatatactgtgaagcctggttcacattcatgctagaaaatgattttgggaaatcttttataggagaggttacatgatttttctctttcacatatctagaaggacttgcctcaaagaagaatgttgcagcaaacaggatatactctagctggtgcccaaaggttcttgcaaaaccatgaatcttgcttttagcagtaaagggccagacactttggagcattgaaaggccttagcccctgctccccaactacgtgccatgctgggtagtgtgtatcctgtacatctgtgtgccaggctggggcagactgtgccaatgctcaccaaacactagaatctgctcttacacctctagcatgtatctcgttgtagcagagttgtgcactttctcagcattgtgtagtgttttctaattgcatctaaaaacttatcaaaagtgattgtgaaaacagtgtcttagaagtataaacagaaatggcaatatttatgtcctgtgattcaagcccaaaggttataaattcaactttcacagggaatagcactgctaatcttactttatgatttaaatataaaggaaaatcacagcagccttaatttcctgttggtcggatcatttgcagcagttctagttcctgacttttaaaatggatgaaattttctctttgtctgatttggaaaaggaactgcttttttgccttactgctttggtataaggatgaaaaacatgagcactctgcagacaaaatgaccttaaatcacattgattaagatattttaaaagttagcagtgaaccaaaagtagtttcagattagcagaaataaagagctttaagttttaaaagttgagattgaatatttaatgaaagtttattaattctttttccaggaatagcagtaaggtcagtttttttccctaaaataaaaagttttaataaacagaaaattatagcaacagtacttaggagaatagttgaagattgtattaattttaattataatagttatttgtcataggctattgatgattagaatttcattagttttgtccactataattttaaaaatagttgtgtcaaatacaaattctggtaaactgttaggttttaacaccagacagtattcaaaggaaattaatgtttgcaaacataaatccatagtcttcatttctttatattgtcacctttgtaaaagtgtttaaaatttgtattgtttgttttgtatatctttgggcatcttgtgtctagctataataaaaagaaacggtgccaaggttctcagatgaagtgtgtggctatgtatgcatgtaacttggtttctttgaaaacccaattatatttgtattgtggtgtttcttgt

SEQ ID NO: 351283 - DNA, 4110 bp, Homo sapiens
cggctacgtcacggtggcaggttctaagcgctgctgggcaccgtaaggccgccgtgtgtaccttccagtagctacgggctggtggaagcgctgctcacagtcagtgtcgaaaagcttcactggcctgagcaagaacttgctaagaagtctattctaaatgcagaagattcattgatcattgacaacaaaagaagcatttcacatttgtcctcgggagtgctaaaagacattttcacaactggaaccagtagttacaatgtcctactacagagcaaggaggaaaaaaagtatcattcacaaaaacagtcttcctccacctactccaaaagatgtagaaaacccagcaaatctcctaacacttctcgtagcaaagatcctcgcaggatgaaagccctggtgcctgtgacaagcagtggtacttggtactgcctggagaggcggcctgctgtttttgtcactagttcagtgtcaagtcctgtaaagtttacacatgatatctctgttacagggaatggcatagtactgccacctaaacccaaaagcaaggtcaagtggtgccatttctccactcttccaaagccaaagcctcagctgtctagaagctttgaaaagggagatgacttttctgggaagaaattttgtatattgactgctataaaacccaccaacttagagaaagaaaaactgagattcttcaaatctgactatacctacaatcctcagtttgagtatgccaatcctgctctgccaagcgtattagctaagcatagccacgcatctgaccgatttcttaagcagattgtagttcatctcactgaggacctgctttcccgagcgtcaatgacagtagtaaatggatgtccgactctgactatcaatgtgtccactgcacgtgagcattggctggagggaatgctgaggcatgaaataggtacacattattttcgaggtattaacaacctccagcagccatggaacagttggactggacgtaaaaaacatgagctaaagccaaataatcccacagaggaaggactagcaagcattcacagtgttctgtttagaaaagacccttttttatggagggctgccctcctctactacactgtttatcaagccagccaaatgtctttttgtgaactctttaaagatattggcaggtttgtcaaggaccccaatacaagatgggattattgtgtacgggccaagaggggatggactgatacttcccaaccagggtgttttagtaaagaccaggtatacttggatggaattcttcaaatcctccgatacagagataccatagacttccatctgctgactgctctcgggaaggtttcttatgaagatgtggatcgcttaaaaggattggcagttaccgaaaacatgagggtccctcatttcctgcaggaccatggccgatatatggaacacttagagaagatcatggaagtgaatgaactgactgacagggaactgaaagatcttatatagtaattagcgttctggcaaacatagctaagctatgcctccatgtatattaccagttaggtgcagttagcaccagaagatttataaaagaagaaagactacttgtgttttctgaagaagggtcttcagtattcagcggaatttttaggttaagtacagatcttaaactatttccctaaaatgtttctataggctgcagggggaagttattcctattttctgaatctcgacagagtcagatgaaaatactactgctgagcatttttgaagactcttggtcaaattgcatgataaatttctgcctgagcagtaagcactggcctagtgcttctgcctaaatatggaggtcagctccaactggagactggctgaattccattgctgttcagactccaaagttatattttatttgataaataatggtaattattctcctttgaaaaattagttttgtgttgctccaaaaagctagctatatatctcagctttcttatttcttttatatgttgagggattttaaagggagaggaaaagcaatttgaaaatttttcattaagtgttttattttaacattattgtttcaccttatcagcttataggaactaaattagagaatcacctctttttgtccggttatctcttaactatgttttcatttgctgaaacatattgtacccttttaaattttttacagagttttaacgtcttttccactgcatcctttataaaaataagtacaaattccagagaggttttcctacacaaatacaaaataattggggaagggctactcaccttttttatgaaacagaatatgtaacaagcagaggacaaatagactgacctggttaaacgtaggttctggatgttgatgggtagcacctgcagtaaacttgaccatgctctgaaaaaagaaatttctgggtattgatggtttataaagccagctttgtgctattggttcagtatattttatcaaatctttgacttcatcaacccagtaatgacatagtttaaattttaaaatgagagttctgttttgctgtatttctcctgctagcctagctttgtattttatcatcagcttcagtatatacttgtatatatatacctggattcaaatggttcttcatacaacttaatgatcagaaagaatgctgctgtaaacaccccactcaagattgctgctggaatttctacccaaagctgtctgagagtttatctttacctcagtgcaggcttaaataatggtgctaatactggtagatatatactgtgaagcctggttcacattcatgctagaaaatgattttgggaaatcttttataggagaggttacatgatttttctctttcacatatctagaaggacttgcctcaaagaagaatgttgcagcaaacaggatatactctagctggtgcccaaaggttcttgcaaaaccatgaatcttgcttttagcagtaaagggccagacactttggagcattgaaaggccttagcccctgctccccaactacgtgccatgctgggtagtgtgtatcctgtacatctgtgtgccaggctggggcagactgtgccaatgctcaccaaacactagaatctgctcttacacctctagcatgtatctcgttgtagcagagttgtgcactttctcagcattgtgtagtgttttctaattgcatctaaaaacttatcaaaagtgattgtgaaaacagtgtcttagaagtataaacagaaatggcaatatttatgtcctgtgattcaagcccaaaggttataaattcaactttcacagggaatagcactgctaatcttactttatgatttaaatataaaggaaaatcacagcagccttaatttcctgttggtcggatcatttgcagcagttctagttcctgacttttaaaatggatgaaattttctctttgtctgatttggaaaaggaactgcttttttgccttactgctttggtataaggatgaaaaacatgagcactctgcagacaaaatgaccttaaatcacattgattaagatattttaaaagttagcagtgaaccaaaagtagtttcagattagcagaaataaagagctttaagttttaaaagttgagattgaatatttaatgaaagtttattaattctttttccaggaatagcagtaaggtcagtttttttccctaaaataaaaagttttaataaacagaaaattatagcaacagtacttaggagaatagttgaagattgtattaattttaattataatagttatttgtcataggctattgatgattagaatttcattagttttgtccactataattttaaaaatagttgtgtcaaatacaaattctggtaaactgttaggttttaacaccagacagtattcaaaggaaattaatgtttgcaaacataaatccatagtcttcatttctttatattgtcacctttgtaaaagtgtttaaaatttgtattgtttgttttgtatatctttgggcatcttgtgtctagctataataaaaagaaacggtgccaaggttctcagatgaagtgtgtggctatgtatgcatgtaacttggtttctttgaaaacccaattatatttgtattgtggtgtttcttgt

SEQ ID NO: 351284 - DNA, 739 bp, Homo sapiens
tggaagcgctgctcacagtcagtgtcggtacgtcttcgtccgcccttaccctccttatcctgctccaggtagcggagagccgcctcccgccgcgcccccgccaccgaggcccgggtcagaggctagaggccgcccgcccctgcgcggccctttcccctgagcccgcggagcccgccgccccgggcctcggggcgacgatgctggagtccattcgcgtgacgggtgagtgccgggaagggctggccgcggcgggggtgcggggcggaccggggtcccgccgcccggggctcaggtaatggtagccaccggctgggcgcgccgctcgggactccaccctgcgccccgaccccttcggggcgcgcaggaggcgctcgcgaaaaacctgtggagggaagagagaaatcggccccttatcctttcgtcacttattatcagtaagtacctgctgtggaatctcgtggaaaagattgtaatattagaccggttgctggtcttacaaaggtacaatccaaagattgttaaatcctatttcaaaacacgctaggtgtgtgattaagcttcataattttctagaatgttcagaaaaaataagctaagcgaaagaacacatctggatatttcattatttatactgtgtatatttgtgtgtggatgcttttattcttaaacagtgagaacgttttgagttgatattattaataggccattttaccagtacgggttataccaagtggtaaca

SEQ ID NO: 351285 - DNA, 4517 bp, Homo sapiens
cggctacgtcacggtggcaggttctaagcgctgctgggcaccgtaaggccgccgtgtgtaccttccagtagctacgggctggtggaagcgctgctcacagtcagtgtcggtacgtcttcgtccgcccttaccctccttatcctgctccaggtagcggagagccgcctcccgccgcgcccccgccaccgaggcccgggtcagaggctagaggccgcccgcccctgcgcggccctttcccctgagcccgcggagcccgccgccccgggcctcggggcgacgatgctggagtccattcgcgtgacgggtgagtgccgggaagggctggccgcggcgggggtgcggggcggaccggggtcccgccgcccggggctcaggtaatggtagccaccggctgggcgcgccgctcgggactccaccctgcgccccgaccccttcggggcgcgcaggaggcgctcgcgaaaaacctgtggagggaagagagaaatcggccccttatcctttcgtcacttattatcaaaaagcttcactggcctgagcaagaacttgctaagaagtctattctaaatgcagaagattcattgatcattgacaacaaaagaagcatttcacatttgtcctcgggagtgctaaaagacattttcacaactggaaccagtagttacaatgtcctactacagagcaaggaggaaaaaaagtatcattcacaaaaacagtcttcctccacctactccaaaagatgtagaaaacccagcaaatctcctaacacttctcgtagcaaagatcctcgcaggatgaaagccctggtgcctgtgacaagcagtggtacttggtactgcctggagaggcggcctgctgtttttgtcactagttcagtgtcaagtcctgtaaagtttacacatgatatctctgttacagggaatggcatagtactgccacctaaacccaaaagcaaggtcaagtggtgccatttctccactcttccaaagccaaagcctcagctgtctagaagctttgaaaagggagatgacttttctgggaagaaattttgtatattgactgctataaaacccaccaacttagagaaagaaaaactgagattcttcaaatctgactatacctacaatcctcagtttgagtatgccaatcctgctctgccaagcgtattagctaagcatagccacgcatctgaccgatttcttaagcagattgtagttcatctcactgaggacctgctttcccgagcgtcaatgacagtagtaaatggatgtccgactctgactatcaatgtgtccactgcacgtgagcattggctggagggaatgctgaggcatgaaataggtacacattattttcgaggtattaacaacctccagcagccatggaacagttggactggacgtaaaaaacatgagctaaagccaaataatcccacagaggaaggactagcaagcattcacagtgttctgtttagaaaagacccttttttatggagggctgccctcctctactacactgtttatcaagccagccaaatgtctttttgtgaactctttaaagatattggcaggtttgtcaaggaccccaatacaagatgggattattgtgtacgggccaagaggggatggactgatacttcccaaccagggtgttttagtaaagaccaggtatacttggatggaattcttcaaatcctccgatacagagataccatagacttccatctgctgactgctctcgggaaggtttcttatgaagatgtggatcgcttaaaaggattggcagttaccgaaaacatgagggtccctcatttcctgcaggaccatggccgatatatggaacacttagagaagatcatggaagtgaatgaactgactgacagggaactgaaagatcttatatagtaattagcgttctggcaaacatagctaagctatgcctccatgtatattaccagttaggtgcagttagcaccagaagatttataaaagaagaaagactacttgtgttttctgaagaagggtcttcagtattcagcggaatttttaggttaagtacagatcttaaactatttccctaaaatgtttctataggctgcagggggaagttattcctattttctgaatctcgacagagtcagatgaaaatactactgctgagcatttttgaagactcttggtcaaattgcatgataaatttctgcctgagcagtaagcactggcctagtgcttctgcctaaatatggaggtcagctccaactggagactggctgaattccattgctgttcagactccaaagttatattttatttgataaataatggtaattattctcctttgaaaaattagttttgtgttgctccaaaaagctagctatatatctcagctttcttatttcttttatatgttgagggattttaaagggagaggaaaagcaatttgaaaatttttcattaagtgttttattttaacattattgtttcaccttatcagcttataggaactaaattagagaatcacctctttttgtccggttatctcttaactatgttttcatttgctgaaacatattgtacccttttaaattttttacagagttttaacgtcttttccactgcatcctttataaaaataagtacaaattccagagaggttttcctacacaaatacaaaataattggggaagggctactcaccttttttatgaaacagaatatgtaacaagcagaggacaaatagactgacctggttaaacgtaggttctggatgttgatgggtagcacctgcagtaaacttgaccatgctctgaaaaaagaaatttctgggtattgatggtttataaagccagctttgtgctattggttcagtatattttatcaaatctttgacttcatcaacccagtaatgacatagtttaaattttaaaatgagagttctgttttgctgtatttctcctgctagcctagctttgtattttatcatcagcttcagtatatacttgtatatatatacctggattcaaatggttcttcatacaacttaatgatcagaaagaatgctgctgtaaacaccccactcaagattgctgctggaatttctacccaaagctgtctgagagtttatctttacctcagtgcaggcttaaataatggtgctaatactggtagatatatactgtgaagcctggttcacattcatgctagaaaatgattttgggaaatcttttataggagaggttacatgatttttctctttcacatatctagaaggacttgcctcaaagaagaatgttgcagcaaacaggatatactctagctggtgcccaaaggttcttgcaaaaccatgaatcttgcttttagcagtaaagggccagacactttggagcattgaaaggccttagcccctgctccccaactacgtgccatgctgggtagtgtgtatcctgtacatctgtgtgccaggctggggcagactgtgccaatgctcaccaaacactagaatctgctcttacacctctagcatgtatctcgttgtagcagagttgtgcactttctcagcattgtgtagtgttttctaattgcatctaaaaacttatcaaaagtgattgtgaaaacagtgtcttagaagtataaacagaaatggcaatatttatgtcctgtgattcaagcccaaaggttataaattcaactttcacagggaatagcactgctaatcttactttatgatttaaatataaaggaaaatcacagcagccttaatttcctgttggtcggatcatttgcagcagttctagttcctgacttttaaaatggatgaaattttctctttgtctgatttggaaaaggaactgcttttttgccttactgctttggtataaggatgaaaaacatgagcactctgcagacaaaatgaccttaaatcacattgattaagatattttaaaagttagcagtgaaccaaaagtagtttcagattagcagaaataaagagctttaagttttaaaagttgagattgaatatttaatgaaagtttattaattctttttccaggaatagcagtaaggtcagtttttttccctaaaataaaaagttttaataaacagaaaattatagcaacagtacttaggagaatagttgaagattgtattaattttaattataatagttatttgtcataggctattgatgattagaatttcattagttttgtccactataattttaaaaatagttgtgtcaaatacaaattctggtaaactgttaggttttaacaccagacagtattcaaaggaaattaatgtttgcaaacataaatccatagtcttcatttctttatattgtcacctttgtaaaagtgtttaaaatttgtattgtttgttttgtatatctttgggcatcttgtgtctagctataataaaaagaaacggtgccaaggttctcagatgaagtgtgtggctatgtatgcatgtaacttggtttctttgaaaacccaattatatttgtattgtggtgtttcttgt

SEQ ID NO: 351286 - DNA, 4463 bp, Homo sapiens
cggctacgtcacggtggcaggttctaagcgctgctgggcaccgtaaggccgccgtgtgtaccttccagtagctacgggctggtggaagcgctgctcacagtcagtgtcggtacgtcttcgtccgcccttaccctccttatcctgctccaggtagcggagagccgcctcccgccgcgcccccgccaccgaggcccgggtcagaggctagaggccgcccgcccctgcgcggccctttcccctgagcccgcggagcccgccgccccgggcctcggggcgacgatgctggagtccattcgcgtgacgggtgagtgccgggaagggctggccgcggcgggggtgcggggcggaccggggtcccgccgcccggggctcaggtaatggtagccaccggctgggcgcgccgctcgggactccaccctgcgccccgaccccttcggggcgcgcaggaggcgctcgcgaaaaacctgtggagggaagagagaaatcggccccttatcctttcgtcacttattatcaaaaagcttcactggcctgagcaagaacttgctaagaagtctattctaaatgcagaagattcattgatcattgacaacaaaagaagcatttcacatttgtcctcgggagtgctaaaagacattttcacaactggaaccagtagttacaatgtcctactacagagcaaggaggaaaaaaagtatcattcacaaaaacagtcttcctccacctactccaaaagatgtagaaaacccagcaaatctcctaacacttctcgtagcaaagatcctcgcaggatgaaagccctggtgcctgtgacaagcagtggtacttggtactgcctggagaggcggcctgctgtttttgtcactagttcagtgtcaagtcctgtaaagtttacacatgatatctctgttacagggaatggcatagtactgccacctaaacccaaaagcaaggtcaagtggtgccatttctccactcttccaaagccaaagcctcagctgtctagaagctttgaaaagggagatgacttttctgggaagaaattttgtatattgactgctataaaacccaccaacttagagaaagaaaaactgagattcttcaaatctgactatacctacaatcctcagtttgagtatgccaatcctgctctgccaagcgtattagctaagcatagccacgcatctgaccgatttcttaagcagattgtagttcatctcactgaggacctgctttcccgagcgtcaatgacagtagtaaatggatgtccgactctgactatcaatgtgtccactgcacgtgagcattggctggagggaatgctgaggcatgaaataggtacacattattttcgaggtattaacaacctccagcagccatggaacagttggactggacgtaaaaaacatgagctaaagccaaataatcccacagaggaaggactagcaagcattcacagtgttctgtttagaaaagacccttttttatggagggctgccctcctctactacactgtttatcaagccagccaaatgtctttttgtgaactctttaaagatattggcaggtttgtcaaggaccccaatacaagatgggattattgtgtacgggccaagaggggatggactgatacttcccaaccagggtgttttagtaaagaccaggtatacttggatggaattcttcaaatcctccgatacagagataccatagacttccatctgctgactgctctcgggaaggtttcttatgaagatgtggatcgcttaaaaggattggcagttaccgaaaacatgagggtccctcatttcctgcaggaccatggccgatatatggaacacttagagaagatcatggaagtgaatgaactgactgacagggaactgaaagatcttatatagtaattagcgttctggcaaacatagctaagctatgcctccatgtatattaccagttaggtgcagttagcaccagaagatttataaaagaagaaagactacttgtgttttctgaagaagggtcttcagtattcagcggaatttttaggttaagtacagatcttaaactatttccctaaaatgtttctataggctgcagggggaagttattcctattttctgaatctcgacagagtcagatgaaaatactactgctgagcatttttgaagactcttggtcaaattgcatgataaatttctgcctgagcagtaagcactggcctagtgcttctgcctaaatatggaggtcagctccaactggagactggctgaattccattgctgttcagactccaaagttatattttatttgataaataatggtaattattctcctttgaaaaattagttttgtgttgctccaaaaagctagctatatatctcagctttcttatttcttttatatgttgagggattttaaagggagaggaaaagcaatttgaaaatttttcattaagtgttttattttaacattattgtttcaccttatcagcttataggaactaaattagagaatcacctctttttgtccggttatctcttaactatgttttcatttgctgaaacatattgtacccttttaaattttttacagagttttaacgtcttttccactgcatcctttataaaaataagtacaaattccagagaggttttcctacacaaatacacagaggacaaatagactgacctggttaaacgtaggttctggatgttgatgggtagcacctgcagtaaacttgaccatgctctgaaaaaagaaatttctgggtattgatggtttataaagccagctttgtgctattggttcagtatattttatcaaatctttgacttcatcaacccagtaatgacatagtttaaattttaaaatgagagttctgttttgctgtatttctcctgctagcctagctttgtattttatcatcagcttcagtatatacttgtatatatatacctggattcaaatggttcttcatacaacttaatgatcagaaagaatgctgctgtaaacaccccactcaagattgctgctggaatttctacccaaagctgtctgagagtttatctttacctcagtgcaggcttaaataatggtgctaatactggtagatatatactgtgaagcctggttcacattcatgctagaaaatgattttgggaaatcttttataggagaggttacatgatttttctctttcacatatctagaaggacttgcctcaaagaagaatgttgcagcaaacaggatatactctagctggtgcccaaaggttcttgcaaaaccatgaatcttgcttttagcagtaaagggccagacactttggagcattgaaaggccttagcccctgctccccaactacgtgccatgctgggtagtgtgtatcctgtacatctgtgtgccaggctggggcagactgtgccaatgctcaccaaacactagaatctgctcttacacctctagcatgtatctcgttgtagcagagttgtgcactttctcagcattgtgtagtgttttctaattgcatctaaaaacttatcaaaagtgattgtgaaaacagtgtcttagaagtataaacagaaatggcaatatttatgtcctgtgattcaagcccaaaggttataaattcaactttcacagggaatagcactgctaatcttactttatgatttaaatataaaggaaaatcacagcagccttaatttcctgttggtcggatcatttgcagcagttctagttcctgacttttaaaatggatgaaattttctctttgtctgatttggaaaaggaactgcttttttgccttactgctttggtataaggatgaaaaacatgagcactctgcagacaaaatgaccttaaatcacattgattaagatattttaaaagttagcagtgaaccaaaagtagtttcagattagcagaaataaagagctttaagttttaaaagttgagattgaatatttaatgaaagtttattaattctttttccaggaatagcagtaaggtcagtttttttccctaaaataaaaagttttaataaacagaaaattatagcaacagtacttaggagaatagttgaagattgtattaattttaattataatagttatttgtcataggctattgatgattagaatttcattagttttgtccactataattttaaaaatagttgtgtcaaatacaaattctggtaaactgttaggttttaacaccagacagtattcaaaggaaattaatgtttgcaaacataaatccatagtcttcatttctttatattgtcacctttgtaaaagtgtttaaaatttgtattgtttgttttgtatatctttgggcatcttgtgtctagctataataaaaagaaacggtgccaaggttctcagatgaagtgtgtggctatgtatgcatgtaacttggtttctttgaaaacccaattatatttgtattgtggtgtttcttgt

SEQ ID NO: 351287 - DNA, 2959 bp, Homo sapiens
cggctacgtcacggtggcaggttctaagcgctgctgggcaccgtaaggccgccgtgtgtaccttccagtagctacgggctggtggaagcgctgctcacagtcagtgtcggtacgtcttcgtccgcccttaccctccttatcctgctccaggtagcggagagccgcctcccgccgcgcccccgccaccgaggcccgggtcagaggctagaggccgcccgcccctgcgcggccctttcccctgagcccgcggagcccgccgccccgggcctcggggcgacgatgctggagtccattcgcgtgacgggtgagtgccgggaagggctggccgcggcgggggtgcggggcggaccggggtcccgccgcccggggctcaggtaatggtagccaccggctgggcgcgccgctcgggactccaccctgcgccccgaccccttcggggcgcgcaggaggcgctcgcgaaaaacctgtggagggaagagagaaatcggccccttatcctttcgtcacttattatcaaaaagcttcactggcctgagcaagaacttgctaagaagtctattctaaatgcagaagattcattgatcattgacaacaaaagaagcatttcacatttgtcctcgggagtgctaaaagacattttcacaactggaaccagtagttacaatgtcctactacagagcaaggaggaaaaaaagtatcattcacaaaaacagtcttcctccacctactccaaaagatgtagaaaacccagcaaatctcctaacacttctcgtagcaaagatcctcgcaggatgaaagccctggtgcctgtgacaagcagtggtacttggtactgcctggagaggcggcctgctgtttttgtcactagttcagtgtcaagtcctgtaaagtttacacatgatatctctgttacagggaatggcatagtactgccacctaaacccaaaagcaaggtcaagtggtgccatttctccactcttccaaagccaaagcctcagctgtctagaagctttgaaaagggagatgacttttctgggaagaaattttgtatattgactgctataaaacccaccaacttagagaaagaaaaactgagattcttcaaatctgactatacctacaatcctcagtttgagtatgccaatcctgctctgccaagcgtattagctaagcatagccacgcatctgaccgatttcttaagcagattgtagttcatctcactgaggacctgctttcccgagcgtcaatgacagtagtaaatggatgtccgactctgactatcaatgtgtccactgcacgtgagcattggctggagggaatgctgaggcatgaaataggtacacattattttcgaggtattaacaacctccagcagccatggaacagttggactggacgtaaaaaacatgagctaaagccaaataatcccacagaggaaggactagcaagcattcacagtgttctgtttagaaaagacccttttttatggagggctgccctcctctactacactgtttatcaagccagccaaatgtctttttgtgaactctttaaagatattggcaggtttgtcaaggaccccaatacaagatgggattattgtgtacgggccaagaggggatggactgatacttcccaaccagggtgttttagtaaagaccaggtatacttggatggaattcttcaaatcctccgatacagagataccatagacttccatctgctgactgctctcgggaaggtttcttatgaagatgtggatcgcttaaaaggattggcagttaccgaaaacatgagggtccctcatttcctgcaggaccatggccgatatatggaacacttagagaagatcatggaagtgaatgaactgactgacagggaactgaaagatcttatatagtaattagcgttctggcaaacatagctaagctatgcctccatgtatattaccagttaggtgcagttagcaccagaagatttataaaagaagaaagactacttgtgttttctgaagaagggtcttcagtattcagcggaatttttaggttaagtacagatcttaaactatttccctaaaatgtttctataggctgcagggggaagttattcctattttctgaatctcgacagagtcagatgaaaatactactgctgagcatttttgaagactcttggtcaaattgcatgataaatttctgcctgagcagtaagcactggcctagtgcttctgcctaaatatggaggtcagctccaactggagactggctgaattccattgctgttcagactccaaagttatattttatttgataaataatggtaattattctcctttgaaaaattagttttgtgttgctccaaaaagctagctatatatctcagctttcttatttcttttatatgttgagggattttaaagggagaggaaaagcaatttgaaaatttttcattaagtgttttattttaacattattgtttcaccttatcagcttataggaactaaattagagaatcacctctttttgtccggttatctcttaactatgttttcatttgctgaaacatattgtacccttttaaattttttacagagttttaacgtcttttccactgcatcctttataaaaataagtacaaattccagagaggttttcctacacaaatacacagaggacaaatagactgacctggttaaacgtaggttctggatgttgatgggtagcacctgcagtaaacttgaccatgctctgaaaaaagaaatttctgggtattgatggtttataaagccagctttgtgctattggttcagtatattttatcaaatctttgacttcatcaacccagtaatgacatagtttaaattttaaaatgagaagcgtatgttttttattatgctgtattttccttttattttttaattattgtttatattttcaattcaaaaatgtacaaaataaa

SEQ ID NO: 351288 - DNA, 7019 bp, Homo sapiens
  misc_feature (1979)..(1979): n is a, c, g, or t
  misc_feature (2021)..(2021): n is a, c, g, or t
  misc_feature (2024)..(2024): n is a, c, g, or t
  misc_feature (2075)..(2075): n is a, c, g, or t
  misc_feature (2137)..(2138): n is a, c, g, or t
  misc_feature (2327)..(2327): n is a, c, g, or t
caaactcctagtggggagccggcggcttgtggacgtgatggatgtgaacacccagaagggcacggagatgagcatgtcccagtttgtgcgttactacgagacgcccgaggcccagcgggacaagctgtacaacgtcatcagcctagagttcagccacaccaagctggagcacttggtcaagcgtccgactgtggtagacctggtggactgggtggacaacatgtggccccagcatctgaaggagaagcagacagaagccacgaacgccattgcagagatgaagtacccgaaagtgaaaaagtactgtctgatgagcgtgaaaggttgtttcaccgacttccacatcgactttggaggcacttccgtttggtaccatgttttccggggtgggaagattttttggctgattcctccaacgctgcacaatttggcgctgtacgaggagtgggtgctgtcaggcaaacagagtgacatctttctgggagaccgtgtggaacgatgccaaagaattgagctgaagcagggctacacatttttcatcccttccggttggatccatgccgtctacacccctgtagactctttggtgttcggcggaaacatcctgcacagctttaacgtgcccatgcagctgcggatctacgagatcgaggacaggacgcgggtgcagcccaaattccgttaccccttctactatgagatgtgctggtatgtcctggagagatacgtgtactgtgtgacccagcgctcccacctcactcaggaataccagagggagtcgatgcttattgatgccccgaggaagcccagcatagacggcttctcttcggattcctggctggagatggaggaggaggcctgtgatcagcagcctcaggaggaggaggagaaggacgaggagggcgagggcagggacagggcacccaaaccgcccaccgatggctccacttcacccaccagcacgccctctgaggaccaggaggccctcgggaagaagcccaaagcacctgccctgcgattcctcaaaaggactttgtctaatgagtcggaggaaagtgtgaagtccaccacattggccgtagactaccccaagacccccaccggctctcccgccacggaggtctctgccaaatggacccatctcactgagtttgaactgaagggcctgaaagctctggtggagaaactggaatccctcccggagaacaagaagtgtgtccccgagggcatcgaggacccccaggcactcctggagggtgtgaagaacgtcctgaaggagcacgcagatgatgaccctagtctggccatcactggggtccctgtggtgacttggccaaagaagactccaaagaaccgggctgtgggtcggcccaaggggaagctgggcccggcctccgcggtgaagttggccgccaaccggacaacggcaggagctcggcggcgccggacgcgatgccgcaagtgcgaggcctgcctgcggaccgagtgcggagagtgccacttctgcaaggacatgaagaagttcgggggccccgggcgcatgaagcagagctgcatcatgcggcagtgcatcgcgccagtgctgccccacaccgccgtgtgccttgtgtgtggcgaggcggggaaggaagacacggtggaagaggaggaaggcaagtttaacctcatgctcatggagtgctccatctgcaatgaaatcatccaccctggatgccttaaggtgagtggcccagtggggacaggtggtgctgacgctctggggcaggtagggttgctggagatgctggtgagatggtgggatgcaggtcgtgcagtgaattcctggaggacccctgagtctgggtgatcctgtgtgtcaagggataagcccggggcaaggagggcctggagtacctcagagacccagtgtcatcaaaggaataaacacacccccacctcccaggatgtcagaaccagagagggtttccagagcctcagcngatggcaaacacaggctgcttgtttgtagctgggccagaggnagngcctccaggtggctccaggcttctgggagaacaaggccccacaccacactncttcccccagcacccagtagagtcctctgcagagtcctttctgcatgccaggcgctgagctnntggctttacctgggtcatacccccccagtgagatgggcacactaacttttatggccgagggcaccagcccacagagacggagtgtcttgcccagggtcccagagaagcaaaggggctcagcctctgaaccctggcctggatccacagctgcccgtctctgccagcctctgcagctgtgttttcttttgnctggaaacgggatagatgtgacgttggggagggggtgctgctgcttctggaagacgtggcgtcacagagccttgtgcccgtgggccatcttctccgcccgtccctcttctgagtcctggtgttccccgcagattaaggagtcagagggtgtggtcaacgacgagcttccaaactgctgggagtgtccgaagtgtaaccacgccggcaagaccgggaaacaaaagcgtggccctggctttaagtacgcctccaacctgcccggctccctgctcaaggagcagaagatgaaccgggacaacaaggaagggcaggaacctgccaagcggaggagtgagtgtgaggaggcgccccggcgcaggtcggatgagcactcgaagaaggtgccgccggacggccttctgcgcagaaagtctgacgacgtgcacctgaggaagaagcggaaatacgagaagccccaggagctgagtggacgcaagcgggcctcatcgcttcaaacgtcccccggttcctcctctcacctctcgccgaggccccctctaggcagcagcctcagcccctggtggagatccagtctcacttacttccagcagcaggtgctcccacgacgcacgccctcctgaggccccggggactggcgagtcctgggctgtcccccaccccaccccgctggtcctccaccccactgctgcctctcctgaggcttcccaggtctcggccccagatctctggctcgtggttctggcttggggcctgggaagctgtctgtgcctagagcctctgttggttgggatggaagctgtgagtccagggaacctctgaggagcctggtggccctgctccacccacgggccgtgctgtcaccagccacaaggtggcgccaggagtctctcccagctctagccattcctgctgggccggggattcccacagggctgtgctccagaactggctcccagagccgaggatgatttgaatgggcggctgcacatctccaggtctgtggggtgggaggtcagttgggtgggaacagttcaactgtactcctacttccagcttcttccttgaaagctgcaggcagggctcgcccgtctgtcggtcagacgtggagatggcatttgtggggaaggcctccctccagcccctcctctggagactgtggactcgtggtggggtggggtgtcgaggagaccaaatcccacgagcccggggagcaagctctgcgtcctttctttttcgtgacagctcaaacctggcaaagaagataagcttttcaggaaaaaggtaccatcttcccctccctcctgtgccccaggcctgagcggttagagctgcaccgcagctccctgggccacagtcccgtggcaggggggcgggaggccttgggcgggcgcagccctgagccccagaggctgacgcgtctccgctctcgccctcagcggcggtcctggaagaacgccgaggaccgcatggcgctggccaacaagcccctccggcgcttcaagcaggaacccgaggacgaactgcccgaggcgccccccaagaccagggagagcgaccactcccgctccagctcccccaccgcgggacccagcaccgaaggggccgagggcccggaggagaagaagaaggtgaagatgcgccggaagcggcggcttcccaacaaggagctgagcagggagctgagcaaggagctcaaccacgagatccagaggacggagaacagcctggccaacgagaaccagcagcccatcaagtcggagcctgagagcgagggcgaggagcccaagcggcccccgggcatctgcgagcgtccccaccgcttcagcaaggggctcaacggcaccccccgggagctgcggcaccagctggggcccagcctgcgcagcccgccccgtgtcatctcccggcccccaccctccgtgtccccgcccaagtgtatccagatggagcgccatgtgatccggccaccccccatcagccccccgcctgactcgctacccctggacgatggggcagcccacgtcatgcacagggaggtgtggatggccgtcttcagctacctcagccaccaagacctgtgtgtgtgcatgcgggtctgcaggacctggaaccgctggtgctgcgataagcggttgtggacccgcattgacctgaaccactgcaagtctatcacacccctgatgctgagtggcatcatccggcgacagcccgtctccctcgacctcagctggaccaatatctccaagaagcagctgagctggctcatcaaccggctgcctgggctccgggacttggtgctgtcaggctgctcatggatcgcggtctcggccctttgcagctccagttgtccgctgctccggaccctggatgtccagtgggtggagggactaaaggatgcccagatgcgggatctcctgtccccgcccacagacaacaggccaggtgagttgccaggctgggggtttctgtgggggtggggtgagcgagctagactgttggatctgcttttaccctcagaccccagctgttccccaaaggacatagggatgagtctctgctgccatgttctcagtttgcttcaggcacagaggggatctgggaggaggcaggggctcctgtgcacacgtgagactcgctcctggggctccgcgtgcgtctctctgctttcctgttgactcgctcatggggctctgcgtgtgtctcactgctttcttattgactcgctcatggggctctgcgtgcatctcacttcttttctgttgacttgcccctcgttggtttcaagcctccactgccatcgggatcagtgtggttgtgcaaaggcttccaggatggcacctccccctggactgggctggactgcctaggtccgtgcttctcgccaagccatggggatcggagatgctgcgcagcctctgcactggttggctgatgactactgggtggaatgtgggcatagtgtttctaggtcttttagtttttcaagagaatctgaaaatctaagttttgatgtggagtctgatttttcactgttggaattatgattttgggaggaagcagtttataactaaatgaaatctgagtgttctgtctggctggtgggccttttagagtgtcatgtcagcatgaccaggcctcctcggtcagattgacgggttgccccctccttcctgccccaccaggtcagatggacaatcggagcaagctccggaacatcgtggagctgcgcctggcaggcctggacatcacagatgcctccctgcggctcatcatccgccacatgcccctgctctccaagctccacctcagttactgtaaccacgtcaccgaccagtctatcaacctgctcactgctgttggcaccaccacccgagactccttaaccgagatcaacctgtctgactgcaataaggtcactgatcagtgcctgtccttcttcaaacgctgtggaaacatctgtcatattgacctgaggtactgcaagcaagtcaccaaggaaggctgtgagcagttcatagccgagatgtctgtgagtgtccagtttgggcaagtagaagaaaaactcctgcaaaaactgagttagtccaaggataagtatgtaaatacggggcgggctctgggaggggagagactttacaaaaatgagggcttttattttccatttggaacgtgggacaacagaccacaacgcaattccattttgcaagtctttccaagggagaagctgttcaaccacccgtttgggggatgagtgagccgacactttcctttggtctttctgaatcgtaactgcactgctttctggaccatttctaaggcggcctttacaagaagacattcctgtcggagaggagggtggacttcggagaaattctcatactgaagcatgagcttaggagtttctgttagtggtagtggtgttttggacacttcattccttgcaacaccgaggttttgggtgttgacataaagtggaccacacaccacatctgctgccgtcttgacacttttttttgtttggttggttttgttacatcttacattatgcagaactatttttgtacaaattgtttaaaagttatttatgcaaggtttgaatgcataccagtgtttttattgttttgagattgccaattttcctgatttccttaaggtaggagagaatttaacgtgtacttcatcgacacaacccatctacaaatgtgcccagatctaacaaagtaggctaagaccttccacttaaaagcatgtttaactggaagttgagagtctgctttgtacctcaagagttacatgagcatgttgtggataaatgtaaattatagtcaaagtaagatactctgccaagtttcctctgtagagaattcacttttctcaaattttaaaatttcgacttcagcctttgcactcaggaggttctgctccagcatgagctcttgtacttacatagatctaatttatacagtgagtcaagacgtagaataaatgctcccacatagcctttcttttgcttttgcttctctcctctgaagtgtgagttgagttctcatttaggtttgtaacatggctatttcctagttgtaaagttctgcatttataagtgccattgttgtaaggtggtgtttcctagaccttccctgatgcgattttacctttgttgaatttgtataaacaattgtacaaaaaaaacca

SEQ ID NO: 351289 - DNA, 3571 bp, Homo sapiens
tcgcggcagcgggagcccgagcccgagcccgagcccgagccagggcgagccgagcctgctccgggcgggcggcggcggcggcgccgtctccagccatgtcagcgcgcgcgagcctgggcccaccatgagccatggccatgtccgtgagcgccgaggacgacgactatgaatcggagccggaccagaaccgggctgtgggtcggcccaaggggaagctgggcccggcctccgcggtgaagttggccgccaaccggacaacggcaggagctcggcggcgccggacgcgatgccgcaagtgcgaggcctgcctgcggaccgagtgcggagagtgccacttctgcaaggacatgaagaagttcgggggccccgggcgcatgaagcagagctgcatcatgcggcagtgcatcgcgccagtgctgccccacaccgccgtgtgccttgtgtgtggcgaggcggggaaggaagacacggtggaagaggaggaaggcaagtttaacctcatgctcatggagtgctccatctgcaatgaaatcatccaccctggatgccttaagattaaggagtcagagggtgtggtcaacgacgagcttccaaactgctgggagtgtccgaagtgtaaccacgccggcaagaccgggaaacaaaagcgtggccctggctttaagtacgcctccaacctgcccggctccctgctcaaggagcagaagatgaaccgggacaacaaggaagggcaggaacctgccaagcggaggagtgagtgtgaggaggcgccccggcgcaggtcggatgagcactcgaagaaggtgccgccggacggccttctgcgcagaaagtctgacgacgtgcacctgaggaagaagcggaaatacgagaagccccaggagctgagtggacgcaagcgggcctcatcgcttcaaacgtcccccggttcctcctctcacctctcgccgaggccccctctaggcagcagcctcagcccctggtggagatccagtctcacttacttccagcagcagctcaaacctggcaaagaagataagcttttcaggaaaaagcggcggtcctggaagaacgccgaggaccgcatggcgctggccaacaagcccctccggcgcttcaagcaggaacccgaggacgaactgcccgaggcgccccccaagaccagggagagcgaccactcccgctccagctcccccaccgcgggacccagcaccgaaggggccgagggcccggaggagaagaagaaggtgaagatgcgccggaagcggcggcttcccaacaaggagctgagcagggagctgagcaaggagctcaaccacgagatccagaggacggagaacagcctggccaacgagaaccagcagcccatcaagtcggagcctgagagcgagggcgaggagcccaagcggcccccgggcatctgcgagcgtccccaccgcttcagcaaggggctcaacggcaccccccgggagctgcggcaccagctggggcccagcctgcgcagcccgccccgtgtcatctcccggcccccaccctccgtgtccccgcccaagtgtatccagatggagcgccatgtgatccggccaccccccatcagccccccgcctgactcgctacccctggacgatggggcagcccacgtcatgcacagggaggtgtggatggccgtcttcagctacctcagccaccaagacctgtgtgtgtgcatgcgggtctgcaggacctggaaccgctggtgctgcgataagcggttgtggacccgcattgacctgaaccactgcaagtctatcacacccctgatgctgagtggcatcatccggcgacagcccgtctccctcgacctcagctggaccaatatctccaagaagcagctgagctggctcatcaaccggctgcctgggctccgggacttggtgctgtcaggctgctcatggatcgcggtctcggccctttgcagctccagttgtccgctgctccggaccctggatgtccagtgggtggagggactaaaggatgcccagatgcgggatctcctgtccccgcccacagacaacaggccaggtcagatggacaatcggagcaagctccggaacatcgtggagctgcgcctggcaggcctggacatcacagatgcctccctgcggctcatcatccgccacatgcccctgctctccaagctccacctcagttactgtaaccacgtcaccgaccagtctatcaacctgctcactgctgttggcaccaccacccgagactccttaaccgagatcaacctgtctgactgcaataaggtcactgatcagtgcctgtccttcttcaaacgctgtggaaacatctgtcatattgacctgaggtactgcaagcaagtcaccaaggaaggctgtgagcagttcatagccgagatgtctgtgagtgtccagtttgggcaagtagaagaaaaactcctgcaaaaactgagttagtccaaggataagtatgtaaatacggggcgggctctgggaggggagagactttacaaaaatgagggcttttattttccatttggaacgtgggacaacagaccacaacgcaattccattttgcaagtctttccaagggagaagctgttcaaccacccgtttgggggatgagtgagccgacactttcctttggtctttctgaatcgtaactgcactgctttctggaccatttctaaggcggcctttacaagaagacattcctgtcggagaggagggtggacttcggagaaattctcatactgaagcatgagcttaggagtttctgttagtggtagtggtgttttggacacttcattccttgcaacaccgaggttttgggtgttgacataaagtggaccacacaccacatctgctgccgtcttgacacttttttttgtttggttggttttgttacatcttacattatgcagaactatttttgtacaaattgtttaaaagttatttatgcaaggtttgaatgcataccagtgtttttattgttttgagattgccaattttcctgatttccttaaggtaggagagaatttaacgtgtacttcatcgacacaacccatctacaaatgtgcccagatctaacaaagtaggctaagaccttccacttaaaagcatgtttaactggaagttgagagtctgctttgtacctcaagagttacatgagcatgttgtggataaatgtaaattatagtcaaagtaagatactctgccaagtttcctctgtagagaattcacttttctcaaattttaaaatttcgacttcagcctttgcactcaggaggttctgctccagcatgagctcttgtacttacatagatctaatttatacagtgagtcaagacgtagaataaatgctcccacatagcctttcttttgcttttgcttctctcctctgaagtgtgagttgagttctcatttaggtttgtaacatggctatttcctagttgtaaagttctgcatttataagtgccattgttgtaaggtggtgtttcctagaccttccctgatgcgattttacctttgttgaatttgtataaacaattgtacaaaaaaaacca

SEQ ID NO: 351290 - DNA, 4628 bp, Homo sapiens
caaactcctagtggggagccggcggcttgtggacgtgatggatgtgaacacccagaagggcacggagatgagcatgtcccagtttgtgcgttactacgagacgcccgaggcccagcgggacaagctgtacaacgtcatcagcctagagttcagccacaccaagctggagcacttggtcaagcgtccgactgtggtagacctggtggactgggtggacaacatgtggccccagcatctgaaggagaagcagacagaagccacgaacgccattgcagagatgaagtacccgaaagtgaaaaagtactgtctgatgagcgtgaaaggttgtttcaccgacttccacatcgactttggaggcacttccgtttggtaccatgttttccggggtgggaagattttttggctgattcctccaacgctgcacaatttggcgctgtacgaggagtgggtgctgtcaggcaaacagagtgacatctttctgggagaccgtgtggaacgatgccaaagaattgagctgaagcagggctacacatttttcatcccttccggttggatccatgccgtctacacccctgtagactctttggtgttcggcggaaacatcctgcacagctttaacgtgcccatgcagctgcggatctacgagatcgaggacaggacgcgggtgcagcccaaattccgttaccccttctactatgagatgtgctggtatgtcctggagagatacgtgtactgtgtgacccagcgctcccacctcactcaggaataccagagggagtcgatgcttattgatgccccgaggaagcccagcatagacggcttctcttcggattcctggctggagatggaggaggaggcctgtgatcagcagcctcaggaggaggaggagaaggacgaggagggcgagggcagggacagggcacccaaaccgcccaccgatggctccacttcacccaccagcacgccctctgaggaccaggaggccctcgggaagaagcccaaagcacctgccctgcgattcctcaaaaggactttgtctaatgagtcggaggaaagtgtgaagtccaccacattggccgtagactaccccaagacccccaccggctctcccgccacggaggtctctgccaaatggacccatctcactgagtttgaactgaagggcctgaaagctctggtggagaaactggaatccctcccggagaacaagaagtgtgtccccgagggcatcgaggacccccaggcactcctggagggtgtgaagaacgtcctgaaggagcacgcagatgatgaccctagtctggccatcactggggtccctgtggtgacttggccaaagaagactccaaagaaccgggctgtgggtcggcccaaggggaagctgggcccggcctccgcggtgaagttggccgccaaccggacaacggcaggagctcggcggcgccggacgcgatgccgcaagtgcgaggcctgcctgcggaccgagtgcggagagtgccacttctgcaaggacatgaagaagttcgggggccccgggcgcatgaagcagagctgcatcatgcggcagtgcatcgcgccagtgctgccccacaccgccgtgtgccttgtgtgtggcgaggcggggaaggaagacacggtggaagaggaggaaggcaagtttaacctcatgctcatggagtgctccatctgcaatgaaatcatccaccctggatgccttaagattaaggagtcagagggtgtggtcaacgacgagcttccaaactgctgggagtgtccgaagtgtaaccacgccggcaagaccgggaaacaaaagcgtggccctggctttaagtacgcctccaacctgcccggctccctgctcaaggagcagaagatgaaccgggacaacaaggaagggcaggaacctgccaagcggaggagtgagtgtgaggaggcgccccggcgcaggtcggatgagcactcgaagaaggtgccgccggacggccttctgcgcagaaagtctgacgacgtgcacctgaggaagaagcggaaatacgagaagccccaggagctgagtggacgcaagcgggcctcatcgcttcaaacgtcccccggttcctcctctcacctctcgccgaggccccctctaggcagcagcctcagcccctggtggagatccagtctcacttacttccagcagcagctcaaacctggcaaagaagataagcttttcaggaaaaagcggcggtcctggaagaacgccgaggaccgcatggcgctggccaacaagcccctccggcgcttcaagcaggaacccgaggacgaactgcccgaggcgccccccaagaccagggagagcgaccactcccgctccagctcccccaccgcgggacccagcaccgaaggggccgagggcccggaggagaagaagaaggtgaagatgcgccggaagcggcggcttcccaacaaggagctgagcagggagctgagcaaggagctcaaccacgagatccagaggacggagaacagcctggccaacgagaaccagcagcccatcaagtcggagcctgagagcgagggcgaggagcccaagcggcccccgggcatctgcgagcgtccccaccgcttcagcaaggggctcaacggcaccccccgggagctgcggcaccagctggggcccagcctgcgcagcccgccccgtgtcatctcccggcccccaccctccgtgtccccgcccaagtgtatccagatggagcgccatgtgatccggccaccccccatcagccccccgcctgactcgctacccctggacgatggggcagcccacgtcatgcacagggaggtgtggatggccgtcttcagctacctcagccaccaagacctgtgtgtgtgcatgcgggtctgcaggacctggaaccgctggtgctgcgataagcggttgtggacccgcattgacctgaaccactgcaagtctatcacacccctgatgctgagtggcatcatccggcgacagcccgtctccctcgacctcagctggaccaatatctccaagaagcagctgagctggctcatcaaccggctgcctgggctccgggacttggtgctgtcaggctgctcatggatcgcggtctcggccctttgcagctccagttgtccgctgctccggaccctggatgtccagtgggtggagggactaaaggatgcccagatgcgggatctcctgtccccgcccacagacaacaggccaggtcagatggacaatcggagcaagctccggaacatcgtggagctgcgcctggcaggcctggacatcacagatgcctccctgcggctcatcatccgccacatgcccctgctctccaagctccacctcagttactgtaaccacgtcaccgaccagtctatcaacctgctcactgctgttggcaccaccacccgagactccttaaccgagatcaacctgtctgactgcaataaggtcactgatcagtgcctgtccttcttcaaacgctgtggaaacatctgtcatattgacctgaggtactgcaagcaagtcaccaaggaaggctgtgagcagttcatagccgagatgtctgtgagtgtccagtttgggcaagtagaagaaaaactcctgcaaaaactgagttagtccaaggataagtattctttccaagggagaagctgttcaaccacccgtttgggggatgagtgagccgacactttcctttggtctttctgaatcgtaactgcactgctttctggaccatttctaaggcggcctttacaagaagacattcctgtcggagaggagggtggacttcggagaaattctcatactgaagcatgagcttaggagtttctgttagtggtagtggtgttttggacacttcattccttgcaacaccgaggttttgggtgttgacataaagtggaccacacaccacatctgctgccgtcttgacacttttttttgtttggttggttttgttacatcttacattatgcagaactatttttgtacaaattgtttaaaagttatttatgcaaggtttgaatgcataccagtgtttttattgttttgagattgccaattttcctgatttccttaaggtaggagagaatttaacgtgtacttcatcgacacaacccatctacaaatgtgcccagatctaacaaagtaggctaagaccttccacttaaaagcatgtttaactggaagttgagagtctgctttgtacctcaagagttacatgagcatgttgtggataaatgtaaattatagtcaaagtaagatactctgccaagtttcctctgtagagaattcacttttctcaaattttaaaatttcgacttcagcctttgcactcaggaggttctgctccagcatgagctcttgtacttacatagatctaatttatacagtgagtcaagacgtagaataaatgctcccacatagcctttcttttgcttttgcttctctcctctgaagtgtgagttgagttctcatttaggtttgtaacatggctatttcctagttgtaaagttctgcatttataagtgccattgttgtaaggtggtgtttcctagaccttccctgatgcgattttacctttgttgaatttgtataaacaattgtacaaaaaaaacca

SEQ ID NO: 351291 - DNA, 2076 bp, Homo sapiens
ttgatagagagtctcgctctgttgcccagcctggagtgcagtgcagtggcacgatcttggctcactgcaacctccacctgggtgacaaaagcgagactctgtctcaaaaaaaaaaagcacaaagggtgtgtctgcagatgagggtgtgatgaagtctgaattctgcttttgctagaagggcatgttggtctggtgtctaggctgctggcacacggtcagtcctggagttagggccaaacagctgtccctcatgctgtgaattgctccaaagcactgcggcctgcaaaagcaaaaatgatcccaagatgcccttagggatgttctttctgtgacccagcaatgcccctctgggaatttatctgaagggaggaggcaaataaatgcacagtaatagacatagagcagtactcatcaacaacatattagatgagaaaagcaagctacttgacatggtgtgtgaacctatcattgtaaaagcacatagaactacttacatgagcatacgcacgtatagaggcagctgtgtggtaaatcagaagtgattttcacgtggttatctgaatgcttttgaggcatatattaacctttatacctggcgggtgagacccttccccgtttgaagaagagagattttaagcaaataacattttatttagtgcagcacagcagggactggaatatgtagagctctgacctgtccccactgctgagtgcctgggtctggcggcgggggggcttctggctcctggccttcacacctcacattactatttcttctctgcagaactgcaataaggtcactgatcagtgcctgtccttcttcaaacgctgtggaaacatctgtcatattgacctgaggtactgcaagcaagtcaccaaggaaggctgtgagcagttcatagccgagatgtctgtgagtgtccagtttgggcaagtagaagaaaaactcctgcaaaaactgagttagtccaaggataagtatgtaaatacggggcgggctctgggaggggagagactttacaaaaatgagggcttttattttccatttggaacgtgggacaacagaccacaacgcaattccattttgcaagtctttccaagggagaagctgttcaaccacccgtttgggggatgagtgagccgacactttcctttggtctttctgaatcgtaactgcactgctttctggaccatttctaaggcggcctttacaagaagacattcctgtcggagaggagggtggacttcggagaaattctcatactgaagcatgagcttaggagtttctgttagtggtagtggtgttttggacacttcattccttgcaacaccgaggttttgggtgttgacataaagtggaccacacaccacatctgctgccgtcttgacacttttttttgtttggttggttttgttacatcttacattatgcagaactatttttgtacaaattgtttaaaagttatttatgcaaggtttgaatgcataccagtgtttttattgttttgagattgccaattttcctgatttccttaaggtaggagagaatttaacgtgtacttcatcgacacaacccatctacaaatgtgcccagatctaacaaagtaggctaagaccttccacttaaaagcatgtttaactggaagttgagagtctgctttgtacctcaagagttacatgagcatgttgtggataaatgtaaattatagtcaaagtaagatactctgccaagtttcctctgtagagaattcacttttctcaaattttaaaatttcgacttcagcctttgcactcaggaggttctgctccagcatgagctcttgtacttacatagatctaatttatacagtgagtcaagacgtagaataaatgctcccacatagcctttcttttgcttttgcttctctcctctgaagtgtgagttgagttctcatttaggtttgtaacatggctatttcctagttgtaaagttctgcatttataagtgccattgttgtaaggtggtgtttcctagaccttccctgatgcgattttacctttgttgaatttgtataaacaattgtacaaaaaaaacca

SEQ ID NO: 351292 - DNA, 2432 bp, Homo sapiens
caaactcctagtggggagccggcggcttgtggacgtgatggatgtgaacacccagaagggcacggagatgagcatgtcccagtttgtgcgttactacgagacgcccgaggcccagcgggacaagctgtacaacgtcatcagcctagagttcagccacaccaagctggagcacttggtcaagcgtccgactgtggtagacctggtggactgggtggacaacatgtggccccagcatctgaaggagaagcagacagaagccacgaacgccattgcagagatgaagtacccgaaagtgaaaaagtactgtctgatgagcgtgaaaggttgtttcaccgacttccacatcgactttggaggcacttccgtttggtaccatgttttccggggtgggaagattttttggctgattcctccaacgctgcacaatttggcgctgtacgaggagtgggtgctgtcaggcaaacagagtgacatctttctgggagaccgtgtggaacgatgccaaagaattgagctgaagcagggctacacatttttcatcccttccggttggatccatgccgtctacacccctgtagactctttggtgttcggcggaaacatcctgcacagctttaacgtgcccatgcagctgcggatctacgagatcgaggacaggacgcgggtgcagcccaaattccgttaccccttctactatgagatgtgctggtatgtcctggagagatacgtgtactgtgtgacccagcgctcccacctcactcaggaataccagagggagtcgatgcttattgatgccccgaggaagcccagcatagacggcttctcttcggattcctggctggagatggaggaggaggcctgtgatcagcagcctcaggaggaggaggagaaggacgaggagggcgagggcagggacagggcacccaaaccgcccaccgatggctccacttcacccaccagcacgccctctgaggaccaggaggccctcgggaagaagcccaaagcacctgccctgcgattcctcaaaaggactttgtctaatgagtcggaggaaagtgtgaagtccaccacattggccgtagactaccccaagacccccaccggctctcccgccacggaggtctctgccaaatggacccatactgcaataaggtcactgatcagtgcctgtccttcttcaaacgctgtggaaacatctgtcatattgacctgaggtactgcaagcaagtcaccaaggaaggctgtgagcagttcatagccgagatgtctgtgagtgtccagtttgggcaagtagaagaaaaactcctgcaaaaactgagttagtccaaggataagtatgtaaatacggggcgggctctgggaggggagagactttacaaaaatgagggcttttattttccatttggaacgtgggacaacagaccacaacgcaattccattttgcaagtctttccaagggagaagctgttcaaccacccgtttgggggatgagtgagccgacactttcctttggtctttctgaatcgtaactgcactgctttctggaccatttctaaggcggcctttacaagaagacattcctgtcggagaggagggtggacttcggagaaattctcatactgaagcatgagcttaggagtttctgttagtggtagtggtgttttggacacttcattccttgcaacaccgaggttttgggtgttgacataaagtggaccacacaccacatctgctgccgtcttgacacttttttttgtttggttggttttgttacatcttacattatgcagaactatttttgtacaaattgtttaaaagttatttatgcaaggtttgaatgcataccagtgtttttattgttttgagattgccaattttcctgatttccttaaggtaggagagaatttaacgtgtacttcatcgacacaacccatctacaaatgtgcccagatctaacaaagtaggctaagaccttccacttaaaagcatgtttaactggaagttgagagtctgctttgtacctcaagagttacatgagcatgttgtggataaatgtaaattatagtcaaagtaagatactctgccaagtttcctctgtagagaattcacttttctcaaattttaaaatttcgacttcagcctttgcactcaggaggttctgctccagcatgagctcttgtacttacatagatctaatttatacagtgagtcaagacgtagaataaatgctcccacatagcctttcttttgcttttgcttctctcctctgaagtgtgagttgagttctcatttaggtttgtaacatggctatttcctagttgtaaagttctgcatttataagtgccattgttgtaaggtggtgtttcctagaccttccctgatgcgattttacctttgttgaatttgtataaacaattgtacaaaaaaaacca

SEQ ID NO: 351293 - DNA, 2673 bp, Homo sapiens
tcgcggcagcgggagcccgagcccgagcccgagcccgagccagggcgagccgagcctgctccgggcgggcggcggcggcggcgccgtctccagccatgtcagcgcgcgcgagcctgggcccaccatgagccatggccatgtccgtgagcgccgaggacgacgactatgaatcggagccggaccagaaccgggctgtgggtcggcccaaggggaagctgggcccggcctccgcggtgaagttggccgccaaccggacaacggcaggagctcggcggcgccggacgcgatgccgcaagtgcgaggcctgcctgcggaccgagtgcggagagtgccacttctgcaaggacatgaagaagttcgggggccccgggcgcatgaagcagagctgcatcatgcggcagtgcatcgcgccagtgctgccccacaccgccgtgtgccttgtgtgtggcgaggcggggaaggaagacacggtggaagaggaggaaggcaagtttaacctcatgctcatggagtgctccatctgcaatgaaatcatccaccctggatgccttaagattaaggagtcagagggtgtggtcaacgacgagcttccaaactgctgggagtgtccgaagtgtaaccacgccggcaagaccgggaaacaaaagcgtggccctggctttaagtacgcctccaacctgcccggctccctgctcaaggagcagaagatgaaccgggacaacaaggaagggcaggaacctgccaagcggaggagtgagtgtgaggaggcgccccggcgcaggtcggatgagcactcgaagaaggtgccgccggacggccttctgcgcagaaagtctgacgacgtgcacctgaggaagaagcggaaatacgagaagccccaggagctgagtggacgcaagcgggcctcatcgcttcaaacgtcccccggttcctcctctcacctctcgccgaggccccctctaggcagcagcctcagcccctggtggagatccagtctcacttacttccagcagcagctcaaacctggcaaagaagataagcttttcaggaaaaagcggcggtcctggaagaacgccgaggaccgcatggcgctggccaacaagcccctccggcgcttcaagcaggaacccgaggacgaactgcccgaggcgccccccaagaccagggagagcgaccactcccgctccagctcccccaccgcgggacccagcaccgaaggggccgagggcccggaggagaagaagaaggtgaagatgcgccggaagcggcggcttcccaacaaggagctgagcagggagctgagcaaggagctcaaccacgagatccagaggacggagaacagcctggccaacgagaaccagcagcccatcaagtcggagcctgagagcgagggcgaggagcccaagcggcccccgggcatctgcgagcgtccccaccgcttcagcaaggggctcaacggcaccccccgggagctgcggcaccagctggggcccagcctgcgcagcccgccccgtgtcatctcccggcccccaccctccgtgtccccgcccaagtgtatccagatggagcgccatgtgatccggccaccccccatcagccccccgcctgactcgctacccctggacgatggggcagcccacgtcatgcacagggaggtgtggatggccgtcttcagctacctcagccaccaagacctgtgtgtgtgcatgcgggtctgcaggacctggaaccgctggtgctgcgataagcggttgtggacccgcattgacctgaaccactgcaagtctatcacacccctgatgctgagtggcatcatccggcgacagcccgtctccctcgacctcagctggaccaatatctccaagaagcagctgagctggctcatcaaccggctgcctgggctccgggacttggtgctgtcaggctgctcatggatcgcggtctcggccctttgcagctccagttgtccgctgctccggaccctggatgtccagtgggtggagggactaaaggatgcccagatgcgggatctcctgtccccgcccacagacaacaggccaggtcagatggacaatcggagcaagctccggaacatcgtggagctgcgcctggcaggcctggacatcacagatgcctccctgcggctcatcatccgccacatgcccctgctctccaagctccacctcagttactgtaaccacgtcaccgaccagtctatcaacctgctcactgctgttggcaccaccacccgagactccttaaccgagatcaacctgtctgactgcaataaggtcactgatcagtgcctgtccttcttcaaacgctgtggaaacatctgtcatattgacctgaggtactgcaagcaagtcaccaaggaaggctgtgagcagttcatagccgagatgtctgtcagaggagatcaaagggaatcatgaatagttggaacagaacaggaattcaagcttgaaagaaaaccattgcccagccagcagcctacgacctctgaaagctctgaggatgaagattcctgcatctaccactgtgacatcatctttgaagatgaagaatccatccagaagataaatccttccaagcctggactccatctacctggctctcctttagtatgtttcatcttcctgtactttctcataaatttcagaaatttaaaaa

SEQ ID NO: 351294 - DNA, 415 bp, Homo sapiens
aggttgcagtgagccaagagtgcaccattgcactccagcctgggtgacaaaagcgagactctgtctcaaaaaaaaaaagcacaaagggtgtgtctgcagatgagggtgtgatgaagtctgaattctgcttttgctagaagggcatgttggtctggtgtctaggctgctggcacacggtcagtcctggagttagggccaaacagctgtccctcatgctgtgaattgctccaaagcactgcggcctgcaaaagcaaaaatgatcccaagatgcccttagggatgttctttctgtgacccagcaatgcccctctgggaatttatctgaagggaggaggcaaataaatgcacagtaatagacatagagcagtactcatcaacaacatattagatgagaaaagcaagctacttgacatgg

SEQ ID NO: 351295 - DNA, 4737 bp, Homo sapiens
caaactcctagtggggagccggcggcttgtggacgtgatggatgtgaacacccagaagggcacggagatgagcatgtcccagtttgtgcgttactacgagacgcccgaggcccagcgggacaagctgtacaacgtcatcagcctagagttcagccacaccaagctggagcacttggtcaagcgtccgactgtggtagacctggtggactgggtggacaacatgtggccccagcatctgaaggagaagcagacagaagccacgaacgccattgcagagatgaagtacccgaaagtgaaaaagtactgtctgatgagcgtgaaaggttgtttcaccgacttccacatcgactttggaggcacttccgtttggtaccatgttttccggggtgggaagattttttggctgattcctccaacgctgcacaatttggcgctgtacgaggagtgggtgctgtcaggcaaacagagtgacatctttctgggagaccgtgtggaacgatgccaaagaattgagctgaagcagggctacacatttttcatcccttccggttggatccatgccgtctacacccctgtagactctttggtgttcggcggaaacatcctgcacagctttaacgtgcccatgcagctgcggatctacgagatcgaggacaggacgcgggtgcagcccaaattccgttaccccttctactatgagatgtgctggtatgtcctggagagatacgtgtactgtgtgacccagcgctcccacctcactcaggaataccagagggagtcgatgcttattgatgccccgaggaagcccagcatagacggcttctcttcggattcctggctggagatggaggaggaggcctgtgatcagcagcctcaggaggaggaggagaaggacgaggagggcgagggcagggacagggcacccaaaccgcccaccgatggctccacttcacccaccagcacgccctctgaggaccaggaggccctcgggaagaagcccaaagcacctgccctgcgattcctcaaaaggactttgtctaatgagtcggaggaaagtgtgaagtccaccacattggccgtagactaccccaagacccccaccggctctcccgccacggaggtctctgccaaatggacccatctcactgagtttgaactgaagggcctgaaagctctggtggagaaactggaatccctcccggagaacaagaagtgtgtccccgagggcatcgaggacccccaggcactcctggagggtgtgaagaacgtcctgaaggagcacgcagatgatgaccctagtctggccatcactggggtccctgtggtgacttggccaaagaagactccaaagaaccgggctgtgggtcggcccaaggggaagctgggcccggcctccgcggtgaagttggccgccaaccggacaacggcaggagctcggcggcgccggacgcgatgccgcaagtgcgaggcctgcctgcggaccgagtgcggagagtgccacttctgcaaggacatgaagaagttcgggggccccgggcgcatgaagcagagctgcatcatgcggcagtgcatcgcgccagtgctgccccacaccgccgtgtgccttgtgtgtggcgaggcggggaaggaagacacggtggaagaggaggaaggcaagtttaacctcatgctcatggagtgctccatctgcaatgaaatcatccaccctggatgccttaagattaaggagtcagagggtgtggtcaacgacgagcttccaaactgctgggagtgtccgaagtgtaaccacgccggcaagaccgggaaacaaaagcgtggccctggctttaagtacgcctccaacctgcccggctccctgctcaaggagcagaagatgaaccgggacaacaaggaagggcaggaacctgccaagcggaggagtgagtgtgaggaggcgccccggcgcaggtcggatgagcactcgaagaaggtgccgccggacggccttctgcgcagaaagtctgacgacgtgcacctgaggaagaagcggaaatacgagaagccccaggagctgagtggacgcaagcgggcctcatcgcttcaaacgtcccccggttcctcctctcacctctcgccgaggccccctctaggcagcagcctcagcccctggtggagatccagtctcacttacttccagcagcagctcaaacctggcaaagaagataagcttttcaggaaaaagcggcggtcctggaagaacgccgaggaccgcatggcgctggccaacaagcccctccggcgcttcaagcaggaacccgaggacgaactgcccgaggcgccccccaagaccagggagagcgaccactcccgctccagctcccccaccgcgggacccagcaccgaaggggccgagggcccggaggagaagaagaaggtgaagatgcgccggaagcggcggcttcccaacaaggagctgagcagggagctgagcaaggagctcaaccacgagatccagaggacggagaacagcctggccaacgagaaccagcagcccatcaagtcggagcctgagagcgagggcgaggagcccaagcggcccccgggcatctgcgagcgtccccaccgcttcagcaaggggctcaacggcaccccccgggagctgcggcaccagctggggcccagcctgcgcagcccgccccgtgtcatctcccggcccccaccctccgtgtccccgcccaagtgtatccagatggagcgccatgtgatccggccaccccccatcagccccccgcctgactcgctacccctggacgatggggcagcccacgtcatgcacagggaggtgtggatggccgtcttcagctacctcagccaccaagacctgtgtgtgtgcatgcgggtctgcaggacctggaaccgctggtgctgcgataagcggttgtggacccgcattgacctgaaccactgcaagtctatcacacccctgatgctgagtggcatcatccggcgacagcccgtctccctcgacctcagctggaccaatatctccaagaagcagctgagctggctcatcaaccggctgcctgggctccgggacttggtgctgtcaggctgctcatggatcgcggtctcggccctttgcagctccagttgtccgctgctccggaccctggatgtccagtgggtggagggactaaaggatgcccagatgcgggatctcctgtccccgcccacagacaacaggccaggtcagatggacaatcggagcaagctccggaacatcgtggagctgcgcctggcaggcctggacatcacagatgcctccctgcggctcatcatccgccacatgcccctgctctccaagctccacctcagttactgtaaccacgtcaccgaccagtctatcaacctgctcactgctgttggcaccaccacccgagactccttaaccgagatcaacctgtctgactgcaataaggtcactgatcagtgcctgtccttcttcaaacgctgtggaaacatctgtcatattgacctgaggtactgcaagcaagtcaccaaggaaggctgtgagcagttcatagccgagatgtctgtgagtgtccagtttgggcaagtagaagaaaaactcctgcaaaaactgagttagtccaaggataagtatgtaaatacggggcgggctctgggaggggagagactttacaaaaatgagggcttttattttccatttggaacgtgggacaacagaccacaacgcaattccattttgcaagtctttccaagggagaagctgttcaaccacccgtttgggggatgagtgagccgacactttcctttggtctttctgaatcgtaactgcactgctttctggaccatttctaaggcggcctttacaagaagacattcctgtcggagaggagggtggacttcggagaaattctcatactgaagcatgagcttaggagtttctgttagtggtagtggtgttttggacacttcattccttgcaacaccgaggttttgggtgttgacataaagtggaccacacaccacatctgctgccgtcttgacacttttttttgtttggttggttttgttacatcttacattatgcagaactatttttgtacaaattgtttaaaagttatttatgcaaggtttgaatgcataccagtgtttttattgttttgagattgccaattttcctgatttccttaaggtaggagagaatttaacgtgtacttcatcgacacaacccatctacaaatgtgcccagatctaacaaagtaggctaagaccttccacttaaaagcatgtttaactggaagttgagagtctgctttgtacctcaagagttacatgagcatgttgtggataaatgtaaattatagtcaaagtaagatactctgccaagtttcctctgtagagaattcacttttctcaaattttaaaatttcgacttcagcctttgcactcaggaggttctgctccagcatgagctcttgtacttacatagatctaatttatacagtgagtcaagacgtagaataaatgctcccacatagcctttcttttgcttttgcttctctcctctgaagtgtgagttgagttctcatttaggtttgtaacatggctatttcctagttgtaaagttctgcatttataagtgccattgttgtaaggtggtgtttcctagaccttccctgatgcgattttacctttgttgaatttgtataaacaattgtacaaaaaaaacca

SEQ ID NO: 351296 - DNA, 4835 bp, Homo sapiens
caaactcctagtggggagccggcggcttgtggacgtgatggatgtgaacacccagaagggcacggagatgagcatgtcccagtttgtgcgttactacgagacgcccgaggcccagcgggacaagctgtacaacgtcatcagcctagagttcagccacaccaagctggagcacttggtcaagcgtccgactgtggtagacctggtggactgggtggacaacatgtggccccagcatctgaaggagaagcagacagaagccacgaacgccattgcagagatgaagtacccgaaagtgaaaaagtactgtctgatgagcgtgaaaggttgtttcaccgacttccacatcgactttggaggcacttccgtttggtaccatgttttccggggtgggaagattttttggctgattcctccaacgctgcacaatttggcgctgtacgaggagtgggtgctgtcaggcaaacagagtgacatctttctgggagaccgtgtggaacgatgccaaagaattgagctgaagcagggctacacatttttcatcccttccggttggatccatgccgtctacacccctgtagactctttggtgttcggcggaaacatcctgcacagctttaacgtgcccatgcagctgcggatctacgagatcgaggacaggacgcgggtgcagcccaaattccgttaccccttctactatgagatgtgctggtatgtcctggagagatacgtgtactgtgtgacccagcgctcccacctcactcaggaataccagagggagtcgatgcttattgatgccccgaggaagcccagcatagacggcttctcttcggattcctggctggagatggaggaggaggcctgtgatcagcagcctcaggaggaggaggagaaggacgaggagggcgagggcagggacagggcacccaaaccgcccaccgatggctccacttcacccaccagcacgccctctgaggaccaggaggccctcgggaagaagcccaaagcacctgccctgcgattcctcaaaaggactttgtctaatgagtcggaggaaagtgtgaagtccaccacattggccgtagactaccccaagacccccaccggctctcccgccacggaggtctctgccaaatggacccatctcactgagtttgaactgaagggcctgaaagctctggtggagaaactggaatccctcccggagaacaagaagtgtgtccccgagggcatcgaggacccccaggcactcctggagggtgtgaagaacgtcctgaaggagcacgcagatgatgaccctagtctggccatcactggggtccctgtggtgacttggccaaagaagactccaaagaaccgggctgtgggtcggcccaaggggaagctgggcccggcctccgcggtgaagttggccgccaaccggacaacggcaggagctcggcggcgccggacgcgatgccgcaagtgcgaggcctgcctgcggaccgagtgcggagagtgccacttctgcaaggacatgaagaagttcgggggccccgggcgcatgaagcagagctgcatcatgcggcagtgcatcgcgccagtgctgccccacaccgccgtgtgccttgtgtgtggcgaggcggggaaggaagacacggtggaagaggaggaaggcaagtttaacctcatgctcatggagtgctccatctgcaatgaaatcatccaccctggatgccttaagattaaggagtcagagggtgtggtcaacgacgagcttccaaactgctgggagtgtccgaagtgtaaccacgccggcaagaccgggaaacaaaagcgtggccctggctttaagtacgcctccaacctgcccggctccctgctcaaggagcagaagatgaaccgggacaacaaggaagggcaggaacctgccaagcggaggagtgagtgtgaggaggcgccccggcgcaggtcggatgagcactcgaagaaggtgccgccggacggccttctgcgcagaaagtctgacgacgtgcacctgaggaagaagcggaaatacgagaagccccaggagctgagtggacgcaagcgggcctcatcgcttcaaacgtcccccggttcctcctctcacctctcgccgaggccccctctaggcagcagcctcagcccctggtggagatccagtctcacttacttccagcagcagctcaaacctggcaaagaagataagcttttcaggaaaaagcggcggtcctggaagaacgccgaggaccgcatggcgctggccaacaagcccctccggcgcttcaagcaggaacccgaggacgaactgcccgaggcgccccccaagaccagggagagcgaccactcccgctccagctcccccaccgcgggacccagcaccgaaggggccgagggcccggaggagaagaagaaggtgaagatgcgccggaagcggcggcttcccaacaaggagctgagcagggagctgagcaaggagctcaaccacgagatccagaggacggagaacagcctggccaacgagaaccagcagcccatcaagtcggagcctgagagcgagggcgaggagcccaagcggcccccgggcatctgcgagcgtccccaccgcttcagcaaggggctcaacggcaccccccgggagctgcggcaccagctggggcccagcctgcgcagcccgccccgtgtcatctcccggcccccaccctccgtgtccccgcccaagtgtatccagatggagcgccatgtgatccggccaccccccatcagccccccgcctgactcgctacccctggacgatggggcagcccacgtcatgcacagggaggtgtggatggccgtcttcagctacctcagccaccaagacctgtgtgtgtgcatgcgggtctgcaggacctggaaccgctggtgctgcgataagcggttgtggacccgcattgacctgaaccactgcaagtctatcacacccctgatgctgagtggcatcatccggcgacagcccgtctccctcgacctcagctggaccaatatctccaagaagcagctgagctggctcatcaaccggctgcctgggctccgggacttggtgctgtcaggctgctcatggatcgcggtctcggccctttgcagctccagttgtccgctgctccggaccctggatgtccagtgggtggagggactaaaggatgcccagatgcgggatctcctgtccccgcccacagacaacaggccaggtcagatggacaatcggagcaagctccggaacatcgtggagctgcgcctggcaggcctggacatcacagatgcctccctgcggctcatcatccgccacatgcccctgctctccaagctccacctcagttactgtaaccacgtcaccgaccagtctatcaacctgctcactgctgttggcaccaccacccgagactccttaaccgagatcaacctgtctgcttctttgttggaagggtctttgggctccagttttggggaatatgtgaaccacaagccaggaagaatgctggctgggcatgaatgagcctccaaagagggcccaaattagtacccaaagacaactcagaaaaggagccagctgggcctccaggtctcacttcacaccaagtgctgccttaccaccgacagactgcaataaggtcactgatcagtgcctgtccttcttcaaacgctgtggaaacatctgtcatattgacctgaggtactgcaagcaagtcaccaaggaaggctgtgagcagttcatagccgagatgtcttctttccaagggagaagctgttcaaccacccgtttgggggatgagtgagccgacactttcctttggtctttctgaatcgtaactgcactgctttctggaccatttctaaggcggcctttacaagaagacattcctgtcggagaggagggtggacttcggagaaattctcatactgaagcatgagcttaggagtttctgttagtggtagtggtgttttggacacttcattccttgcaacaccgaggttttgggtgttgacataaagtggaccacacaccacatctgctgccgtcttgacacttttttttgtttggttggttttgttacatcttacattatgcagaactatttttgtacaaattgtttaaaagttatttatgcaaggtttgaatgcataccagtgtttttattgttttgagattgccaattttcctgatttccttaaggtaggagagaatttaacgtgtacttcatcgacacaacccatctacaaatgtgcccagatctaacaaagtaggctaagaccttccacttaaaagcatgtttaactggaagttgagagtctgctttgtacctcaagagttacatgagcatgttgtggataaatgtaaattatagtcaaagtaagatactctgccaagtttcctctgtagagaattcacttttctcaaattttaaaatttcgacttcagcctttgcactcaggaggttctgctccagcatgagctcttgtacttacatagatctaatttatacagtgagtcaagacgtagaataaatgctcccacatagcctttcttttgcttttgcttctctcctctgaagtgtgagttgagttctcatttaggtttgtaacatggctatttcctagttgtaaagttctgcatttataagtgccattgttgtaaggtggtgtttcctagaccttccctgatgcgattttacctttgttgaatttgtataaacaattgtacaaaaaaaaccactcttgaactttgagggtttctgttctaggagtggactagaagtttaagcccagagtcagtaaacactgttttgaagtccaaacaa

SEQ ID NO: 351297 - DNA, 3393 bp, Homo sapiens
tcgcggcagcgggagcccgagcccgagcccgagcccgagccagggcgagccgagcctgctccgggcgggcggcggcggcggcgccgtctccagccatgtcagcgcgcgcgagcctgggcccaccatgagccatggccatgtccgtgagcgccgaggacgacgactatgaatcggagccggaccagaaccgggctgtgggtcggcccaaggggaagctgggcccggcctccgcggtgaagttggccgccaaccggacaacggcaggagctcggcggcgccggacgcgatgccgcaagtgcgaggcctgcctgcggaccgagtgcggagagtgccacttctgcaaggacatgaagaagttcgggggccccgggcgcatgaagcagagctgcatcatgcggcagtgcatcgcgccagtgctgccccacaccgccgtgtgccttgtgtgtggcgaggcggggaaggaagacacggtggaagaggaggaaggcaagtttaacctcatgctcatggagtgctccatctgcaatgaaatcatccaccctggatgccttaagattaaggagtcagagggtgtggtcaacgacgagcttccaaactgctgggagtgtccgaagtgtaaccacgccggcaagaccgggaaacaaaagcgtggccctggctttaagtacgcctccaacctgcccggctccctgctcaaggagcagaagatgaaccgggacaacaaggaagggcaggaacctgccaagcggaggagtgagtgtgaggaggcgccccggcgcaggtcggatgagcactcgaagaaggtgccgccggacggccttctgcgcagaaagtctgacgacgtgcacctgaggaagaagcggaaatacgagaagccccaggagctgagtggacgcaagcgggcctcatcgcttcaaacgtcccccggttcctcctctcacctctcgccgaggccccctctaggcagcagcctcagcccctggtggagatccagtctcacttacttccagcagcagctcaaacctggcaaagaagataagcttttcaggaaaaagcggcggtcctggaagaacgccgaggaccgcatggcgctggccaacaagcccctccggcgcttcaagcaggaacccgaggacgaactgcccgaggcgccccccaagaccagggagagcgaccactcccgctccagctcccccaccgcgggacccagcaccgaaggggccgagggcccggaggagaagaagaaggtgaagatgcgccggaagcggcggcttcccaacaaggagctgagcagggagctgagcaaggagctcaaccacgagatccagaggacggagaacagcctggccaacgagaaccagcagcccatcaagtcggagcctgagagcgagggcgaggagcccaagcggcccccgggcatctgcgagcgtccccaccgcttcagcaaggggctcaacggcaccccccgggagctgcggcaccagctggggcccagcctgcgcagcccgccccgtgtcatctcccggcccccaccctccgtgtccccgcccaagtgtatccagatggagcgccatgtgatccggccaccccccatcagccccccgcctgactcgctacccctggacgatggggcagcccacgtcatgcacagggaggtgtggatggccgtcttcagctacctcagccaccaagacctgtgtgtgtgcatgcgggtctgcaggacctggaaccgctggtgctgcgataagcggttgtggacccgcattgacctgaaccactgcaagtctatcacacccctgatgctgagtggcatcatccggcgacagcccgtctccctcgacctcagctggaccaatatctccaagaagcagctgagctggctcatcaaccggctgcctgggctccgggacttggtgctgtcaggctgctcatggatcgcggtctcggccctttgcagctccagttgtccgctgctccggaccctggatgtccagtgggtggagggactaaaggatgcccagatgcgggatctcctgtccccgcccacagacaacaggccaggtcagatggacaatcggagcaagctccggaacatcgtggagctgcgcctggcaggcctggacatcacagatgcctccctgcggctcatcatccgccacatgcccctgctctccaagctccacctcagttactgtaaccacgtcaccgaccagtctatcaacctgctcactgctgttggcaccaccacccgagactccttaaccgagatcaacctgtctgactgcaataaggtcactgatcagtgcctgtccttcttcaaacgctgtggaaacatctgtcatattgacctgaggtactgcaagcaagtcaccaaggaaggctgtgagcagttcatagccgagatgtcttctttccaagggagaagctgttcaaccacccgtttgggggatgagtgagccgacactttcctttggtctttctgaatcgtaactgcactgctttctggaccatttctaaggcggcctttacaagaagacattcctgtcggagaggagggtggacttcggagaaattctcatactgaagcatgagcttaggagtttctgttagtggtagtggtgttttggacacttcattccttgcaacaccgaggttttgggtgttgacataaagtggaccacacaccacatctgctgccgtcttgacacttttttttgtttggttggttttgttacatcttacattatgcagaactatttttgtacaaattgtttaaaagttatttatgcaaggtttgaatgcataccagtgtttttattgttttgagattgccaattttcctgatttccttaaggtaggagagaatttaacgtgtacttcatcgacacaacccatctacaaatgtgcccagatctaacaaagtaggctaagaccttccacttaaaagcatgtttaactggaagttgagagtctgctttgtacctcaagagttacatgagcatgttgtggataaatgtaaattatagtcaaagtaagatactctgccaagtttcctctgtagagaattcacttttctcaaattttaaaatttcgacttcagcctttgcactcaggaggttctgctccagcatgagctcttgtacttacatagatctaatttatacagtgagtcaagacgtagaataaatgctcccacatagcctttcttttgcttttgcttctctcctctgaagtgtgagttgagttctcatttaggtttgtaacatggctatttcctagttgtaaagttctgcatttataagtgccattgttgtaaggtggtgtttcctagaccttccctgatgcgattttacctttgttgaatttgtataaacaattgtacaaaaaaaacca

SEQ ID NO: 351298 - DNA, 1609 bp, Homo sapiens
  misc_feature (1555)..(1555): n is a, c, g, or t
  misc_feature (1568)..(1568): n is a, c, g, or t
  misc_feature (1604)..(1604): n is a, c, g, or t
ctcgcccgacccggaagtgcaaactgtgtggtctggcaggtgtggattccgccggtgaaggctgaaggcagctaccttaaagatgccgggatccgcagcgaagggctcggagttgtcagagaggatcgagagcttcgtggagaccctgaagcggggtggtgggccgcgcagctccgaggaaatggctcgggagaccctagggttgctgcgccagatcatcacggaccaccgctggagcaacgcgggggagctgatggagctgatccgcagagagggcaggaggatgacggccgctcagccctccgagaccaccgtgggcaacatggtgcggagagtgctcaagattatccgggaggagtatggcagactccatggacgcagcgacgagagtgatcagcaggagtccctgcacaaactgttgacatccggaggcctaaacgaggatttcagcttccattatgcccaactccagtccaacatcattgaggcgattaatgagctgctagtggagctggaagggacaatggagaacattgcagcccaggctctggagcacattcactccaatgaggtgatcatgaccattggcttctcccgaacagtagaggccttcctcaaagaggctgcccgaaagaggaaattccatgtcattgtagcagagtgtgctcctttctgccagggtcatgaaatggctgtgaatttgtccaaagcaggtattgagacaactgtcatgactgatgctgccatttttgccgttatgtcaagagtcaacaaggtgatcattggcacgaagaccatcctggccaatggggccctgagagctgtgacaggaactcacactctggcactggcagcaaaacaccattccaccccactcatcgtctgtgcacctatgttcaaactttctccacagttccccaatgaagaagactcatttcataagtttgtggctcctgaagaagtcctgccattcacagaaggggacattctggagaaggtcagcgtgcattgccctgtgtttgactacgttcccccagagctcattaccctctttatctccaacattggtgggaatgcaccttcctacatctaccgcctgatgagtgaactctaccatcctgatgatcatgttttatgaccgaccacacgtgtcctaagcagattgcttaggcagatacagaatgaagaggagacttgagtgttgctgctgaagcacatccttgcaatgtgggagtgcacaggagtccacctaaaaaaaaaatccttgatactgttgcctgcctttttagtcaccccgtaacaagggcacacatccagcactgtgtcttgcctttcagatcttaacagagcagcagggcttaacttgttgattttggagcctcttagtgacctggttgcgtctgtgtcaggaacttaaactttctggttcagtagtgtgttaaacataacactgaataccttactgggatacagatttttgctcagaaatggctatgacactttttctaggctctaccaataaaagccacttgaaggttcaaaaaaaaaaaaaaanttctcggcgaagnttttcctttgtagggtaatttgcttggcttgcgtgntttac

SEQ ID NO: 351299 - DNA, 1651 bp, Homo sapiens
  misc_feature (1597)..(1597): n is a, c, g, or t
  misc_feature (1610)..(1610): n is a, c, g, or t
  misc_feature (1646)..(1646): n is a, c, g, or t
ctcgcccgacccggaagtgcaaactgtgtggtctggcaggtgtggattccgccggtgaaggctgaaggcagctaccttaaagatgccgggatccgcagcgaagggctcggagttgtcagagaggatcgagagcttcgtggagaccctgaagcggggtggtgggccgcgcagctccgaggaaatggctcgggagaccctagggttgctgcgccagatcatcacggaccaccgctggagcaacgcgggggagctgatggagctgatccgcagagagggcaggaggatgacggccgctcagccctccgagaccaccgtgggcaacatggtgcggagagtgctcaagattatccgggaggagtatggcagactccatggacgcagcgacgagagtgatcagcaggagtccctgcacaaactgttgacatccggaggcctaaacgaggatttcagcttccattatgcccaactccagtccaacatcattgaggcgattaatgagctgctagtggagctggaagggacaatggagaacattgcagcccaggctctggagcacattcactccaatgaggtgatcatgaccattggcttctcccgaacagtagaggccttcctcaaagaggctgcccgaaagaggaaattccatgtcattgtagcagagtgtgctcctttctgccagggtcatgaaatggctgtgaatttgtccaaagcaggtattgagacaactgtcatgactgatgctgccatttttgccgttatgtcaagagtcaacaaggtgatcattggcacgaagaccatcctggccaatggggccctgagagctgtgacaggaactcacactctggcactggcagcaaaacaccattccaccccactcatcgtctgtgcacctatgttcaaactttctccacagttccccaatgaaatgagtcttcttcattggggaactgtggagttccccaatgaagaagactcatttcataagtttgtggctcctgaagaagtcctgccattcacagaaggggacattctggagaaggtcagcgtgcattgccctgtgtttgactacgttcccccagagctcattaccctctttatctccaacattggtgggaatgcaccttcctacatctaccgcctgatgagtgaactctaccatcctgatgatcatgttttatgaccgaccacacgtgtcctaagcagattgcttaggcagatacagaatgaagaggagacttgagtgttgctgctgaagcacatccttgcaatgtgggagtgcacaggagtccacctaaaaaaaaaatccttgatactgttgcctgcctttttagtcaccccgtaacaagggcacacatccagcactgtgtcttgcctttcagatcttaacagagcagcagggcttaacttgttgattttggagcctcttagtgacctggttgcgtctgtgtcaggaacttaaactttctggttcagtagtgtgttaaacataacactgaataccttactgggatacagatttttgctcagaaatggctatgacactttttctaggctctaccaataaaagccacttgaaggttcaaaaaaaaaaaaaaanttctcggcgaagnttttcctttgtagggtaatttgcttggcttgcgtgntttac

SEQ ID NO: 351300 - DNA, 1146 bp, Homo sapiens
ctcgcccgacccggaagtgcaaactgtgtggtctggcaggtgtggattccgccggtgaaggctgaaggcagctaccttaaagatgccgggatccgcagcgaagggctcggagttgtcagagaggatcgagagcttcgtggagaccctgaagcggggtggtgggccgcgcagctccgaggaaatggctcgggagaccctagggttgctgcgccagatcatcacggaccaccgctggagcaacgcgggggagctgatggagctgatccgcagagagggcaggaggatgacggccgctcagccctccgagaccaccgtgggcaacatggtgcggagagtgctcaagattatccgggaggagtatggcagactccatggacgcagcgacgagagtgatcagcaggagtccctgcacaaactgttgacatccggaggcctaaacgaggatttcagcttccattatgcccaactccagtccaacatcattgaggcgattaatgagctgctagtggagctggaagggacaatggagaacattgcagcccaggctctggagcacattcactccaatgaggtgatcatgaccattggcttctcccgaacagtagaggccttcctcaaagaggctgcccgaaagaggaaattccatgtcattgtagcagagtgtgctcctttctgccagggtcatgaaatggctgtgaatttgtccaaagcaggtattgagacaactgtcatgactgatgctgccatttttgccgttatgtcaagagtcaacaaggtgatcattggcacgaagaccatcctggccaatggggccctgagagctgtgacaggaactcacactctggcactggcagcaaaacaccattccaccccactcatcgtctgtgcacctatgttcaaactttctccacagggcctgtcctttgtaacctgaatacaagcaaggactaagtgaagagccatttcatcagtgatagaagctatttgctttgaaaacatcaacctatttataggtctctattttttaaattgaggtgaaattcacataacatacaattaaccattttaaagtatacaatttagtgatatctagtacattcacagcattgtacaaccaccactctctagtttcaaaactttttctcc

SEQ ID NO: 351301 - DNA, 1187 bp, Homo sapiens
ctcgcccgacccggaagtgcaaactgtgtggtctggcaggtgtggattccgccggtgaaggctgaaggcagctaccttaaagatgccgggatccgcagcgaagggctcggagttgtcagagaggatcgagagcttcgtggagaccctgaagcggggtggtgggccgcgcagctccgaggaaatggctcgggagaccctagggttgctgcgccagatcatcacggaccaccgctggagcaacgcgggggagctgatggagctgatccgcagagagggcaggaggatgacggccgctcagccctccgagaccaccgtgggcaacatggtgcggagagtgctcaagattatccgggaggagtatggcagactccatggacgcagcgacgagagtgatcagcaggagtccctgcacaaactgttgacatccggaggcctaaacgaggatttcagcttccattatgcccaactccagtccaacatcattgaggcgattaatgagctgctagtggagctggaagggacaatggagaacattgcagcccaggctctggagcacattcactccaatgaggtgatcatgaccattggcttctcccgaacagtagaggccttcctcaaagaggctgcccgaaagaggaaattccatgtcattgtagcagagtgtgctcctttctgccagggtcatgaaatggctgtgaatttgtccaaagcaggtattgagacaactgtcatgactgatgctgccatttttgccgttatgtcaagagtcaacaaggtgggtatatctggagttatgttgaattcatgaagattatgtttctaaaatattgatttttatctcctcctgtaatatccacggtgagagaataaagtttctagcacctttcaaagtacatgtaaaaatctgcaaacgtgactacaaaaaactaaaaatgttttgcatagcaaaaaaatcccaacagagtgaagagataatctacagaatgaaagaaaatatttgcgaagtatacttatgacaaaagataaacttacagaatatataacaaacttaaaacaaaaataacaatttaaaaaccacaataaaatatcacatcacagccaggcacggtggctcatgcctgtaatcccagcactttggtttgtggggaaaagcaagagagatcagattgttactgtgtctgtgtaga

SEQ ID NO: 351302 - DNA, 896 bp, Homo sapiens
ctcgcccgacccggaagtgcaaactgtgtggtctggcaggtgtggattccgccggtgaaggctgaaggcagctaccttaaagatgccgggatccgcagcgaagggctcggagttgtcagagaggatcgagagcttcgtggagaccctgaagcggggtggtgggccgcgcagctccgaggaaatggctcgggagaccctagggttgctgcgccagatcatcacggaccaccgctggagcaacgcgggggagctgatggagctgatccgcagagagggcaggaggatgacggccgctcagccctccgagaccaccgtgggcaacatggtgcggagagtgctcaagattatccgggaggagtatggcagactccatggacgcagcgacgagagtgatcagcaggagtccctgcacaaactgttgacatccggaggcctaaacgaggatttcagcttccattatgcccaactccagtccaacatcattgaggcgattaatgagctgctagtggagctggaagggacaatggagaacattgcagcccaggctctggagcacattcactccaatgaggtgatcatgaccattggcttctcccgaacagtagaggccttcctcaaagaggctgcccgaaagaggaaattccatgtcattgtagcagagtgtgctcctttctgccagttagaaaactcacctgtagcctggatagtctcatgtcttggggttcttttctctggcttcttctgaaggcagcagctcagctcattacgcgtgcagcctcatcagcaagggtggccttacacaccatctgagagcaacgcatagtagttggttggggtcctagttcctcttggaagttgattgacttcatccctttatttaaataaacattcaatct

SEQ ID NO: 351303 - DNA, 481 bp, Homo sapiens
  misc_feature (427)..(427): n is a, c, g, or t
  misc_feature (440)..(440): n is a, c, g, or t
  misc_feature (476)..(476): n is a, c, g, or t
aatgagtgtgaggcgtattataccatagccgcctagtattaagagtactgcggacatgtactatagacccagcgactggtggcttcgacatgaggctttaggagagtgcacaggagtccacctaaaaaaaaaatccttgatactgttgcctgcctttttagtcaccccgtaacaagggcacacatccagcactgtgtcttgcctttcagatcttaacagagcagcagggcttaacttgttgattttggagcctcttagtgacctggttgcgtctgtgtcaggaacttaaactttctggttcagtagtgtgttaaacataacactgaataccttactgggatacagatttttgctcagaaatggctatgacactttttctaggctctaccaataaaagccacttgaaggttcaaaaaaaaaaaaaaanttctcggcgaagnttttcctttgtagggtaatttgcttggcttgcgtgntttac

SEQ ID NO: 351304 - DNA, 802 bp, Homo sapiens
atcttgtcagcaatcgtgattatattatacatgcatgttgtatttccagttttatggctgctctggtgctgctgtggagcattagacatttattagcttcccctgggcttccctacagcttaccagagctatgagagtctgaaaaatcagttgtccgaaaaatgagttatctattggaaattatgtgctggatatgcccatatcacacaattccccagatccagttacatttgagagcacttttcactatttctcactctttctcttagaatcagcctttccctcccattgcagggtcatgaaatggctgtgaatttgtccaaagcaggtattgagacaactgtcatgactgatgctgccatttttgccgttatgtcaagagtcaacaaggtgggtatatctggagttatgttgaattcatgaagattatgtttctaaaatattgatttttatctcctcctgtaatatccacggtgagagaataaagtttctagcacctttcaaagtacatgtaaaaatctgcaaacgtgactacaaaaaactaaaaatgttttgcatagcaaaaaaatcccaacagagtgaagagataatctacagaatgaaagaaaatatttgcgaagtatacttatgacaaaagataaacttacagaatatataacaaacttaaaacaaaaataacaatttaaaaaccacaataaaatatcacatcacagccaggcacggtggctcatgcctgtaatcccagcactttggtttgtggggaaaagcaagagagatcagattgttactgtgtctgtgtaga

SEQ ID NO: 351305 - DNA, 401 bp, Homo sapiens
caggttgaaagtaggatcatagaatcagttttgttattgttgcagggcctgtcctttgtaacctgaatacaagcaaggactaagtgaagagccatttcatcagtgatagaagctatttgctttgaaaacatcaacctatttataggtctctattttttaaattgaggtgaaattcacataacatacaattaaccattttaaagtatacaatttagtgatatctagtacattcacagcattgtacaaccaccactctctagtttcaaaactttttctccactgtagaaaaacaccctgtacccattaagtaatctctccctatttgtccttctccccatctcctccaatctgctcctgtctctatggatttgcccattttgtataaaaggaatcatataata

SEQ ID NO: 351306 - DNA, 357 bp, Homo sapiens
ttatatgaacataccacaatttattaatccattcatctgtttatgggcatttgggttggttccagcttttggcttttgtgaataatgctgctataagcatctgtgtataagttttctgtgtggacatatgttttcatctctagggtacatacctaggagtggaattgctgggtctctagtttttataaattttttcctttttagttttccccaatgaagaagactcatttcataagtttgtggctcctgaagaagtcctgccattcacagaaggtacagaagctgtgtgtgcatgcgtgcatgtgttgtgtgtattcggggtttgtgtgtgcatgtgttttggtctttttgttgttt

SEQ ID NO: 351307 - DNA, 592 bp, Homo sapiens
gaattcatgaagattatgtttctaaaatattgatttttatctcctcctgtaatatccacggtgagagaataaagtttctagcacctttcaaagtacatacttaggcctttttaatctgttaactgaatttcttttcccttttttctgcatcattgttcctctcttggagtagcctctaaatttggttgaagcattgaaaagaatgaagtattaaatagaactaaggcaagagtgtcagtttctagggattggctacagggctcctgccttatgctcaaagagcttggcagttgtggatagtgaatgaaaaagattcctggcttctcagaaggtatggcatctcaatttccagaaaatatgggactgagagcagtaggttttgcagtttcttgtcccattttacattcattctttccttggaaacctacttttaagctagaacttgtattgagccagggatcccttcacctctaccagtctgtgacccctcacgataccaattctgaggtctaagcatttagctttttgtggccagtggcccttttagggctccacccccaggatggctcacattttttgtcttgtcccaaag

SEQ ID NO: 351308 - DNA, 977 bp, Homo sapiens
  misc_feature (880)..(880): n is a, c, g, or t
  misc_feature (882)..(882): n is a, c, g, or t
  misc_feature (896)..(896): n is a, c, g, or t
  misc_feature (900)..(900): n is a, c, g, or t
  misc_feature (907)..(907): n is a, c, g, or t
  misc_feature (911)..(911): n is a, c, g, or t
ctcgcccgacccggaagtgcaaactgtgtggtctggcaggtgtggattccgccggtgaaggctgaaggcagctaccttaaagatgccgggatccgcagcgaagggctcggagttgtcagagaggatcgagagcttcgtggagaccctgaagcggggtggtgggccgcgcagctccgaggaaatggctcgggagaccctagggttgctgcgccagatcatcacggaccaccgctggagcaacgcgggggagctgatggagctgatccgcagagagggcaggaggatgacggccgctcagccctccgagaccaccgtgggcaacatggtgcggagagtgctcaagattatccgggaggagtatggcagactccatggacgcagcgacgagagtgatcagcaggagtccctgcacaaactgttgacatccggaggcctaaacgaggatttcagcttccattatgcccaactccagtccaacatcattgaggcgattaatgagctgctagtggagctggaagggacaatggagaacattgcagcccaggctctggagcacattcactccaatgaggtgatcatgaccattggcttctcccgaacagtagaggccttcctcaaagaggctgcccgaaagaggaaattccatgtcattgtagcagagtgtgctcctttctgccagggtcatgaaatggctgtgaatttgtccaaagcaggtattgagacaactgtcatgactgatgctgccatttttgccgttatgtcaagagtcaacaaggtgatcattggcacgaagaccatcctggccaatggggccctgagagctgtgacaggaactcacactctggcactggcagcaaaacaccattccacccaacatgtngnccctttcacttccncagnccatganaacntcaagtgggctgaaatcgcctcaaggcttcgaagggtccttgagaaccgaaatcctttcccggggc

SEQ ID NO: 351309 - DNA, 1586 bp, Homo sapiens
  misc_feature (1532)..(1532): n is a, c, g, or t
  misc_feature (1545)..(1545): n is a, c, g, or t
  misc_feature (1581)..(1581): n is a, c, g, or t
ctcgcccgacccggaagtgcaaactgtgtggtctggcaggtgtggattccgccggtgaaggctgaaggcagctaccttaaagatgccgggatccgcagcgaagggctcggagttgtcagagaggatcgagagcttcgtggagaccctgaagcggggaaatggctcgggagaccctagggttgctgcgccagatcatcacggaccaccgctggagcaacgcgggggagctgatggagctgatccgcagagagggcaggaggatgacggccgctcagccctccgagaccaccgtgggcaacatggtgcggagagtgctcaagattatccgggaggagtatggcagactccatggacgcagcgacgagagtgatcagcaggagtccctgcacaaactgttgacatccggaggcctaaacgaggatttcagcttccattatgcccaactccagtccaacatcattgaggcgattaatgagctgctagtggagctggaagggacaatggagaacattgcagcccaggctctggagcacattcactccaatgaggtgatcatgaccattggcttctcccgaacagtagaggccttcctcaaagaggctgcccgaaagaggaaattccatgtcattgtagcagagtgtgctcctttctgccagggtcatgaaatggctgtgaatttgtccaaagcaggtattgagacaactgtcatgactgatgctgccatttttgccgttatgtcaagagtcaacaaggtgatcattggcacgaagaccatcctggccaatggggccctgagagctgtgacaggaactcacactctggcactggcagcaaaacaccattccaccccactcatcgtctgtgcacctatgttcaaactttctccacagttccccaatgaagaagactcatttcataagtttgtggctcctgaagaagtcctgccattcacagaaggggacattctggagaaggtcagcgtgcattgccctgtgtttgactacgttcccccagagctcattaccctctttatctccaacattggtgggaatgcaccttcctacatctaccgcctgatgagtgaactctaccatcctgatgatcatgttttatgaccgaccacacgtgtcctaagcagattgcttaggcagatacagaatgaagaggagacttgagtgttgctgctgaagcacatccttgcaatgtgggagtgcacaggagtccacctaaaaaaaaaatccttgatactgttgcctgcctttttagtcaccccgtaacaagggcacacatccagcactgtgtcttgcctttcagatcttaacagagcagcagggcttaacttgttgattttggagcctcttagtgacctggttgcgtctgtgtcaggaacttaaactttctggttcagtagtgtgttaaacataacactgaataccttactgggatacagatttttgctcagaaatggctatgacactttttctaggctctaccaataaaagccacttgaaggttcaaaaaaaaaaaaaaanttctcggcgaagnttttcctttgtagggtaatttgcttggcttgcgtgntttac

SEQ ID NO: 351310 - DNA, 1620 bp, Homo sapiens
  misc_feature (1566)..(1566): n is a, c, g, or t
  misc_feature (1579)..(1579): n is a, c, g, or t
  misc_feature (1615)..(1615): n is a, c, g, or t
ctcgcccgacccggaagtgcaaactgtgtggtctggcaggtgtggattccgccggtgaaggctgaaggcagctaccttaaagatgccgggatccgcagcgaagggctcggagttgtcagagaggatcgagagcttcgtggagaccctgaagcggggtggtgggccgcgcagctccgaggaaatggctcgggagaccctagggttgctgcgccagatcatcacggaccaccgctggagcaacgcgggggagctgatggagctgatccgcagagagggcaggaggatgacggccgctcagccctccgagaccaccgtgggcaacatggtgcggagagtgctcaagattatccgggaggagtatggcagactccatggacgcagcgacgagagtgatcagcaggagtccctgcacaaactgttgacatccggaggcctaaacgaggatttcagcttccattatgcccaactccagtccaacatcattgaggcgattaatgagctgctagtggagctggaagggacaatggagaacattgcagcccaggctctggagcacattcactccaatgaggtgatcatgaccattggcttctcccgaacagtagaggccttcctcaaagaggctgcccgaaagaggaaattccatgtcattgtagcagagtgtgctcctttctgccagcaggtattgagacaactgtcatgactgatgctgccatttttgccgttatgtcaagagtcaacaaggtgatcattggcacgaagaccatcctggccaatggggccctgagagctgtgacaggaactcacactctggcactggcagcaaaacaccattccaccccactcatcgtctgtgcacctatgttcaaactttctccacagttccccaatgaaatgagtcttcttcattggggaactgtggagttccccaatgaagaagactcatttcataagtttgtggctcctgaagaagtcctgccattcacagaaggggacattctggagaaggtcagcgtgcattgccctgtgtttgactacgttcccccagagctcattaccctctttatctccaacattggtgggaatgcaccttcctacatctaccgcctgatgagtgaactctaccatcctgatgatcatgttttatgaccgaccacacgtgtcctaagcagattgcttaggcagatacagaatgaagaggagacttgagtgttgctgctgaagcacatccttgcaatgtgggagtgcacaggagtccacctaaaaaaaaaatccttgatactgttgcctgcctttttagtcaccccgtaacaagggcacacatccagcactgtgtcttgcctttcagatcttaacagagcagcagggcttaacttgttgattttggagcctcttagtgacctggttgcgtctgtgtcaggaacttaaactttctggttcagtagtgtgttaaacataacactgaataccttactgggatacagatttttgctcagaaatggctatgacactttttctaggctctaccaataaaagccacttgaaggttcaaaaaaaaaaaaaaanttctcggcgaagnttttcctttgtagggtaatttgcttggcttgcgtgntttac

SEQ ID NO: 351311 - DNA, 801 bp, Homo sapiens
ctcgcccgacccggaagtgcaaactgtgtggtctggcaggtgtggattccgccggtgaaggctgaaggcagctaccttaaagatgccgggatccgcagcgaagggctcggagttgtcagagaggatcgagagcttcgtggagaccctgaagcggggtggtgggccgcgcagctccgaggaaatggctcgggagaccctagggttgctgcgccagatcatcacggaccaccgctggagcaacgcgggggagctgatggagctgatccgcagagagggcaggaggatgacggccgctcagccctccgagaccaccgtgggcaacatggtgcggagagtgctcaagattatccgggaggagtatggcagactccatggacgcagcgacgagagtgatcagcaggagtccctgcacaaactgttgacatccggaggcctaaacgaggatttcagcttccattatgcccaactccagtccaacatcattgaggcgattaatgagctgctagtggagctggaagggacaatggagaacattgcagcccaggctctggagcacattcactccaatgaggtgatcatgaccattggcttctcccgaacagtagaggccttcctcaaagaggctgcccgaaagaggaaattccatgtcattgtagcagagtgtgctcctttctgccagtaaggagactgctggagttgctactaagaaaaatgaaaaatgaagaagaaataaacgagagatgggtagggccattccaaccttgaattgataagcaagactttgagacactgagaagatca

SEQ ID NO: 351312 - DNA, 739 bp, Homo sapiens
ctcgcccgacccggaagtgcaaactgtgtggtctggcaggtgtggattccgccggtgaaggctgaaggcagctaccttaaagatgccgggatccgcagcgaagggctcggagttgtcagagaggatcgagagcttcgtggagaccctgaagcggggtggtgggccgcgcagctccgaggaaatggctcgggagaccctagggttgctgcgccagatcatcacggaccaccgctggagcaacgcgggtgaggccggcctgcctccgccggcgaacctggcccctgtctgttcccgatcccagggctgaaaatttcccaggcctcacttcgcgttggctcctcttatcctctctcttttggactgtaggggagctgatggagctgatccgcagagagggcaggaggatgacggccgctcagccctccgagaccaccgtgggcaacatggtgcggagagtgctcaagattatccgggaggagtatggcaggtcaggctcacgtcctgggctcctggttggatccagtgacactttttgcacgggcccctctacctgctcggagactttattggagctgaacagcccttgttacctgcctgaccactcctccccacctctctctttgggtcttgttgcctctatagactccatggacgcagcgacgagagtgatcagcaggagtccctgcacaaactgttgacatccggaggcctaaacgaggatttcagcttccattatgcc

SEQ ID NO: 351313 - DNA, 443 bp, Homo sapiens
caggaagcacaaaaatgtgaaaaacatggcactaaatactgtgaaaaggacattgtttgtaataggagagctgaaggaagaaggctgagtgacaccttgttcagcctcatgtgagaacatgggcatcagtttattcaaatttttttgctgctctatgcctgcaaatgacccctaaagcacccagattttttatcacaaataattttaggtgagtaggtgaatttgcaaatacagaatccatgaataatgaagattaaatatgttagctgggcatagtatttgaaaattatttgtagaaatatgaagccttgggttgggcatggtggctcccatggtaatcccagcactttgggaggctgaagctggaggatcacttgagactaggagttcaagactagcctgggcaacatagcaatatcctgtctccatgacaaaaaaaaaaa

SEQ ID NO: 351314 - DNA, 351 bp, Homo sapiens
caggaagcacaaaaatgtgaaaaacatggcactaaatactgtgaaaaggacattgtttgtaataggagagctgaaggaagaaggctgagtgacaccttgttcagcctcatgtgagaacatgggcatcagtttattcaaatttttttgctgctctatgcctgcaaatgacccctaaagcacccagattttttatcacaaataattttaggtgagtaggtgaatttgcaaatacagaatccatgaataatgaagattaaatatgttagctgggcatagtatttgaaaattatttgtagaaatatgtagcctgggcaacatagcaatatcctgtctccatgacaaaaaaaaaaa

SEQ ID NO: 351315 - DNA, 532 bp, Homo sapiens
cctctctcatctaaataagatttttaacatttagcaaatatttaatatcttttcctttatatttgttagttcagaataggctatttaagcagttctttgaaactagaagcccccaactgtttagaaaaaataaaccttggactagttcaagaagataattttaattagagatatcaatctcttgaattctgccttcttaataattcttgtatctgtttgctactccatctcaaaaacaaacaaacacccagaattatgtttaactaaatatctgggtaccccatggcctagtaaggctgatacataaaattaaccatcataaatgtaatattgaaagtgacctatatcacctctacaatatactgtttgttaaaagtgagtcgctaagttaagcccactctctcaaagggagaggaattaagctctacctctggaaggaaagcatatagaataacacgtggacatatttttcaaaccactctaaccgctggtactaggagactccagtgttatactccagtgttcattgaat

SEQ ID NO: 351316 - DNA, 1829 bp, Homo sapiens
aagcttgcggccgcggccacagtcatggcctttccccctggtgctcttcatcctttaccaaagagacaagcacttgaaaaaagcaatggtaccagcgcggtctttaaccccagcgtcttgcactaccagcaggctctcaccagcgcacagttgcagcaacacgccgcgttcattccaacaggtatgtgcccttactgccctacgtcctgtgcccttctggtcatgtgctttcttctcatttctctaagctgtttggtggcatctagtttgcttttgaaggtataatacagtttgaaattcatcgttgtcctagctatctaaatgtatttaccttactttgaatgatagctaaagactgttaggattctaaagccaaatatttgatagattgaagagacagatttaacccatgagaaacagcagttagggcttttggtttcttgtatttgcacaagccctgtaaaattgtttatgtaaataagaccttttatgtgtgacaattgaaatttgtccttaactctgaatgacctaaaaatagcaattccagtaaatactaaccatttttttctatttctattcagagcactaaaacaatgaggctattcaaattaaagcaattctctactcatatttttatattcattctatctctttctccatccttctcaactttcaccaagttcacaagtatatagagctcttatcctcagtgtctaagccaatgcctgatactattacgtacgatgtgcattaactatgattccactaaaagatccattgtaatagtcatagaatcttagagtttaaaggactcttagtgatctcctcatccagctgattgttttacagatgagaaaactgaggccccctaaatgagaagtgactttccaaggtgccacaactaatgagaaaaagaactgagtttccctgtgaccaaacccatttacatcacattctaccacctgggcccgcctatatatacacattccacagagttctcctgaaaaaagaaaaaagcagataaaagtgaatttttaaataactgaccccaaaaagtcagataaaagtaaaaaaacaaaagtataaatcatgtcatccctcccccatttgcaccgacatctctaaccacagacacacacacgcacaccatacgcaaagatagtcaccataattgaccatgtttttcaccttttagtcaatgttagaagcaaggggtaacttaagtcctggtgggaagaccatccattgagttctttgaaagtcaacatttttcagcccacgatagtgaaatgaaagtaaatataaatgaataacaattctaacaaaaagagttttttgattcaaatccattagtttgaacttttcgagcttattatccatttccttaaatcccatagcttatcagagttaacatcagagggaggtaaaatatttctgtgatattctttgtataaaatctacactttgaaatggattagtaacctgtgaacaatacatattttagttaacatataaattatgtgagcaaagtggttttcagtgtttttttcttattttagttttgaacctgtcttaaactcacagacttgtagaagaaatctctaattcagtatttattaggagttcacttttgccctattacagccttaattagtgacatcccagtgctgttacagcatagcagtgtcttaatatgtaatctaattgaaataacacatttgtaaaataattactagaaggtaaacttacgttaatgtcctgtgtggtttctacaaagtgtgtcattgtagacctcttggccactagatattttaagataaaaaaaaaaa

SEQ ID NO: 351317 - DNA, 1171 bp, Homo sapiens
ggatttgtcggaaggaagggctgcagcttacagcaacagagtttagactgtctttgcttcatcatctgaaggtaaaattttccagatacggcagacggctttcagagtacaataaacagggaatgagaactatttacatggaagtttctttctcatgatgcggtggagaagcctcggccacttggttctgccagatgttcctggggttactgtaaatgggaaggacaggcagagctaaacaaggtaggagaatcgccccccttttttgaatgtttaaagagtttgctgcagtatgctgcattccatgtgtgctgcttacgggagccagggaaactggattccactaattcaattgtaatacttgcgggggaccctggagttttacgtaacattttgatttgagaaaaagaaatggcaaagcttgaatctatgccgcctgtttggggtgaggcaagaaatcgagtttttatgcaaagaatcgattcatttattatattattttttaaaaaccatttgaattctttggagcaatcttattttcttgctgtgaaaaattgttatattgccatagctagttcccaaatagataaagtttacatggatcctattatttgaaaacagacttgcaattaaggattaaaaaaaaattcatggtaaataatcatcggttgaatgtttggccaaacgtatgtgtctatttattaaaaattagggacctacctagctctacaatgctacagctttaattgagtttcaaaagcacattttaaacaacctagcaagaggtagctttctggcaagttttcgatactgtagttcaatgtttacatttcttttcctggcatgtctgagcctttgtttccagcttaaaagtggaaccattatattcaaaagtaaagctgggttaataatgcttactgcaattatctgatctttatgcatttttaatgagaacacacagccagcagaataatttaatgagggcaggctagcttttaaagctgtgttttcactatgccgaaccatatcaactttctcgctgagaagcagcagtgagaaatgatggagaagatttatttttaacacacttggcccaggagaaggaaaggatatatttgctaaagaattctttctgcccttttccgtttaaatttctgccaggcatgaggaa

SEQ ID NO: 351318 - DNA, 4968 bp, Homo sapiens
ggatttgtcggaaggaagggctgcagcttacagcaacagagtttagactgtctttgcttcatcatctgaaggtaaaattttccagatacggcagacggctttcagagtacaataaacagggaatgagaactatttacatggaagtttctttctcatgatgcggtggagaagcctcggccacttggttctgccagatgttcctggggttactgtaaatgggaaggacaggcagagctaaacaaggtttatcatttaaaagtgcctgtgtgaagtcacttttgctggaaaactgcagcttgggagctttctttgtattcacatcccactcttctgtcaagtacactttaccctgaccttatgagtggatgaagatacctcagttgtctgactttgccaattgcttaatttcagaatttaaaaaggggaaagaaaaacatcctgctaaaatatgaacatctgagtgtcttattttccaacatcgtcaatagctgtgagcgtcagcattaaatattctcccaaggagtgccatgatattgaagtcactttattaataacagctgtatctgcaaaacagtcaagagactcggacgttgaaagccagagatgacactgagcatgcttttattgcggcctaccatctttaagtgggacatattgattgatgagtgattgcctgtccatacactctctcatcatcctgttccttggattggacttcactaagcaatttatcactcaccttcagacttacatgtgggagttttcacaacagtagttttggaatcattagaacttggattgatttcatcatttaacagaaacaaacagcccaaattactttatcaccatggctttgaacgttgccccagtcagagatacaaaatggctgacattagaagtctgcagacagtttcaaagaggaacatgctcacgctctgatgaagaatgcaaatttgctcatccccccaaaagttgtcaggttgaaaatggaagagtaattgcctgctttgattccctaaagggccgttgttcgagagagaactgcaagtatcttcaccctccgacacacttaaaaactcaactagaaattaatggaaggaacaatttgattcagcaaaaaactgcagcagcaatgcttgcccagcagatgcaatttatgtttccaggaacaccacttcatccagtgcccactttccctgtaggtcccgcgatagggacaaatacggctattagctttgctccttacctagcacctgtaacccctggagttgggttggtcccaacggaaattctgcccaccacgcctgttattgttcccggaagtccaccggtcactgtcccgggctcaactgcaactcagaaacttctcaggactgacaaactggaggtatgcagggagttccagcgaggaaactgtgcccggggagagaccgactgccgctttgcacaccccgcagacagcaccatgatcgacacaagtgacaacaccgtaaccgtttgtatggattacataaaggggcgttgcatgagggagaaatgcaaatattttcaccctcctgcacacttgcaggccaaaatcaaagctgcgcagccgcggccgcggccacagtcatgactcagtcgactgccaaagcaatgaagcgacctctcgaagcaactgtagacctggcctttccccctggtgctcttcatcctttaccaaagagacaagcacttgaaaaaagcaatggtaccagcgcggtctttaaccccagcgtcttgcactaccagcaggctctcaccagcgcacagttgcagcaacacgccgcgttcattccaacagggtcagttttgtgcatgacacccgctaccagtattgtacccatgatgcacagcgctacgtccgccactgtctctgcagcaacaactcctgcaacaagtgtccccttcgcagcaacagccacagccaatcagataattctgaaataatcagcagaaacggaatggaatgccaagaatctgcattgagaataactaaacattgttactgtacatactatcctgtttcctcctcaatagaattgccacaaactgcatgctaaataaagatgtagttcttctggacagaccacaactctaagaagctagtgctgctatctcatatatgagtattaaatatggtatgcttagtatattccaacctaagatagttaactacctgagaccagctgtgatgtttaaagacataaaggataaagtttacttttaaagggtttctaaacatagtttctgtcctaggaatattgtcttatctccataactatagctgatgcagaaagtccagccagtttactcatttcgattcagaatatttcaaatttagcaataaacaattagcattagttaaaaaagaaacatattccaagggcaggttcgattctagctctaattactgtcatgtcatttacccactggatcaaagggtatgtttcacttcttgacaatataaatgctgcagcaaagatgagaggtgaagtaaaaccgatacctgtcctgcaggtctaaaatttgaatggaaattcaagcacaagtactggggacacatcaaagtgtggtgtttggtttgcctggagatgccacgttgaatcatgtgattctagattaacattaaatagattgaaaaagaaactttgcacggtatgagcttcataccccaccaaacaaagtcttgaaggtattattttacaagtatatttttaaagttgttttataagagagactttgtagaagtgcctagattttgccagacttcatccagcttgacaagattgagaggcccatgccaacagtctaatctaagagattagtctttcaaactcaccatccagttgcctgttacagaataactcttcttaactaaaaacctagtcaaacaaggaagctgtaggtgaggagatctgtataatattctaatttaagtaagtttgagtttagtcactgcaaatttgactgtgactttaatctaaattactatgtaaacaaaaagtagatagtttcactttttaaaaaatccattactgttttgcatttcaaaagttggattaaagggttgtaactgactacagcatggaaaaaaatagttcttttaattctttcaccttaaagcatattttatgtctcaaaagtataaaaaactttaatacaagtacatacatattatatatacacatacatatatatactatatatggatgaaacatattttaatgttgtttacttttttaaatacttggttgatcttcaaggtaatagcgatacaattaaattttgttcagaaagtttgttttaaagtttattttaagcactatcgtaccaaatatttcatatttcacattttatatgttgcacatagcctatacagtacctacatagtttttaaattattgtttaaaaaacaaaacagctgttataaatgaatattatgtgtaattgtttcaaacatccattttctttgtgaacatattagtgattgaagtattttgacttttgagattgaatgtaaaatattttaaatttgggatcatcgcctgttctgaaaactagatgcaccaaccgtatcattatttgtttgaggaaaaaaagaaatctgcattttaattcatgttggtcaaagtcgaattactatctatttatcttatatcgtagatctgataaccctatctaaaagaaagtcacacgctaaatgtattcttacatagtgcttgtatcgttgcatttgttttaatttgtggaaaagtattgtatctaacttgtattactttggtagtttcatctttatgtattattgatatttgtaattttctcaactataacaatgtagttacgctacaacttgcctaaaacattcaaacttgttttcttttttctgtttttttctttgttaattcatttaaactcattgaaaacatagtatacattactaaaaggtaaattatgggaatcactgaaatattttgtagattaattgttgtaacattgtctttcttttttttctttgtgtttcatgattttgatttttaaaattattagcacacaactattttcagccctttaataatggagcatcaaaaacatcacctgtaaccccaagcaaatatagaagactgtattttttactatgatatccattttccagaattgtgattacaatatgcaaagagtcataaatatgccatttacaataaggaggaggcaaggcaaatgcatagatgtacaaatatatgtacaacagattttgctttttatttatttataatgtaattttatagaataattctgggatttgagaggatctaaaactatttttctgtataaatattatttgccaaaagtttgtttatattcagaagtctgactatgatgaataaatcttaaatgctttgtttaattaaaaaacaaaaatcaccaatatccaagacatgaagatatcagttcaacaaatactgtagttaagagactaactctccacttgtatgggaactacatttcactcttggttttcaggatataacagcacttcaccgaaatattctttcagccataccactggtaacatttctactaaatctttctgtaacacttaaagaattccctcattcattaccttacagtgtaaacaggagtctaatttgtatcaatactatgttttggttgtaatattcagttcactcacccaatgtacaaccaatgaaataaaagaagcatttaaaaggaaaaaaaaaaacaagggtgggggcccggccgagaaaattaaacattgggggcgggcccagggtaggaaatgtcagaggtccaagaacggccgaagggggtcccaaaaaagccgggcgcggggtgcaccaggtggctttgtgctcaggcagcagacccgcggcgcggagggaacgcaggagaagagccagaacagaaggccaacaacacaagaagatt

SEQ ID NO: 351319 - DNA, 4699 bp, Homo sapiens
ggatttgtcggaaggaagggctgcagcttacagcaacagagtttagactgtctttgcttcatcatctgaaggtaaaattttccagatacggcagacggctttcagagtacaataaacagggaatgagaactatttacatggaagtttctttctcatgatgcggtggagaagcctcggccacttggttctgccagatgttcctggggttactgtaaatgggaaggacaggcagagctaaacaaggtttatcatttaaaagtgcctgtgtgaagtcacttttgctggaaaactgcagcttgggagctttctttgtattcacatcccactcttctgtcaagtacactttaccctgaccttatgagtggatgaagatacctcagttgtctgactttgccaattgcttaatttcagaatttaaaaaggggaaagaaaaacatcctgctaaaatatgaacatctgagtgtcttattttccaacatcgtcaatagctgtgagcgtcagcattaaatattctcccaaggagtgccatgatattgaagtcactttattaataacagctgtatctgcaaaacagtcaagagactcggacgttgaaagccagagatgacactgagcatgcttttattgcggcctaccatctttaagtgggacatattgattgatgagtgattgcctgtccatacactctctcatcatcctgttccttggattggacttcactaagcaatttatcactcaccttcagacttacatgtgggagttttcacaacagtagttttggaatcattagaacttggattgatttcatcatttaacagaaacaaacagcccaaattactttatcaccatggctttgaacgttgccccagtcagagatacaaaatggctgacattagaagtctgcagacagtttcaaagaggaacatgctcacgctctgatgaagaatgcaaatttgctcatccccccaaaagttgtcaggttgaaaatggaagagtaattgcctgctttgattccctaaagggccgttgttcgagagagaactgcaagtatcttcaccctccgacacacttaaaaactcaactagaaattaatggaaggaacaatttgattcagcaaaaaactgcagcagcaatgcttgcccagcagatgcaatttatgtttccaggaacaccacttcatccagtgcccactttccctgtaggtcccgcgatagggacaaatacggctattagctttgctccttacctagcacctgtaacccctggagttgggttggtcccaacggaaattctgcccaccacgcctgttattgttcccggaagtccaccggtcactgtcccgggctcaactgcaactcagaaacttctcaggactgacaaactggaggtatgcagggagttccagcgaggaaactgtgcccggggagagaccgactgccgctttgcacaccccgcagacagcaccatgatcgacacaagtgacaacaccgtaaccgtttgtatggattacataaaggggcgttgcatgagggagaaatgcaaatattttcaccctcctgcacacttgcaggccaaaatcaaagctgcgcagcaccaagccaaccaagctgcggtggccgcccaggcagccgcggccgcggccacagtcatggcctttccccctggtgctcttcatcctttaccaaagagacaagcacttgaaaaaagcaatggtaccagcgcggtctttaaccccagcgtcttgcactaccagcaggctctcaccagcgcacagttgcagcaacacgccgcgttcattccaacagtacccatgatgcacagcgctacgtccgccactgtctctgcagcaacaactcctgcaacaagtgtccccttcgcagcaacagccacagccaatcagataattctgaaataatcagcagaaacggaatggaatgccaagaatctgcattgagaataactaaacattgttactgtacatactatcctgtttcctcctcaatagaattgccacaaactgcatgctaaataaagatgtagttcttctggacagaccacaactctaagaagctagtgctgctatctcatatatgagtattaaatatggtatgcttagtatattccaacctaagatagttaactacctgagaccagctgtgatgtttaaagacataaaggataaagtttacttttaaagggtttctaaacatagtttctgtcctaggaatattgtcttatctccataactatagctgatgcagaaagtccagccagtttactcatttcgattcagaatatttcaaatttagcaataaacaattagcattagttaaaaaagaaacatattccaagggcaggttcgattctagctctaattactgtcatgtcatttacccactggatcaaagggtatgtttcacttcttgacaatataaatgctgcagcaaagatgagaggtgaagtaaaaccgatacctgtcctgcaggtctaaaatttgaatggaaattcaagcacaagtactggggacacatcaaagtgtggtgtttggtttgcctggagatgccacgttgaatcatgtgattctagattaacattaaatagattgaaaaagaaactttgcacggtatgagcttcataccccaccaaacaaagtcttgaaggtattattttacaagtatatttttaaagttgttttataagagagactttgtagaagtgcctagattttgccagacttcatccagcttgacaagattgagaggcccatgccaacagtctaatctaagagattagtctttcaaactcaccatccagttgcctgttacagaataactcttcttaactaaaaacctagtcaaacaaggaagctgtaggtgaggagatctgtataatattctaatttaagtaagtttgagtttagtcactgcaaatttgactgtgactttaatctaaattactatgtaaacaaaaagtagatagtttcactttttaaaaaatccattactgttttgcatttcaaaagttggattaaagggttgtaactgactacagcatggaaaaaaatagttcttttaattctttcaccttaaagcatattttatgtctcaaaagtataaaaaactttaatacaagtacatacatattatatatacacatacatatatatactatatatggatgaaacatattttaatgttgtttacttttttaaatacttggttgatcttcaaggtaatagcgatacaattaaattttgttcagaaagtttgttttaaagtttattttaagcactatcgtaccaaatatttcatatttcacattttatatgttgcacatagcctatacagtacctacatagtttttaaattattgtttaaaaaacaaaacagctgttataaatgaatattatgtgtaattgtttcaaacatccattttctttgtgaacatattagtgattgaagtattttgacttttgagattgaatgtaaaatattttaaatttgggatcatcgcctgttctgaaaactagatgcaccaaccgtatcattatttgtttgaggaaaaaaagaaatctgcattttaattcatgttggtcaaagtcgaattactatctatttatcttatatcgtagatctgataaccctatctaaaagaaagtcacacgctaaatgtattcttacatagtgcttgtatcgttgcatttgttttaatttgtggaaaagtattgtatctaacttgtattactttggtagtttcatctttatgtattattgatatttgtaattttctcaactataacaatgtagttacgctacaacttgcctaaaacattcaaacttgttttcttttttctgtttttttctttgttaattcatttaaactcattgaaaacatagtatacattactaaaaggtaaattatgggaatcactgaaatattttgtagattaattgttgtaacattgtctttcttttttttctttgtgtttcatgattttgatttttaaaattattagcacacaactattttcagccctttaataatggagcatcaaaaacatcacctgtaaccccaagcaaatatagaagactgtattttttactatgatatccattttccagaattgtgattacaatatgcaaagagtcataaatatgccatttacaataaggaggaggcaaggcaaatgcatagatgtacaaatatatgtacaacagattttgctttttatttatttataatgtaattttatagaataattctgggatttgagaggatctaaaactatttttctgtataaatattatttgccaaaagtttgtttatattcagaagtctgactatgatgaataaatcttaaatgctttgtttaattaaaaaacaaaaatcaccaatatccaagacatgaagatatcagttcaacaaatactgtagttaagagactaactctccacttgtatgggaactacatttcactcttggttttcaggatataacagcacttcaccgaaatattctttcagccataccactggtaacatttctactaaatctttctgtaacacttaaagaattccctcattcattaccttacagtgtaaacaggagtctaatttgtatcaatactatgttttggttgtaatattcagttcactcacccaatgtacaaccaatgaaataaaagaagcatttaaaagga

SEQ ID NO: 351320 - DNA, 4753 bp, Homo sapiens
ggatttgtcggaaggaagggctgcagcttacagcaacagagtttagactgtctttgcttcatcatctgaaggtaaaattttccagatacggcagacggctttcagagtacaataaacagggaatgagaactatttacatggaagtttctttctcatgatgcggtggagaagcctcggccacttggttctgccagatgttcctggggttactgtaaatgggaaggacaggcagagctaaacaaggtttatcatttaaaagtgcctgtgtgaagtcacttttgctggaaaactgcagcttgggagctttctttgtattcacatcccactcttctgtcaagtacactttaccctgaccttatgagtggatgaagatacctcagttgtctgactttgccaattgcttaatttcagaatttaaaaaggggaaagaaaaacatcctgctaaaatatgaacatctgagtgtcttattttccaacatcgtcaatagctgtgagcgtcagcattaaatattctcccaaggagtgccatgatattgaagtcactttattaataacagctgtatctgcaaaacagtcaagagactcggacgttgaaagccagagatgacactgagcatgcttttattgcggcctaccatctttaagtgggacatattgattgatgagtgattgcctgtccatacactctctcatcatcctgttccttggattggacttcactaagcaatttatcactcaccttcagacttacatgtgggagttttcacaacagtagttttggaatcattagaacttggattgatttcatcatttaacagaaacaaacagcccaaattactttatcaccatggctttgaacgttgccccagtcagagatacaaaatggctgacattagaagtctgcagacagtttcaaagaggaacatgctcacgctctgatgaagaatgcaaatttgctcatccccccaaaagttgtcaggttgaaaatggaagagtaattgcctgctttgattccctaaagggccgttgttcgagagagaactgcaagtatcttcaccctccgacacacttaaaaactcaactagaaattaatggaaggaacaatttgattcagcaaaaaactgcagcagcaatgcttgcccagcagatgcaatttatgtttccaggaacaccacttcatccagtgcccactttccctgtaggtcccgcgatagggacaaatacggctattagctttgctccttacctagcacctgtaacccctggagttgggttggtcccaacggaaattctgcccaccacgcctgttattgttcccggaagtccaccggtcactgtcccgggctcaactgcaactcagaaacttctcaggactgacaaactggaggtatgcagggagttccagcgaggaaactgtgcccggggagagaccgactgccgctttgcacaccccgcagacagcaccatgatcgacacaagtgacaacaccgtaaccgtttgtatggattacataaaggggcgttgcatgagggagaaatgcaaatattttcaccctcctgcacacttgcaggccaaaatcaaagctgcgcagcaccaagccaaccaagctgcggtggccgcccaggcagccgcggccgcggccacagtcatgactcagtcgactgccaaagcaatgaagcgacctctcgaagcaactgtagacctggcctttccccctggtgctcttcatcctttaccaaagagacaagcacttgaaaaaagcaatggtaccagcgcggtctttaaccccagcgtcttgcactaccagcaggctctcaccagcgcacagttgcagcaacacgccgcgttcattccaacagtacccatgatgcacagcgctacgtccgccactgtctctgcagcaacaactcctgcaacaagtgtccccttcgcagcaacagccacagccaatcagataattctgaaataatcagcagaaacggaatggaatgccaagaatctgcattgagaataactaaacattgttactgtacatactatcctgtttcctcctcaatagaattgccacaaactgcatgctaaataaagatgtagttcttctggacagaccacaactctaagaagctagtgctgctatctcatatatgagtattaaatatggtatgcttagtatattccaacctaagatagttaactacctgagaccagctgtgatgtttaaagacataaaggataaagtttacttttaaagggtttctaaacatagtttctgtcctaggaatattgtcttatctccataactatagctgatgcagaaagtccagccagtttactcatttcgattcagaatatttcaaatttagcaataaacaattagcattagttaaaaaagaaacatattccaagggcaggttcgattctagctctaattactgtcatgtcatttacccactggatcaaagggtatgtttcacttcttgacaatataaatgctgcagcaaagatgagaggtgaagtaaaaccgatacctgtcctgcaggtctaaaatttgaatggaaattcaagcacaagtactggggacacatcaaagtgtggtgtttggtttgcctggagatgccacgttgaatcatgtgattctagattaacattaaatagattgaaaaagaaactttgcacggtatgagcttcataccccaccaaacaaagtcttgaaggtattattttacaagtatatttttaaagttgttttataagagagactttgtagaagtgcctagattttgccagacttcatccagcttgacaagattgagaggcccatgccaacagtctaatctaagagattagtctttcaaactcaccatccagttgcctgttacagaataactcttcttaactaaaaacctagtcaaacaaggaagctgtaggtgaggagatctgtataatattctaatttaagtaagtttgagtttagtcactgcaaatttgactgtgactttaatctaaattactatgtaaacaaaaagtagatagtttcactttttaaaaaatccattactgttttgcatttcaaaagttggattaaagggttgtaactgactacagcatggaaaaaaatagttcttttaattctttcaccttaaagcatattttatgtctcaaaagtataaaaaactttaatacaagtacatacatattatatatacacatacatatatatactatatatggatgaaacatattttaatgttgtttacttttttaaatacttggttgatcttcaaggtaatagcgatacaattaaattttgttcagaaagtttgttttaaagtttattttaagcactatcgtaccaaatatttcatatttcacattttatatgttgcacatagcctatacagtacctacatagtttttaaattattgtttaaaaaacaaaacagctgttataaatgaatattatgtgtaattgtttcaaacatccattttctttgtgaacatattagtgattgaagtattttgacttttgagattgaatgtaaaatattttaaatttgggatcatcgcctgttctgaaaactagatgcaccaaccgtatcattatttgtttgaggaaaaaaagaaatctgcattttaattcatgttggtcaaagtcgaattactatctatttatcttatatcgtagatctgataaccctatctaaaagaaagtcacacgctaaatgtattcttacatagtgcttgtatcgttgcatttgttttaatttgtggaaaagtattgtatctaacttgtattactttggtagtttcatctttatgtattattgatatttgtaattttctcaactataacaatgtagttacgctacaacttgcctaaaacattcaaacttgttttcttttttctgtttttttctttgttaattcatttaaactcattgaaaacatagtatacattactaaaaggtaaattatgggaatcactgaaatattttgtagattaattgttgtaacattgtctttcttttttttctttgtgtttcatgattttgatttttaaaattattagcacacaactattttcagccctttaataatggagcatcaaaaacatcacctgtaaccccaagcaaatatagaagactgtattttttactatgatatccattttccagaattgtgattacaatatgcaaagagtcataaatatgccatttacaataaggaggaggcaaggcaaatgcatagatgtacaaatatatgtacaacagattttgctttttatttatttataatgtaattttatagaataattctgggatttgagaggatctaaaactatttttctgtataaatattatttgccaaaagtttgtttatattcagaagtctgactatgatgaataaatcttaaatgctttgtttaattaaaaaacaaaaatcaccaatatccaagacatgaagatatcagttcaacaaatactgtagttaagagactaactctccacttgtatgggaactacatttcactcttggttttcaggatataacagcacttcaccgaaatattctttcagccataccactggtaacatttctactaaatctttctgtaacacttaaagaattccctcattcattaccttacagtgtaaacaggagtctaatttgtatcaatactatgttttggttgtaatattcagttcactcacccaatgtacaaccaatgaaataaaagaagcatttaaaagga

SEQ ID NO: 351321 - DNA, 4606 bp, Homo sapiens
ggatttgtcggaaggaagggctgcagcttacagcaacagagtttagactgtctttgcttcatcatctgaaggtaaaattttccagatacggcagacggctttcagagtacaataaacagggaatgagaactatttacatggaagtttctttctcatgatgcggtggagaagcctcggccacttggttctgccagatgttcctggggttactgtaaatgggaaggacaggcagagctaaacaaggtttatcatttaaaagtgcctgtgtgaagtcacttttgctggaaaactgcagcttgggagctttctttgtattcacatcccactcttctgtcaagtacactttaccctgaccttatgagtggatgaagatacctcagttgtctgactttgccaattgcttaatttcagaatttaaaaaggggaaagaaaaacatcctgctaaaatatgaacatctgagtgtcttattttccaacatcgtcaatagctgtgagcgtcagcattaaatattctcccaaggagtgccatgatattgaagtcactttattaataacagctgtatatgcttttattgcggcctaccatctttaagtgggacatattgattgatgagtgattgcctgtccatacactctctcatcatcctgttccttggattggacttcactaagcaatttatcactcaccttcagacttacatgtgggagttttcacaacagtagttttggaatcattagaacttggattgatttcatcatttaacagaaacaaacagcccaaattactttatcaccatggctttgaacgttgccccagtcagagatacaaaatggctgacattagaagtctgcagacagtttcaaagaggaacatgctcacgctctgatgaagaatgcaaatttgctcatccccccaaaagttgtcaggttgaaaatggaagagtaattgcctgctttgattccctaaagggccgttgttcgagagagaactgcaagtatcttcaccctccgacacacttaaaaactcaactagaaattaatggaaggaacaatttgattcagcaaaaaactgcagcagcaatgcttgcccagcagatgcaatttatgtttccaggaacaccacttcatccagtgcccactttccctgtaggtcccgcgatagggacaaatacggctattagctttgctccttacctagcacctgtaacccctggagttgggttggtcccaacggaaattctgcccaccacgcctgttattgttcccggaagtccaccggtcactgtcccgggctcaactgcaactcagaaacttctcaggactgacaaactggaggtatgcagggagttccagcgaggaaactgtgcccggggagagaccgactgccgctttgcacaccccgcagacagcaccatgatcgacacaagtgacaacaccgtaaccgtttgtatggattacataaaggggcgttgcatgagggagaaatgcaaatattttcaccctcctgcacacttgcaggccaaaatcaaagctgcgcagcaccaagccaaccaagctgcggtggccgcccaggcagccgcggccgcggccacagtcatgactcagtcgactgccaaagcaatgaagcgacctctcgaagcaactgtagacctggcctttccccctggtgctcttcatcctttaccaaagagacaagcacttgaaaaaagcaatggtaccagcgcggtctttaaccccagcgtcttgcactaccagcaggctctcaccagcgcacagttgcagcaacacgccgcgttcattccaacagataattctgaaataatcagcagaaacggaatggaatgccaagaatctgcattgagaataactaaacattgttactgtacatactatcctgtttcctcctcaatagaattgccacaaactgcatgctaaataaagatgtagttcttctggacagaccacaactctaagaagctagtgctgctatctcatatatgagtattaaatatggtatgcttagtatattccaacctaagatagttaactacctgagaccagctgtgatgtttaaagacataaaggataaagtttacttttaaagggtttctaaacatagtttctgtcctaggaatattgtcttatctccataactatagctgatgcagaaagtccagccagtttactcatttcgattcagaatatttcaaatttagcaataaacaattagcattagttaaaaaagaaacatattccaagggcaggttcgattctagctctaattactgtcatgtcatttacccactggatcaaagggtatgtttcacttcttgacaatataaatgctgcagcaaagatgagaggtgaagtaaaaccgatacctgtcctgcaggtctaaaatttgaatggaaattcaagcacaagtactggggacacatcaaagtgtggtgtttggtttgcctggagatgccacgttgaatcatgtgattctagattaacattaaatagattgaaaaagaaactttgcacggtatgagcttcataccccaccaaacaaagtcttgaaggtattattttacaagtatatttttaaagttgttttataagagagactttgtagaagtgcctagattttgccagacttcatccagcttgacaagattgagaggcccatgccaacagtctaatctaagagattagtctttcaaactcaccatccagttgcctgttacagaataactcttcttaactaaaaacctagtcaaacaaggaagctgtaggtgaggagatctgtataatattctaatttaagtaagtttgagtttagtcactgcaaatttgactgtgactttaatctaaattactatgtaaacaaaaagtagatagtttcactttttaaaaaatccattactgttttgcatttcaaaagttggattaaagggttgtaactgactacagcatggaaaaaaatagttcttttaattctttcaccttaaagcatattttatgtctcaaaagtataaaaaactttaatacaagtacatacatattatatatacacatacatatatatactatatatggatgaaacatattttaatgttgtttacttttttaaatacttggttgatcttcaaggtaatagcgatacaattaaattttgttcagaaagtttgttttaaagtttattttaagcactatcgtaccaaatatttcatatttcacattttatatgttgcacatagcctatacagtacctacatagtttttaaattattgtttaaaaaacaaaacagctgttataaatgaatattatgtgtaattgtttcaaacatccattttctttgtgaacatattagtgattgaagtattttgacttttgagattgaatgtaaaatattttaaatttgggatcatcgcctgttctgaaaactagatgcaccaaccgtatcattatttgtttgaggaaaaaaagaaatctgcattttaattcatgttggtcaaagtcgaattactatctatttatcttatatcgtagatctgataaccctatctaaaagaaagtcacacgctaaatgtattcttacatagtgcttgtatcgttgcatttgttttaatttgtggaaaagtattgtatctaacttgtattactttggtagtttcatctttatgtattattgatatttgtaattttctcaactataacaatgtagttacgctacaacttgcctaaaacattcaaacttgttttcttttttctgtttttttctttgttaattcatttaaactcattgaaaacatagtatacattactaaaaggtaaattatgggaatcactgaaatattttgtagattaattgttgtaacattgtctttcttttttttctttgtgtttcatgattttgatttttaaaattattagcacacaactattttcagccctttaataatggagcatcaaaaacatcacctgtaaccccaagcaaatatagaagactgtattttttactatgatatccattttccagaattgtgattacaatatgcaaagagtcataaatatgccatttacaataaggaggaggcaaggcaaatgcatagatgtacaaatatatgtacaacagattttgctttttatttatttataatgtaattttatagaataattctgggatttgagaggatctaaaactatttttctgtataaatattatttgccaaaagtttgtttatattcagaagtctgactatgatgaataaatcttaaatgctttgtttaattaaaaaacaaaaatcaccaatatccaagacatgaagatatcagttcaacaaatactgtagttaagagactaactctccacttgtatgggaactacatttcactcttggttttcaggatataacagcacttcaccgaaatattctttcagccataccactggtaacatttctactaaatctttctgtaacacttaaagaattccctcattcattaccttacagtgtaaacaggagtctaatttgtatcaatactatgttttggttgtaatattcagttcactcacccaatgtacaaccaatgaaataaaagaagcatttaaaagga

SEQ ID NO: 351322 - DNA, 2980 bp, Homo sapiens
aagcttgcggccgcggccacagtcatggcctttccccctggtgctcttcatcctttaccaaagagacaagcacttgaaaaaagcaatggtaccagcgcggtctttaaccccagcgtcttgcactaccagcaggctctcaccagcgcacagttgcagcaacacgccgcgttcattccaacagataattctgaaataatcagcagaaacggaatggaatgccaagaatctgcattgagaataactaaacattgttactgtacatactatcctgtttcctcctcaatagaattgccacaaactgcatgctaaataaagatgtagttcttctggacagaccacaactctaagaagctagtgctgctatctcatatatgagtattaaatatggtatgcttagtatattccaacctaagatagttaactacctgagaccagctgtgatgtttaaagacataaaggataaagtttacttttaaagggtttctaaacatagtttctgtcctaggaatattgtcttatctccataactatagctgatgcagaaagtccagccagtttactcatttcgattcagaatatttcaaatttagcaataaacaattagcattagttaaaaaagaaacatattccaagggcaggttcgattctagctctaattactgtcatgtcatttacccactggatcaaagggtatgtttcacttcttgacaatataaatgctgcagcaaagatgagaggtgaagtaaaaccgatacctgtcctgcaggtctaaaatttgaatggaaattcaagcacaagtactggggacacatcaaagtgtggtgtttggtttgcctggagatgccacgttgaatcatgtgattctagattaacattaaatagattgaaaaagaaactttgcacggtatgagcttcataccccaccaaacaaagtcttgaaggtattattttacaagtatatttttaaagttgttttataagagagactttgtagaagtgcctagattttgccagacttcatccagcttgacaagattgagaggcccatgccaacagtctaatctaagagattagtctttcaaactcaccatccagttgcctgttacagaataactcttcttaactaaaaacctagtcaaacaaggaagctgtaggtgaggagatctgtataatattctaatttaagtaagtttgagtttagtcactgcaaatttgactgtgactttaatctaaattactatgtaaacaaaaagtagatagtttcactttttaaaaaatccattactgttttgcatttcaaaagttggattaaagggttgtaactgactacagcatggaaaaaaatagttcttttaattctttcaccttaaagcatattttatgtctcaaaagtataaaaaactttaatacaagtacatacatattatatatacacatacatatatatactatatatggatgaaacatattttaatgttgtttacttttttaaatacttggttgatcttcaaggtaatagcgatacaattaaattttgttcagaaagtttgttttaaagtttattttaagcactatcgtaccaaatatttcatatttcacattttatatgttgcacatagcctatacagtacctacatagtttttaaattattgtttaaaaaacaaaacagctgttataaatgaatattatgtgtaattgtttcaaacatccattttctttgtgaacatattagtgattgaagtattttgacttttgagattgaatgtaaaatattttaaatttgggatcatcgcctgttctgaaaactagatgcaccaaccgtatcattatttgtttgaggaaaaaaagaaatctgcattttaattcatgttggtcaaagtcgaattactatctatttatcttatatcgtagatctgataaccctatctaaaagaaagtcacacgctaaatgtattcttacatagtgcttgtatcgttgcatttgttttaatttgtggaaaagtattgtatctaacttgtattactttggtagtttcatctttatgtattattgatatttgtaattttctcaactataacaatgtagttacgctacaacttgcctaaaacattcaaacttgttttcttttttctgtttttttctttgttaattcatttaaactcattgaaaacatagtatacattactaaaaggtaaattatgggaatcactgaaatattttgtagattaattgttgtaacattgtctttcttttttttctttgtgtttcatgattttgatttttaaaattattagcacacaactattttcagccctttaataatggagcatcaaaaacatcacctgtaaccccaagcaaatatagaagactgtattttttactatgatatccattttccagaattgtgattacaatatgcaaagagtcataaatatgccatttacaataaggaggaggcaaggcaaatgcatagatgtacaaatatatgtacaacagattttgctttttatttatttataatgtaattttatagaataattctgggatttgagaggatctaaaactatttttctgtataaatattatttgccaaaagtttgtttatattcagaagtctgactatgatgaataaatcttaaatgctttgtttaattaaaaaacaaaaatcaccaatatccaagacatgaagatatcagttcaacaaatactgtagttaagagactaactctccacttgtatgggaactacatttcactcttggttttcaggatataacagcacttcaccgaaatattctttcagccataccactggtaacatttctactaaatctttctgtaacacttaaagaattccctcattcattaccttacagtgtaaacaggagtctaatttgtatcaatactatgttttggttgtaatattcagttcactcacccaatgtacaaccaatgaaataaaagaagcatttaaaagga

SEQ ID NO: 351323 - DNA, 3507 bp, Homo sapiens
ggatttgtcggaaggaagggctgcagcttacagcaacagagtttagactgtctttgcttcatcatctgaaggtaaaattttccagatacggcagacggctttcagagtacaataaacagggaatgagaactatttacatggaagtttctttctcatgatgcggtggagaagcctcggccacttggttctgccagatgttcctggggttactgtaaatgggaaggacaggcagagctaaacaaggtttatcatttaaaagtgcctgtgtgaagtcacttttgctggaaaactgcagcttgggagctttctttgtattcacatcccactcttctgtcaagtacactttaccctgaccttatgagtggatgaagatacctcagttgtctgactttgccaattgcttaatttcagaatttaaaaaggggaaagaaaaacatcctgctaaaatatgaacatctgagtgtcttattttccaacatcgtcaatagctgtgagcgtcagcattaaatattctcccaaggagtgccatgatattgaagtcactttattaataacagctgtatctgcaaaacagtcaagagactcggacgttgaaagccagagatgacactgagcatgcttttattgcggcctaccatctttaagtgggacatattgattgatgagtgattgcctgtccatacactctctcatcatcctgttccttggattggacttcactaagcaatttatcactcaccttcagacttacatgtgggagttttcacaacagtagttttggaatcattagaacttggattgatttcatcatttaacagaaacaaacagcccaaattactttatcaccatggctttgaacgttgccccagtcagagatacaaaatggctgacattagaagtctgcagacagtttcaaagaggaacatgctcacgctctgatgaagaatgcaaatttgctcatccccccaaaagttgtcaggttgaaaatggaagagtaattgcctgctttgattccctaaagggccgttgttcgagagagaactgcaagtatcttcaccctccgacacacttaaaaactcaactagaaattaatggaaggaacaatttgattcagcaaaaaactgcagcagcaatgcttgcccagcagatgcaatttatgtttccaggaacaccacttcatccagtgcccactttccctgtaggtcccgcgatagggacaaatacggctattagctttgctccttacctagcacctgtaacccctggagttgggttggtcccaacggaaattctgcccaccacgcctgttattgttcccggaagtccaccggtcactgtcccgggctcaactgcaactcagaaacttctcaggactgacaaactggaggtatgcagggagttccagcgaggaaactgtgcccggggagagaccgactgccgctttgcacaccccgcagacagcaccatgatcgacacaagtgacaacaccgtaaccgtttgtatggattacataaaggggcgttgcatgagggagaaatgcaaatattttcaccctcctgcacacttgcaggccaaaatcaaagctgcgcagcaccaagccaaccaagctgcggtggccgcccaggcagccgcggccgcggccacagtcatgactcagtcgactgccaaagcaatgaagcgacctctcgaagcaactgtagacctggcctttccccctggtgctcttcatcctttaccaaagagacaagcacttgaaaaaagcaatggtaccagcgcggtctttaaccccagcgtcttgcactaccagcaggctctcaccagcgcacagttgcagcaacacgccgcgttcattccaacaggtatgtgcccttactgccctacgtcctgtgcccttctggtcatgtgctttcttctcatttctctaagctgtttggtggcatctagtttgcttttgaaggtataatacagtttgaaattcatcgttgtcctagctatctaaatgtatttaccttactttgaatgatagctaaagactgttaggattctaaagccaaatatttgatagattgaagagacagatttaacccatgagaaacagcagttagggcttttggtttcttgtatttgcacaagccctgtaaaattgtttatgtaaataagaccttttatgtgtgacaattgaaatttgtccttaactctgaatgacctaaaaatagcaattccagtaaatactaaccatttttttctatttctattcagagcactaaaacaatgaggctattcaaattaaagcaattctctactcatatttttatattcattctatctctttctccatccttctcaactttcaccaagttcacaagtatatagagctcttatcctcagtgtctaagccaatgcctgatactattacgtacgatgtgcattaactatgattccactaaaagatccattgtaatagtcatagaatcttagagtttaaaggactcttagtgatctcctcatccagctgattgttttacagatgagaaaactgaggccccctaaatgagaagtgactttccaaggtgccacaactaatgagaaaaagaactgagtttccctgtgaccaaacccatttacatcacattctaccacctgggcccgcctatatatacacattccacagagttctcctgaaaaaagaaaaaagcagataaaagtgaatttttaaataactgaccccaaaaagtcagataaaagtaaaaaaacaaaagtataaatcatgtcatccctcccccatttgcaccgacatctctaaccacagacacacacacgcacaccatacgcaaagatagtcaccataattgaccatgtttttcaccttttagtcaatgttagaagcaaggggtaacttaagtcctggtgggaagaccatccattgagttctttgaaagtcaacatttttcagcccacgatagtgaaatgaaagtaaatataaatgaataacaattctaacaaaaagagttttttgattcaaatccattagtttgaacttttcgagcttattatccatttccttaaatcccatagcttatcagagttaacatcagagggaggtaaaatatttctgtgatattctttgtataaaatctacactttgaaatggattagtaacctgtgaacaatacatattttagttaacatataaattatgtgagcaaagtggttttcagtgtttttttcttattttagttttgaacctgtcttaaactcacagacttgtagaagaaatctctaattcagtatttattaggagttcacttttgccctattacagccttaattagtgacatcccagtgctgttacagcatagcagtgtcttaatatgtaatctaattgaaataacacatttgtaaaataattactagaaggtaaacttacgttaatgtcctgtgtggtttctacaaagtgtgtcattgtagacctcttggccactagatattttaagataaaaaaaaaaa

SEQ ID NO: 351324 - DNA, 2277 bp, Homo sapiens
ggatttgtcggaaggaagggctgcagcttacagcaacagagtttagactgtctttgcttcatcatctgaaggtaaaattttccagatacggcagacggctttcagagtacaataaacagggaatgagaactatttacatggaagtttctttctcatgatgcggtggagaagcctcggccacttggttctgccagatgttcctggggttactgtaaatgggaaggacaggcagagctaaacaaggtttatcatttaaaagtgcctgtgtgaagtcacttttgctggaaaactgcagcttgggagctttctttgtattcacatcccactcttctgtcaagtacactttaccctgaccttatgagtggatgaagatacctcagttgtctgactttgccaattgcttaatttcagaatttaaaaaggggaaagaaaaacatcctgctaaaatatgaacatctgagtgtcttattttccaacatcgtcaatagctgtgagcgtcagcattaaatattctcccaaggagtgccatgatattgaagtcactttattaataacagctgtatctgcaaaacagtcaagagactcggacgttgaaagccagagatgacactgagcatgcttttattgcggcctaccatctttaagtgggacatattgattgatgagtgattgcctgtccatacactctctcatcatcctgttccttggattggacttcactaagcaatttatcactcaccttcagacttacatgtgggagttttcacaacagtagttttggaatcattagaacttggattgatttcatcatttaacagaaacaaacagcccaaattactttatcaccatggctttgaacgttgccccagtcagagatacaaaatggctgacattagaagtctgcagacagtttcaaagaggaacatgctcacgctctgatgaagaatgcaaatttgctcatccccccaaaagttgtcaggttgaaaatggaagagtaattgcctgctttgattccctaaagggccgttgttcgagagagaactgcaagtatcttcaccctccgacacacttaaaaactcaactagaaattaatggaaggaacaatttgattcagcaaaaaactgcagcagcaatgcttgcccagcagatgcaatttatgtttccaggaacaccacttcatccagtgcccactttccctgtaggtcccgcgatagggacaaatacggctattagctttgctccttacctagcacctgtaacccctggagttgggttggtcccaacggaaattctgcccaccacgcctgttattgttcccggaagtccaccggtcactgtcccgggctcaactgcaactcagaaacttctcaggactgacaaactggaggtatgcagggagttccagcgaggaaactgtgcccggggagagaccgactgccgctttgcacaccccgcagacagcaccatgatcgacacaagtgacaacaccgtaaccgtttgtatggattacataaaggggcgttgcatgagggagaaatgcaaatattttcaccctcctgcacacttgcaggccaaaatcaaagctgcgcagcaccaagccaaccaagctgcggtggccgcccaggcagccgcggccgcggccacagtcatggcctttccccctggtgctcttcatcctttaccaaagagacaagcacttgaaaaaagcaatggtaccagcgcggtctttaaccccagcgtcttgcactaccagcaggctctcaccagcgcacagttgcagcaacacgccgcgttcattccaacagtacccatgatgcacagcgctacgtccgccactgtctctgcagcaacaactcctgcaacaagtgtccccttcgcagcaacagccacagccaatcagataattctgaaataatcagcagaaacggaatggaatgccaagaatctgcattgagaataactaaacattgttactgtacatactatcctgtttcctcctcaatagaattgccacaaactgcatgctaaataaagatgtagttcttctggacagaccacaactctaagaagctagtgctgctatctcatatatgagtattaaatatggtatgcttagtatattccaacctaagatagttaactacctgagaccagctgtgatggggaccgaactgtgcatggggaccgaactgtgcatggggaccgaactgtgcatggggaccgaactgtgcatggggaccgaactgtgcatggggaccgaactgtgcatggggaccg

SEQ ID NO: 351325 - DNA, 464 bp, Homo sapiens
  misc_feature (8)..(8): n is a, c, g, or t
taggcccntgggagcagtatctcagtctgggatttgagaggatctaaaactatttttctgtataaatattatttgccaaaagtttgtttatattcagaagtctgactatgatgaataaatcttaaatgctttgtttaattaaaaaacaaaaatcaccaatatccaagacatgaagatatcagttcaacaaatactgtagttaagagactaactctccacttgtatgggaactacatttcactcttggttttcaggatataacagcacttcaccgaaatattctttcagccataccactggtaacatttctactaaatctttctgtaacacttaaagaattccctcattcattaccttacagtgtaaacaggagtctaatttgtatcaatactatgttttggttgtaatattcagttcactcacccaatgtacaaccaatgaaataaaagaagcatttaaaagga

SEQ ID NO: 351326 - DNA, 4752 bp, Homo sapiens
ggatttgtcggaaggaagggctgcagcttacagcaacagagtttagactgtctttgcttcatcatctgaaggtaaaattttccagatacggcagacggctttcagagtacaataaacagggaatgagaactatttacatggaagtttctttctcatgatgcggtggagaagcctcggccacttggttctgccagatgttcctggggttactgtaaatgggaaggacaggcagagctaaacaaggtttatcatttaaaagtgcctgtgtgaagtcacttttgctggaaaactgcagcttgggagctttctttgtattcacatcccactcttctgtcaagtacactttaccctgaccttatgagtggatgaagatacctcagttgtctgactttgccaattgcttaatttcagaatttaaaaaggggaaagaaaaacatcctgctaaaatatgaacatctgagtgtcttattttccaacatcgtcaatagctgtgagcgtcagcattaaatattctcccaaggagtgccatgatattgaagtcactttattaataacagctgtatctgcaaaacagtcaagagactcggacgttgaaagccagagatgacactgagcatgcttttattgcggcctaccatctttaagtgggacatattgattgatgagtgattgcctgtccatacactctctcatcatcctgttccttggattggacttcactaagcaatttatcactcaccttcagacttacatgtgggagttttcacaacagtagttttggaatcattagaacttggattgatttcatcatttaacagaaacaaacagcccaaattactttatcaccatggctttgaacgttgccccagtcagagatacaaaatggctgacattagaagtctgcagacagtttcaaagaggaacatgctcacgctctgatgaagaatgcaaatttgctcatccccccaaaagttgtcaggttgaaaatggaagagtaattgcctgctttgattccctaaagggccgttgttcgagagagaactgcaagtatcttcaccctccgacacacttaaaaactcaactagaaattaatggaaggaacaatttgattcagcaaaaaactgcagcagcaatgcttgcccagcagatgcaatttatgtttccaggaacaccacttcatccagtgcccactttccctgtaggtcccgcgatagggacaaatacggctattagctttgctccttacctagcacctgtaacccctggagttgggttggtcccaacggaaattctgcccaccacgcctgttattgttcccggaagtccaccggtcactgtcccgggctcaactgcaactcagaaacttctcaggactgacaaactggaggtatgcagggagttccagcgaggaaactgtgcccggggagagaccgactgccgctttgcacaccccgcagacagcaccatgatcgacacaagtgacaacaccgtaaccgtttgtatggattacataaaggggcgttgcatgagggagaaatgcaaatattttcaccctcctgcacacttgcaggccaaaatcaaagctgcgcagccgcggccgcggccacagtcatgactcagtcgactgccaaagcaatgaagcgacctctcgaagcaactgtagacctggcctttccccctggtgctcttcatcctttaccaaagagacaagcacttgaaaaaagcaatggtaccagcgcggtctttaaccccagcgtcttgcactaccagcaggctctcaccagcgcacagttgcagcaacacgccgcgttcattccaacagggtcagttttgtgcatgacacccgctaccagtattgtacccatgatgcacagcgctacgtccgccactgtctctgcagcaacaactcctgcaacaagtgtccccttcgcagcaacagccacagccaatcagataattctgaaataatcagcagaaacggaatggaatgccaagaatctgcattgagaataactaaacattgttactgtacatactatcctgtttcctcctcaatagaattgccacaaactgcatgctaaataaagatgtagttcttctggacagaccacaactctaagaagctagtgctgctatctcatatatgagtattaaatatggtatgcttagtatattccaacctaagatagttaactacctgagaccagctgtgatgtttaaagacataaaggataaagtttacttttaaagggtttctaaacatagtttctgtcctaggaatattgtcttatctccataactatagctgatgcagaaagtccagccagtttactcatttcgattcagaatatttcaaatttagcaataaacaattagcattagttaaaaaagaaacatattccaagggcaggttcgattctagctctaattactgtcatgtcatttacccactggatcaaagggtatgtttcacttcttgacaatataaatgctgcagcaaagatgagaggtgaagtaaaaccgatacctgtcctgcaggtctaaaatttgaatggaaattcaagcacaagtactggggacacatcaaagtgtggtgtttggtttgcctggagatgccacgttgaatcatgtgattctagattaacattaaatagattgaaaaagaaactttgcacggtatgagcttcataccccaccaaacaaagtcttgaaggtattattttacaagtatatttttaaagttgttttataagagagactttgtagaagtgcctagattttgccagacttcatccagcttgacaagattgagaggcccatgccaacagtctaatctaagagattagtctttcaaactcaccatccagttgcctgttacagaataactcttcttaactaaaaacctagtcaaacaaggaagctgtaggtgaggagatctgtataatattctaatttaagtaagtttgagtttagtcactgcaaatttgactgtgactttaatctaaattactatgtaaacaaaaagtagatagtttcactttttaaaaaatccattactgttttgcatttcaaaagttggattaaagggttgtaactgactacagcatggaaaaaaatagttcttttaattctttcaccttaaagcatattttatgtctcaaaagtataaaaaactttaatacaagtacatacatattatatatacacatacatatatatactatatatggatgaaacatattttaatgttgtttacttttttaaatacttggttgatcttcaaggtaatagcgatacaattaaattttgttcagaaagtttgttttaaagtttattttaagcactatcgtaccaaatatttcatatttcacattttatatgttgcacatagcctatacagtacctacatagtttttaaattattgtttaaaaaacaaaacagctgttataaatgaatattatgtgtaattgtttcaaacatccattttctttgtgaacatattagtgattgaagtattttgacttttgagattgaatgtaaaatattttaaatttgggatcatcgcctgttctgaaaactagatgcaccaaccgtatcattatttgtttgaggaaaaaaagaaatctgcattttaattcatgttggtcaaagtcgaattactatctatttatcttatatcgtagatctgataaccctatctaaaagaaagtcacacgctaaatgtattcttacatagtgcttgtatcgttgcatttgttttaatttgtggaaaagtattgtatctaacttgtattactttggtagtttcatctttatgtattattgatatttgtaattttctcaactataacaatgtagttacgctacaacttgcctaaaacattcaaacttgttttcttttttctgtttttttctttgttaattcatttaaactcattgaaaacatagtatacattactaaaaggtaaattatgggaatcactgaaatattttgtagattaattgttgtaacattgtctttcttttttttctttgtgtttcatgattttgatttttaaaattattagcacacaactattttcagccctttaataatggagcatcaaaaacatcacctgtaaccccaagcaaatatagaagactgtattttttactatgatatccattttccagaattgtgattacaatatgcaaagagtcataaatatgccatttacaataaggaggaggcaaggcaaatgcatagatgtacaaatatatgtacaacagattttgctttttatttatttataatgtaattttatagaataattctgggatttgagaggatctaaaactatttttctgtataaatattatttgccaaaagtttgtttatattcagaagtctgactatgatgaataaatcttaaatgctttgtttaattaaaaaacaaaaatcaccaatatccaagacatgaagatatcagttcaacaaatactgtagttaagagactaactctccacttgtatgggaactacatttcactcttggttttcaggatataacagcacttcaccgaaatattctttcagccataccactggtaacatttctactaaatctttctgtaacacttaaagaattccctcattcattaccttacagtgtaaacaggagtctaatttgtatcaatactatgttttggttgtaatattcagttcactcacccaatgtacaaccaatgaaataaaagaagcatttaaaagga

SEQ ID NO: 351327 - DNA, 4658 bp, Homo sapiens
ggatttgtcggaaggaagggctgcagcttacagcaacagagtttagactgtctttgcttcatcatctgaaggtaaaattttccagatacggcagacggctttcagagtacaataaacagggaatgagaactatttacatggaagtttctttctcatgatgcggtggagaagcctcggccacttggttctgccagatgttcctggggttactgtaaatgggaaggacaggcagagctaaacaaggtttatcatttaaaagtgcctgtgtgaagtcacttttgctggaaaactgcagcttgggagctttctttgtattcacatcccactcttctgtcaagtacactttaccctgaccttatgagtggatgaagatacctcagttgtctgactttgccaattgcttaatttcagaatttaaaaaggggaaagaaaaacatcctgctaaaatatgaacatctgagtgtcttattttccaacatcgtcaatagctgtgagcgtcagcattaaatattctcccaaggagtgccatgatattgaagtcactttattaataacagctgtatctgcaaaacagtcaagagactcggacgttgaaagccagagatgacactgagcatgcttttattgcggcctaccatctttaagtgggacatattgattgatgagtgattgcctgtccatacactctctcatcatcctgttccttggattggacttcactaagcaatttatcactcaccttcagacttacatgtgggagttttcacaacagtagttttggaatcattagaacttggattgatttcatcatttaacagaaacaaacagcccaaattactttatcaccatggctttgaacgttgccccagtcagagatacaaaatggctgacattagaagtctgcagacagtttcaaagaggaacatgctcacgctctgatgaagaatgcaaatttgctcatccccccaaaagttgtcaggttgaaaatggaagagtaattgcctgctttgattccctaaagggccgttgttcgagagagaactgcaagtatcttcaccctccgacacacttaaaaactcaactagaaattaatggaaggaacaatttgattcagcaaaaaactgcagcagcaatgcttgcccagcagatgcaatttatgtttccaggaacaccacttcatccagtgcccactttccctgtaggtcccgcgatagggacaaatacggctattagctttgctccttacctagcacctgtaacccctggagttgggttggtcccaacggaaattctgcccaccacgcctgttattgttcccggaagtccaccggtcactgtcccgggctcaactgcaactcagaaacttctcaggactgacaaactggaggtatgcagggagttccagcgaggaaactgtgcccggggagagaccgactgccgctttgcacaccccgcagacagcaccatgatcgacacaagtgacaacaccgtaaccgtttgtatggattacataaaggggcgttgcatgagggagaaatgcaaatattttcaccctcctgcacacttgcaggccaaaatcaaagctgcgcagcaccaagccaaccaagctgcggtggccgcccaggcagccgcggccgcggccacagtcatgactcagtcgactgccaaagcaatgaagcgacctctcgaagcaactgtagacctggcctttccccctggtgctcttcatcctttaccaaagagacaagcacttgaaaaaagcaatggtaccagcgcggtctttaaccccagcgtcttgcactaccagcaggctctcaccagcgcacagttgcagcaacacgccgcgttcattccaacagataattctgaaataatcagcagaaacggaatggaatgccaagaatctgcattgagaataactaaacattgttactgtacatactatcctgtttcctcctcaatagaattgccacaaactgcatgctaaataaagatgtagttcttctggacagaccacaactctaagaagctagtgctgctatctcatatatgagtattaaatatggtatgcttagtatattccaacctaagatagttaactacctgagaccagctgtgatgtttaaagacataaaggataaagtttacttttaaagggtttctaaacatagtttctgtcctaggaatattgtcttatctccataactatagctgatgcagaaagtccagccagtttactcatttcgattcagaatatttcaaatttagcaataaacaattagcattagttaaaaaagaaacatattccaagggcaggttcgattctagctctaattactgtcatgtcatttacccactggatcaaagggtatgtttcacttcttgacaatataaatgctgcagcaaagatgagaggtgaagtaaaaccgatacctgtcctgcaggtctaaaatttgaatggaaattcaagcacaagtactggggacacatcaaagtgtggtgtttggtttgcctggagatgccacgttgaatcatgtgattctagattaacattaaatagattgaaaaagaaactttgcacggtatgagcttcataccccaccaaacaaagtcttgaaggtattattttacaagtatatttttaaagttgttttataagagagactttgtagaagtgcctagattttgccagacttcatccagcttgacaagattgagaggcccatgccaacagtctaatctaagagattagtctttcaaactcaccatccagttgcctgttacagaataactcttcttaactaaaaacctagtcaaacaaggaagctgtaggtgaggagatctgtataatattctaatttaagtaagtttgagtttagtcactgcaaatttgactgtgactttaatctaaattactatgtaaacaaaaagtagatagtttcactttttaaaaaatccattactgttttgcatttcaaaagttggattaaagggttgtaactgactacagcatggaaaaaaatagttcttttaattctttcaccttaaagcatattttatgtctcaaaagtataaaaaactttaatacaagtacatacatattatatatacacatacatatatatactatatatggatgaaacatattttaatgttgtttacttttttaaatacttggttgatcttcaaggtaatagcgatacaattaaattttgttcagaaagtttgttttaaagtttattttaagcactatcgtaccaaatatttcatatttcacattttatatgttgcacatagcctatacagtacctacatagtttttaaattattgtttaaaaaacaaaacagctgttataaatgaatattatgtgtaattgtttcaaacatccattttctttgtgaacatattagtgattgaagtattttgacttttgagattgaatgtaaaatattttaaatttgggatcatcgcctgttctgaaaactagatgcaccaaccgtatcattatttgtttgaggaaaaaaagaaatctgcattttaattcatgttggtcaaagtcgaattactatctatttatcttatatcgtagatctgataaccctatctaaaagaaagtcacacgctaaatgtattcttacatagtgcttgtatcgttgcatttgttttaatttgtggaaaagtattgtatctaacttgtattactttggtagtttcatctttatgtattattgatatttgtaattttctcaactataacaatgtagttacgctacaacttgcctaaaacattcaaacttgttttcttttttctgtttttttctttgttaattcatttaaactcattgaaaacatagtatacattactaaaaggtaaattatgggaatcactgaaatattttgtagattaattgttgtaacattgtctttcttttttttctttgtgtttcatgattttgatttttaaaattattagcacacaactattttcagccctttaataatggagcatcaaaaacatcacctgtaaccccaagcaaatatagaagactgtattttttactatgatatccattttccagaattgtgattacaatatgcaaagagtcataaatatgccatttacaataaggaggaggcaaggcaaatgcatagatgtacaaatatatgtacaacagattttgctttttatttatttataatgtaattttatagaataattctgggatttgagaggatctaaaactatttttctgtataaatattatttgccaaaagtttgtttatattcagaagtctgactatgatgaataaatcttaaatgctttgtttaattaaaaaacaaaaatcaccaatatccaagacatgaagatatcagttcaacaaatactgtagttaagagactaactctccacttgtatgggaactacatttcactcttggttttcaggatataacagcacttcaccgaaatattctttcagccataccactggtaacatttctactaaatctttctgtaacacttaaagaattccctcattcattaccttacagtgtaaacaggagtctaatttgtatcaatactatgttttggttgtaatattcagttcactcacccaatgtacaaccaatgaaataaaagaagcatttaaaagga

SEQ ID NO: 351328 - DNA, 4640 bp, Homo sapiens
ggatttgtcggaaggaagggctgcagcttacagcaacagagtttagactgtctttgcttcatcatctgaaggtaaaattttccagatacggcagacggctttcagagtacaataaacagggaatgagaactatttacatggaagtttctttctcatgatgcggtggagaagcctcggccacttggttctgccagatgttcctggggttactgtaaatgggaaggacaggcagagctaaacaaggtttatcatttaaaagtgcctgtgtgaagtcacttttgctggaaaactgcagcttgggagctttctttgtattcacatcccactcttctgtcaagtacactttaccctgaccttatgagtggatgaagatacctcagttgtctgactttgccaattgcttaatttcagaatttaaaaaggggaaagaaaaacatcctgctaaaatatgaacatctgagtgtcttattttccaacatcgtcaatagctgtgagcgtcagcattaaatattctcccaaggagtgccatgatattgaagtcactttattaataacagctgtatctgcaaaacagtcaagagactcggacgttgaaagccagagatgacactgagcatgcttttattgcggcctaccatctttaagtgggacatattgattgatgagtgattgcctgtccatacactctctcatcatcctgttccttggattggacttcactaagcaatttatcactcaccttcagacttacatgtgggagttttcacaacagtagttttggaatcattagaacttggattgatttcatcatttaacagaaacaaacagcccaaattactttatcaccatggctttgaacgttgccccagtcagagatacaaaatggctgacattagaagtctgcagacagtttcaaagaggaacatgctcacgctctgatgaagaatgcaaatttgctcatccccccaaaagttgtcaggttgaaaatggaagagtaattgcctgctttgattccctaaagggccgttgttcgagagagaactgcaagtatcttcaccctccgacacacttaaaaactcaactagaaattaatggaaggaacaatttgattcagcaaaaaactgcagcagcaatgcttgcccagcagatgcaatttatgtttccaggaacaccacttcatccagtgcccactttccctgtaggtcccgcgatagggacaaatacggctattagctttgctccttacctagcacctgtaacccctggagttgggttggtcccaacggaaattctgcccaccacgcctgttattgttcccggaagtccaccggtcactgtcccgggctcaactgcaactcagaaacttctcaggactgacaaactggaggtatgcagggagttccagcgaggaaactgtgcccggggagagaccgactgccgctttgcacaccccgcagacagcaccatgatcgacacaagtgacaacaccgtaaccgtttgtatggattacataaaggggcgttgcatgagggagaaatgcaaatattttcaccctcctgcacacttgcaggccaaaatcaaagctgcgcagcaccaagccaaccaagctgcggtggccgcccaggcagccgcggccgcggccacagtcatggcctttccccctggtgctcttcatcctttaccaaagagacaagcacttgaaaaaagcaatggtaccagcgcggtctttaaccccagcgtcttgcactaccagcaggctctcaccagcgcacagttgcagcaacacgccgcgttcattccaacagggtcagttttgtgcatgacacccgctaccagtattgataattctgaaataatcagcagaaacggaatggaatgccaagaatctgcattgagaataactaaacattgttactgtacatactatcctgtttcctcctcaatagaattgccacaaactgcatgctaaataaagatgtagttcttctggacagaccacaactctaagaagctagtgctgctatctcatatatgagtattaaatatggtatgcttagtatattccaacctaagatagttaactacctgagaccagctgtgatgtttaaagacataaaggataaagtttacttttaaagggtttctaaacatagtttctgtcctaggaatattgtcttatctccataactatagctgatgcagaaagtccagccagtttactcatttcgattcagaatatttcaaatttagcaataaacaattagcattagttaaaaaagaaacatattccaagggcaggttcgattctagctctaattactgtcatgtcatttacccactggatcaaagggtatgtttcacttcttgacaatataaatgctgcagcaaagatgagaggtgaagtaaaaccgatacctgtcctgcaggtctaaaatttgaatggaaattcaagcacaagtactggggacacatcaaagtgtggtgtttggtttgcctggagatgccacgttgaatcatgtgattctagattaacattaaatagattgaaaaagaaactttgcacggtatgagcttcataccccaccaaacaaagtcttgaaggtattattttacaagtatatttttaaagttgttttataagagagactttgtagaagtgcctagattttgccagacttcatccagcttgacaagattgagaggcccatgccaacagtctaatctaagagattagtctttcaaactcaccatccagttgcctgttacagaataactcttcttaactaaaaacctagtcaaacaaggaagctgtaggtgaggagatctgtataatattctaatttaagtaagtttgagtttagtcactgcaaatttgactgtgactttaatctaaattactatgtaaacaaaaagtagatagtttcactttttaaaaaatccattactgttttgcatttcaaaagttggattaaagggttgtaactgactacagcatggaaaaaaatagttcttttaattctttcaccttaaagcatattttatgtctcaaaagtataaaaaactttaatacaagtacatacatattatatatacacatacatatatatactatatatggatgaaacatattttaatgttgtttacttttttaaatacttggttgatcttcaaggtaatagcgatacaattaaattttgttcagaaagtttgttttaaagtttattttaagcactatcgtaccaaatatttcatatttcacattttatatgttgcacatagcctatacagtacctacatagtttttaaattattgtttaaaaaacaaaacagctgttataaatgaatattatgtgtaattgtttcaaacatccattttctttgtgaacatattagtgattgaagtattttgacttttgagattgaatgtaaaatattttaaatttgggatcatcgcctgttctgaaaactagatgcaccaaccgtatcattatttgtttgaggaaaaaaagaaatctgcattttaattcatgttggtcaaagtcgaattactatctatttatcttatatcgtagatctgataaccctatctaaaagaaagtcacacgctaaatgtattcttacatagtgcttgtatcgttgcatttgttttaatttgtggaaaagtattgtatctaacttgtattactttggtagtttcatctttatgtattattgatatttgtaattttctcaactataacaatgtagttacgctacaacttgcctaaaacattcaaacttgttttcttttttctgtttttttctttgttaattcatttaaactcattgaaaacatagtatacattactaaaaggtaaattatgggaatcactgaaatattttgtagattaattgttgtaacattgtctttcttttttttctttgtgtttcatgattttgatttttaaaattattagcacacaactattttcagccctttaataatggagcatcaaaaacatcacctgtaaccccaagcaaatatagaagactgtattttttactatgatatccattttccagaattgtgattacaatatgcaaagagtcataaatatgccatttacaataaggaggaggcaaggcaaatgcatagatgtacaaatatatgtacaacagattttgctttttatttatttataatgtaattttatagaataattctgggatttgagaggatctaaaactatttttctgtataaatattatttgccaaaagtttgtttatattcagaagtctgactatgatgaataaatcttaaatgctttgtttaattaaaaaacaaaaatcaccaatatccaagacatgaagatatcagttcaacaaatactgtagttaagagactaactctccacttgtatgggaactacatttcactcttggttttcaggatataacagcacttcaccgaaatattctttcagccataccactggtaacatttctactaaatctttctgtaacacttaaagaattccctcattcattaccttacagtgtaaacaggagtctaatttgtatcaatactatgttttggttgtaatattcagttcactcacccaatgtacaaccaatgaaataaaagaagcatttaaaagga

SEQ ID NO: 351329 - DNA, 3031 bp, Homo sapiens
gtgctcgctgcctgttattaaaagactcagtcgactgccaaagcaatgaagcgacctctcgaagcaactgtagacctggcctttccccctggtgctcttcatcctttaccaaagagacaagcacttgaaaaaagcaatggtaccagcgcggtctttaaccccagcgtcttgcactaccagcaggctctcaccagcgcacagttgcagcaacacgccgcgttcattccaacagataattctgaaataatcagcagaaacggaatggaatgccaagaatctgcattgagaataactaaacattgttactgtacatactatcctgtttcctcctcaatagaattgccacaaactgcatgctaaataaagatgtagttcttctggacagaccacaactctaagaagctagtgctgctatctcatatatgagtattaaatatggtatgcttagtatattccaacctaagatagttaactacctgagaccagctgtgatgtttaaagacataaaggataaagtttacttttaaagggtttctaaacatagtttctgtcctaggaatattgtcttatctccataactatagctgatgcagaaagtccagccagtttactcatttcgattcagaatatttcaaatttagcaataaacaattagcattagttaaaaaagaaacatattccaagggcaggttcgattctagctctaattactgtcatgtcatttacccactggatcaaagggtatgtttcacttcttgacaatataaatgctgcagcaaagatgagaggtgaagtaaaaccgatacctgtcctgcaggtctaaaatttgaatggaaattcaagcacaagtactggggacacatcaaagtgtggtgtttggtttgcctggagatgccacgttgaatcatgtgattctagattaacattaaatagattgaaaaagaaactttgcacggtatgagcttcataccccaccaaacaaagtcttgaaggtattattttacaagtatatttttaaagttgttttataagagagactttgtagaagtgcctagattttgccagacttcatccagcttgacaagattgagaggcccatgccaacagtctaatctaagagattagtctttcaaactcaccatccagttgcctgttacagaataactcttcttaactaaaaacctagtcaaacaaggaagctgtaggtgaggagatctgtataatattctaatttaagtaagtttgagtttagtcactgcaaatttgactgtgactttaatctaaattactatgtaaacaaaaagtagatagtttcactttttaaaaaatccattactgttttgcatttcaaaagttggattaaagggttgtaactgactacagcatggaaaaaaatagttcttttaattctttcaccttaaagcatattttatgtctcaaaagtataaaaaactttaatacaagtacatacatattatatatacacatacatatatatactatatatggatgaaacatattttaatgttgtttacttttttaaatacttggttgatcttcaaggtaatagcgatacaattaaattttgttcagaaagtttgttttaaagtttattttaagcactatcgtaccaaatatttcatatttcacattttatatgttgcacatagcctatacagtacctacatagtttttaaattattgtttaaaaaacaaaacagctgttataaatgaatattatgtgtaattgtttcaaacatccattttctttgtgaacatattagtgattgaagtattttgacttttgagattgaatgtaaaatattttaaatttgggatcatcgcctgttctgaaaactagatgcaccaaccgtatcattatttgtttgaggaaaaaaagaaatctgcattttaattcatgttggtcaaagtcgaattactatctatttatcttatatcgtagatctgataaccctatctaaaagaaagtcacacgctaaatgtattcttacatagtgcttgtatcgttgcatttgttttaatttgtggaaaagtattgtatctaacttgtattactttggtagtttcatctttatgtattattgatatttgtaattttctcaactataacaatgtagttacgctacaacttgcctaaaacattcaaacttgttttcttttttctgtttttttctttgttaattcatttaaactcattgaaaacatagtatacattactaaaaggtaaattatgggaatcactgaaatattttgtagattaattgttgtaacattgtctttcttttttttctttgtgtttcatgattttgatttttaaaattattagcacacaactattttcagccctttaataatggagcatcaaaaacatcacctgtaaccccaagcaaatatagaagactgtattttttactatgatatccattttccagaattgtgattacaatatgcaaagagtcataaatatgccatttacaataaggaggaggcaaggcaaatgcatagatgtacaaatatatgtacaacagattttgctttttatttatttataatgtaattttatagaataattctgggatttgagaggatctaaaactatttttctgtataaatattatttgccaaaagtttgtttatattcagaagtctgactatgatgaataaatcttaaatgctttgtttaattaaaaaacaaaaatcaccaatatccaagacatgaagatatcagttcaacaaatactgtagttaagagactaactctccacttgtatgggaactacatttcactcttggttttcaggatataacagcacttcaccgaaatattctttcagccataccactggtaacatttctactaaatctttctgtaacacttaaagaattccctcattcattaccttacagtgtaaacaggagtctaatttgtatcaatactatgttttggttgtaatattcagttcactcacccaatgtacaaccaatgaaataaaagaagcatttaaaagga

SEQ ID NO: 351330 - DNA, 3604 bp, Homo sapiens
ggatttgtcggaaggaagggctgcagcttacagcaacagagtttagactgtctttgcttcatcatctgaaggtaaaattttccagatacggcagacggctttcagagtacaataaacagggaatgagaactatttacatggaagtttctttctcatgatgcggtggagaagcctcggccacttggttctgccagatgttcctggggttactgtaaatgggaaggacaggcagagctaaacaaggtttatcatttaaaagtgcctgtgtgaagtcacttttgctggaaaactgcagcttgggagctttctttgtattcacatcccactcttctgtcaagtacactttaccctgaccttatgagtggatgaagatacctcagttgtctgactttgccaattgcttaatttcagaatttaaaaaggggaaagaaaaacatcctgctaaaatatgaacatctgagtgtcttattttccaacatcgtcaatagctgtgagcgtcagcattaaatattctcccaaggagtgccatgatattgaagtcactttattaataacagctgtatctgcaaaacagtcaagagactcggacgttgaaagccagagatgacactgagcatgcttttattgcggcctaccatctttaagtgggacatattgattgatgagtgattgcctgtccatacactctctcatcatcctgttccttggattggacttcactaagcaatttatcactcaccttcagacttacatgtgggagttttcacaacagtagttttggaatcattagaacttggattgatttcatcatttaacagaaacaaacagcccaaattactttatcaccatggctttgaacgttgccccagtcagagatacaaaatggctgacattagaagtctgcagacagtttcaaagaggaacatgctcacgctctgatgaagaatgcaaatttgctcatccccccaaaagttgtcaggttgaaaatggaagagtaattgcctgctttgattccctaaagggccgttgttcgagagagaactgcaagtatcttcaccctccgacacacttaaaaactcaactagaaattaatggaaggaacaatttgattcagcaaaaaactgcagcagcaatgcttgcccagcagatgcaatttatgtttccaggaacaccacttcatccagtgcccactttccctgtaggtcccgcgatagggacaaatacggctattagctttgctccttacctagcacctgtaacccctggagttgggttggtcccaacggaaattctgcccaccacgcctgttattgttcccggaagtccaccggtcactgtcccgggctcaactgcaactcagaaacttctcaggactgacaaactggaggtatgcagggagttccagcgaggaaactgtgcccggggagagaccgactgccgctttgcacaccccgcagacagcaccatgatcgacacaagtgacaacaccgtaaccgtttgtatggattacataaaggggcgttgcatgagggagaaatgcaaatattttcaccctcctgcacacttgcaggccaaaatcaaagctgcgcagccgcggccgcggccacagtcatgactcagtcgactgccaaagcaatgaagcgacctctcgaagcaactgtagacctggcctttccccctggtgctcttcatcctttaccaaagagacaagcacttgaaaaaagcaatggtaccagcgcggtctttaaccccagcgtcttgcactaccagcaggctctcaccagcgcacagttgcagcaacacgccgcgttcattccaacagggtcagttttgtgcatgacacccgctaccagtattgtacccatgatgcacagcgctacgtccgccactgtctctgcagcaacaactcctgcaacaagtgtccccttcgcagcaacagccacagccaatcagataattctgaaataatcagcagaaacggaatggaatgccaagaatctgcattgagaataactaaacattgttactgtacatactatcctgtttcctcctcaatagaattgccacaaactgcatgctaaataaagatgtagttcttctggacagaccacaactctaagaagctagtgctgctatctcatatatgagtattaaatatggtatgcttagtatattccaacctaagatagttaactacctgagaccagctgtgatgtttaaagacataaaggataaagtttacttttaaagggtttctaaacatagtttctgtcctaggaatattgtcttatctccataactatagctgatgcagaaagtccagccagtttactcatttcgattcagaatatttcaaatttagcaataaacaattagcattagttaaaaaagaaacatattccaagggcaggttcgattctagctctaattactgtcatgtcatttacccactggatcaaagggtatgtttcacttcttgacaatataaatgctgcagcaaagatgagaggtgaagtaaaaccgatacctgtcctgcaggtctaaaatttgaatggaaattcaagcacaagtactggggacacatcaaagtgtggtgtttggtttgcctggagatgccacgttgaatcatgtgattctagattaacattaaatagattgaaaaagaaactttgcacggtatgagcttcataccccaccaaacaaagtcttgaaggtattattttacaagtatatttttaaagttgttttataagagagactttgtagaagtgcctagattttgccagacttcatccagcttgacaagattgagaggcccatgccaacagtctaatctaagagattagtctttcaaactcaccatccagttgcctgttacagaataactcttcttaactaaaaacctagtcaaacaaggaagctgtaggtgaggagatctgtataatattctaatttaagtaagtttgagtttagtcactgcaaatttgactgtgactttaatctaaattactatgtaaacaaaaagtagatagtttcactttttaaaaaatccattactgttttgcatttcaaaagttggattaaagggttgtaactgactacagcatggaaaaaaatagttcttttaattctttcaccttaaagcatattttatgtctcaaaagtataaaaaactttaatacaagtacatacatattatatatacacatacatatatatactatatatggatgaaacatattttaatgttgtttacttttttaaatacttggttgatcttcaaggtaatagcgatacaattaaattttgttcagaaagtttgttttaaagtttattttaagcactatcgtaccaaatatttcatatttcacattttatatgttgcacatagcctatacagtacctacatagtttttaaattattgtttaaaaaacaaaacagctgttataaatgaatattatgtgtaattgtttcaaacatccattttctttgtgaacatattagtgattgaagcaattacacataatattcatttaaaacagctgttataaatgaatattatgtgtaattgtttcaaacagctgttttgttttttaaacataa

SEQ ID NO: 351331 - DNA, 242 bp, Homo sapiens
taaactcaaacacacacaaagatacatgctaattaaactgtctaaaacaaagacaaggagaatcttgaaagcagcaagagaagtcactagtcatgaactaaagacccgcattgataatcagaggatttctttttttttttttttgagatggagttatgctctttctcccaggctagagtgcagtggtgcgatcttggctcactgcaaccttcgccttccggtttcaagtgattctcctgcct

SEQ ID NO: 351332 - DNA, 191 bp, Homo sapiens
gaccaactccatcagaactggccttctccctgtccaccaccctcactgatgtcccgaagtgtagcttcatttgggaagctttgtctgcaacagccatctgtctgtatattcactttccccaccctgttgcccagtactcttaggggtcttcttggccttttgagcctgttcttccaattggactgcaagct

SEQ ID NO: 351333 - DNA, 509 bp, Homo sapiens
gggtgaaagtggatcctcataaaggttttcatcactgtcatcttcactttgagtaggctgaggaagaagaggacagtcttgcttggtcttgctgtctcagaggtggcagaggtagtggaagtataatagaaggggaggcaggagagatttattgaaaaacaaagaaaattgcatccaagaactgtagtacaatatcaaatggtctgccattgaacaatgcagaggttaggggcaccaactccccacgcaattgaaaatctgcatataatttaactgctgattaactactgttgactggaaacctgacaaataacataacagtcagtacgtattttgtgtgttatatgtcttatatactgtattcttccaataaaataagctagagaaatgaaattaagaaagccaggaaaataaatattacataaaaatgaacaaagataagaatgaccataggaatcttgacaaaaactgtaagcccacagataaaagtgacacctttaaggtgctga

SEQ ID NO: 351334 - DNA, 184 bp, Homo sapiens
gtgagcttattggtgtctccagaaaagattcctccagtctttcagcagataggtggaaactataaagaatcaaatggagatgataaaaatttaaaacatgataaatctttgggcatatcaacagactagacatgcaaaagaatgcattagtgaacttaactgttggtgaatagaaattatccaa

SEQ ID NO: 351335 - DNA, 3021 bp, Homo sapiens
ggtttgactgggccgccgttgttgtagtgaccgggaggcgctgccgctctgggcagacggttccgggagccgcacggtcccctctccttccccatcctctcccctcccctctccgggttcccccacccacaggagccttgggccgaccactcccccgatggcctcagccacggaggaccccgttctggagcgttatttcaaaggccacaaagctgcgatcacctccttggacctcagccccaacggcaagcaacttgctactgcttcttgggatacctttctcatgctatggaatttcaagccacatgctagagcttacagatatgtgggtcacaaggatgttgtaaccagcgtgcagttttctccacatggaaacttattggcgtctgcctcacgagacagaaccgtgagactctggattcctgataagagaggaaaattctcagaatttaaagctcatacagctccagttcgaagtgtagacttttcagctgatggccagtttctagctacagcttctgaagacaaatccataaaagtatggagcatgtatcgccagcgcttcctgtattccttgtatcgacatacacactgggtacgctgtgccaaattttcacccgatggaagactaattgtgtcatgtagtgaggataaaactattaaaatttgggataccacaaataagcaatgtgttaataacttctcagattccgttggatttgcaaattttgtggactttaaccctagtggtacatgcatagcttcagcaggttctgatcaaactgtgaaagtctgggatgtaagagtgaacaaattactacagcattaccaagttcacagcggtggagttaattgcatatcattccatccttcgggtaactatctcatcacagcttcttcagatggtacccttaagattctggacctcttagaaggaaggctcatctatacacttcaaggacatacgggacctgtctttactgtttcattttcaaaaggtggagagctatttgcatcaggaggtgcagacacacaggtcttattatggaggactaactttgatgaattgcattgtaaaggtcttaccaaaagaaatctcaaaagattacattttgattcaccaccacatcttcttgatatctacccaagaacaccacatccccatgaggaaaaagttgagactgtagaaattaatccaaagcttgaggtaatcgatttgcagatctctactccccctgttatggatatcctttcttttgattctaccacaacaacagaaaccagtggtaggactctgccagacaagggtgaagaggcctgtggatatttcttgaacccttccttaatgtcaccagaatgtttgccaacaaccacgaaaaagaaaacagaagacatgagtgacctcccctgtgaaagtcaaaggagcatacctctcgctgtgactgatgctttagagcatattatggaacaactcaatgttttgacacagactgtttcaatcttggagcagcgactgactttgacagaggataagctgaaagactgccttgaaaatcagcaaaagcttttcagtgctgtccaacagaaaagctgaataaaaaattcattttcatttgttgggcagaggcccaataaatgaacaaatgtacatacactcaggaaggtagtacaagatactccatacaacacaaccatgtgctatttatcatggcatttcttaaaagggtgagcaacagaacaaaaggcagaaaaggcatacctaaggactaatttaaacacatatcaatgtgaaggactaatttaaattactatcatttatgattgcagtaataaagtgataagcattcaagcaactctgtattttccccatattattttaaatgtccattttcatttataggccaaatcctgccaggaaagtaaccagatctctggatttcactgttaagtcatttcagattgaccatattcagacagtcatggggtgaaataattcacttacctccaaaatagcatcctatatgccaataatgagttattgatctgactagttgtatgtctttctgttcaaaatagaaattatcctttcttactaatgccttgaaagaatgaacaaataaaaattcccagaccacagaatttccacagcaagaatacacttattttaattaacaatagcacagatatagcatagggcagtgggtttttagttaatttatggcgtactttgtttatccattggccaacctgaaggaaatgaaactcacctatctttctatcacagatgaatgtgctagatgaatgattgggttgtatctgatcatggttcacaaaaattatgttagtgtgttttcagtatgctaaaaagtcagagtgatacaaaagtgatatttaaaaatatacacacatgtatgtacacatgcttcagaaatattgttgcttagggtgatttgggcagctaaatagtaagtactttttaaaatttttgcatcatcatcttcctatttaatgaattgtgatttaaaacaaaatgaaaataagccaggtattctaaaagatcctggatacaaattaagaattttgctttattttaaaccaaattgagattaaattgaagaaaagcaagcaaattaatttcagcttgattatcaacctgtatcaagaacaaaaatgggaggaggtgtccacatttatggtgtgtataggtaacatggggaaaatgctattctgtgttttggaaaagaagaaatagtgccgtcctatttatttctatatttagaaatttttctcaaagaaatttcaattgtatctatgagatgggtttctaagtatcttattgtgtgttataagtgccttttaatatcatactaagtgtgagcttctggacattttcaagagcttacaaaaactaagtggcattgtatttttataaccccattgagaagactaagtaagaaatgaaatgtcctatcaattttattttgtcatgcttcaaacaataaagacatttctgctttaaaa

SEQ ID NO: 351336 - DNA, 3032 bp, Homo sapiens
aaaaaaaagtaccaaagccgaggcgcatcctcgcacctgcctgccttgggccagcgggcggggcccgggaacgtgcatttcaaaggggccgcggttcctgcgatgcgctggactctgggaagcgcgaacagagcgttttgcgggctctgcggggagagctggcgccggcgtctccctgtagcaggactgggcgccgcgcccgtgggtgggctgctgcccggccccgccgcccagccaagccgccgcctgggtggccattcccaagccggactccggggaagtggcagcgtggatcccagccgccagaattcgaggtctgcggcggctttcaaaacttgacaactttcctttccaggaggaccccgttctggagcgttatttcaaaggccacaaagctgcgatcacctccttggacctcagccccaacggcaagcaacttggagaggaaaattctcagaatttaaagctcatacagctccagttcgaagtgtagacttttcagctgatggccagtttctagctacagcttctgaagacaaatccataaaagtatggagcatgtatcgccagcgcttcctgtattccttgtatcgacatacacactgggtacgctgtgccaaattttcacccgatggaagactaattgtgtcatgtagtgaggataaaactattaaaatttgggataccacaaataagcaatgtgttaataacttctcagattccgttggatttgcaaattttgtggactttaaccctagtggtacatgcatagcttcagcaggttctgatcaaactgtgaaagtctgggatgtaagagtgaacaaattactacagcattaccaagttcacagcggtggagttaattgcatatcattccatccttcgggtaactatctcatcacagcttcttcagatggtacccttaagattctggacctcttagaaggaaggctcatctatacacttcaaggacatacgggacctgtctttactgtttcattttcaaaaggtggagagctatttgcatcaggaggtgcagacacacaggtcttattatggaggactaactttgatgaattgcattgtaaaggtcttaccaaaagaaatctcaaaagattacattttgattcaccaccacatcttcttgatatctacccaagaacaccacatccccatgaggaaaaagttgagactgtagaaattaatccaaagcttgaggtaatcgatttgcagatctctactccccctgttatggatatcctttcttttgattctaccacaacaacagaaaccagtggtaggactctgccagacaagggtgaagaggcctgtggatatttcttgaacccttccttaatgtcaccagaatgtttgccaacaaccacgaaaaagaaaacagaagacatgagtgacctcccctgtgaaagtcaaaggagcatacctctcgctgtgactgatgctttagagcatattatggaacaactcaatgttttgacacagactgtttcaatcttggagcagcgactgactttgacagaggataagctgaaagactgccttgaaaatcagcaaaagcttttcagtgctgtccaacagaaaagctgaataaaaaattcattttcatttgttgggcagaggcccaataaatgaacaaatgtacatacactcaggaaggtagtacaagatactccatacaacacaaccatgtgctatttatcatggcatttcttaaaagggtgagcaacagaacaaaaggcagaaaaggcatacctaaggactaatttaaacacatatcaatgtgaaggactaatttaaattactatcatttatgattgcagtaataaagtgataagcattcaagcaactctgtattttccccatattattttaaatgtccattttcatttataggccaaatcctgccaggaaagtaaccagatctctggatttcactgttaagtcatttcagattgaccatattcagacagtcatggggtgaaataattcacttacctccaaaatagcatcctatatgccaataatgagttattgatctgactagttgtatgtctttctgttcaaaatagaaattatcctttcttactaatgccttgaaagaatgaacaaataaaaattcccagaccacagaatttccacagcaagaatacacttattttaattaacaatagcacagatatagcatagggcagtgggtttttagttaatttatggcgtactttgtttatccattggccaacctgaaggaaatgaaactcacctatctttctatcacagatgaatgtgctagatgaatgattgggttgtatctgatcatggttcacaaaaattatgttagtgtgttttcagtatgctaaaaagtcagagtgatacaaaagtgatatttaaaaatatacacacatgtatgtacacatgcttcagaaatattgttgcttagggtgatttgggcagctaaatagtaagtactttttaaaatttttgcatcatcatcttcctatttaatgaattgtgatttaaaacaaaatgaaaataagccaggtattctaaaagatcctggatacaaattaagaattttgctttattttaaaccaaattgagattaaattgaagaaaagcaagcaaattaatttcagcttgattatcaacctgtatcaagaacaaaaatgggaggaggtgtccacatttatggtgtgtataggtaacatggggaaaatgctattctgtgttttggaaaagaagaaatagtgccgtcctatttatttctatatttagaaatttttctcaaagaaatttcaattgtatctatgagatgggtttctaagtatcttattgtgtgttataagtgccttttaatatcatactaagtgtgagcttctggacattttcaagagcttacaaaaactaagtggcattgtatttttataaccccattgagaagactaagtaagaaatgaaatgtcctatcaattttattttgtcatgcttcaaacaataaagacatttctgctttaaaa

SEQ ID NO: 351337 - DNA, 2422 bp, Homo sapiens
ggtttgactgggccgccgttgttgtagtgaccgggaggcgctgccgctctgggcagacggttccgggagccgcacggtcccctctccttccccatcctctcccctcccctctccgggttcccccacccacaggagccttgggccgaccactcccccgatggcctcagccacggaggaccccgttctggagcgttatttcaaaggccacaaagctgcgatcacctccttggacctcagccccaacggcaagcaacttggagaggaaaattctcagaatttaaagctcatacagctccagttcgaagtgtagacttttcagctgatggccagtttctagctacagcttctgaagacaaatccataaaagtatggagcatgtatcgccagcgcttcctgtattccttgtatcgacatacacactgggtacgctgtgccaagtcttattatggaggactaactttgatgaattgcattgtaaaggtcttaccaaaagaaatctcaaaagattacattttgattcaccaccacatcttcttgatatctacccaagaacaccacatccccatgaggaaaaagttgagactgtagaaattaatccaaagcttgaggtaatcgatttgcagatctctactccccctgttatggatatcctttcttttgattctaccacaacaacagaaaccagtggtaggactctgccagacaagggtgaagaggcctgtggatatttcttgaacccttccttaatgtcaccagaatgtttgccaacaaccacgaaaaagaaaacagaagacatgagtgacctcccctgtgaaagtcaaaggagcatacctctcgctgtgactgatgctttagagcatattatggaacaactcaatgttttgacacagactgtttcaatcttggagcagcgactgactttgacagaggataagctgaaagactgccttgaaaatcagcaaaagcttttcagtgctgtccaacagaaaagctgaataaaaaattcattttcatttgttgggcagaggcccaataaatgaacaaatgtacatacactcaggaaggtagtacaagatactccatacaacacaaccatgtgctatttatcatggcatttcttaaaagggtgagcaacagaacaaaaggcagaaaaggcatacctaaggactaatttaaacacatatcaatgtgaaggactaatttaaattactatcatttatgattgcagtaataaagtgataagcattcaagcaactctgtattttccccatattattttaaatgtccattttcatttataggccaaatcctgccaggaaagtaaccagatctctggatttcactgttaagtcatttcagattgaccatattcagacagtcatggggtgaaataattcacttacctccaaaatagcatcctatatgccaataatgagttattgatctgactagttgtatgtctttctgttcaaaatagaaattatcctttcttactaatgccttgaaagaatgaacaaataaaaattcccagaccacagaatttccacagcaagaatacacttattttaattaacaatagcacagatatagcatagggcagtgggtttttagttaatttatggcgtactttgtttatccattggccaacctgaaggaaatgaaactcacctatctttctatcacagatgaatgtgctagatgaatgattgggttgtatctgatcatggttcacaaaaattatgttagtgtgttttcagtatgctaaaaagtcagagtgatacaaaagtgatatttaaaaatatacacacatgtatgtacacatgcttcagaaatattgttgcttagggtgatttgggcagctaaatagtaagtactttttaaaatttttgcatcatcatcttcctatttaatgaattgtgatttaaaacaaaatgaaaataagccaggtattctaaaagatcctggatacaaattaagaattttgctttattttaaaccaaattgagattaaattgaagaaaagcaagcaaattaatttcagcttgattatcaacctgtatcaagaacaaaaatgggaggaggtgtccacatttatggtgtgtataggtaacatggggaaaatgctattctgtgttttggaaaagaagaaatagtgccgtcctatttatttctatatttagaaatttttctcaaagaaatttcaattgtatctatgagatgggtttctaagtatcttattgtgtgttataagtgccttttaatatcatactaagtgtgagcttctggacattttcaagagcttacaaaaactaagtggcattgtatttttataaccccattgagaagactaagtaagaaatgaaatgtcctatcaattttattttgtcatgcttcaaacaataaagacatttctgctttaaaa

SEQ ID NO: 351338 - DNA, 2546 bp, Homo sapiens
ctgcaagcttggtcggatgagtaataaaggctctctcttgaatcatatggataatgctggcaagtgacagaaatagaagagagttcttttaaaaatacaaggcacttggcttagaattttcacccgatggaagactaattgtgtcatgtagtgaggataaaactattaaaatttgggataccacaaataagcaatgtgttaataacttctcagattccgttggatttgcaaattttgtggactttaaccctagtggtacatgcatagcttcagcaggttctgatcaaactgtgaaagtctgggatgtaagagtgaacaaattactacagcattaccaagttcacagcggtggagttaattgcatatcattccatccttcgggtaactatctcatcacagcttcttcagatggtacccttaagattctggacctcttagaaggaaggctcatctatacacttcaaggacatacgggacctgtctttactgtttcattttcaaaaggtggagagctatttgcatcaggaggtgcagacacacaggtcttattatggaggactaactttgatgaattgcattgtaaaggtcttaccaaaagaaatctcaaaagattacattttgattcaccaccacatcttcttgatatctacccaagaacaccacatccccatgaggaaaaagttgagactgtagaagagttttttcttcatctttattaatccaaagcttgaggtaatcgatttgcagatctctactccccctgttatggatatcctttcttttgattctaccacaacaacagaaaccagtggtaggactctgccagacaagggtgaagaggcctgtggatatttcttgaacccttccttaatgtcaccagaatgtttgccaacaaccacgaaaaagaaaacagaagacatgagtgacctcccctgtgaaagtcaaaggagcatacctctcgctgtgactgatgctttagagcatattatggaacaactcaatgttttgacacagactgtttcaatcttggagcagcgactgactttgacagaggataagctgaaagactgccttgaaaatcagcaaaagcttttcagtgctgtccaacagaaaagctgaataaaaaattcattttcatttgttgggcagaggcccaataaatgaacaaatgtacatacactcaggaaggtagtacaagatactccatacaacacaaccatgtgctatttatcatggcatttcttaaaagggtgagcaacagaacaaaaggcagaaaaggcatacctaaggactaatttaaacacatatcaatgtgaaggactaatttaaattactatcatttatgattgcagtaataaagtgataagcattcaagcaactctgtattttccccatattattttaaatgtccattttcatttataggccaaatcctgccaggaaagtaaccagatctctggatttcactgttaagtcatttcagattgaccatattcagacagtcatggggtgaaataattcacttacctccaaaatagcatcctatatgccaataatgagttattgatctgactagttgtatgtctttctgttcaaaatagaaattatcctttcttactaatgccttgaaagaatgaacaaataaaaattcccagaccacagaatttccacagcaagaatacacttattttaattaacaatagcacagatatagcatagggcagtgggtttttagttaatttatggcgtactttgtttatccattggccaacctgaaggaaatgaaactcacctatctttctatcacagatgaatgtgctagatgaatgattgggttgtatctgatcatggttcacaaaaattatgttagtgtgttttcagtatgctaaaaagtcagagtgatacaaaagtgatatttaaaaatatacacacatgtatgtacacatgcttcagaaatattgttgcttagggtgatttgggcagctaaatagtaagtactttttaaaatttttgcatcatcatcttcctatttaatgaattgtgatttaaaacaaaatgaaaataagccaggtattctaaaagatcctggatacaaattaagaattttgctttattttaaaccaaattgagattaaattgaagaaaagcaagcaaattaatttcagcttgattatcaacctgtatcaagaacaaaaatgggaggaggtgtccacatttatggtgtgtataggtaacatggggaaaatgctattctgtgttttggaaaagaagaaatagtgccgtcctatttatttctatatttagaaatttttctcaaagaaatttcaattgtatctatgagatgggtttctaagtatcttattgtgtgttataagtgccttttaatatcatactaagtgtgagcttctggacattttcaagagcttacaaaaactaagtggcattgtatttttataaccccattgagaagactaagtaagaaatgaaatgtcctatcaattttattttgtcatgcttcaaacaataaagacatttctgctttaaaa

SEQ ID NO: 351339 - DNA, 3181 bp, Homo sapiens
ggtttgactgggccgccgttgttgtagtgaccgggaggcgctgccgctctgggcagacggttccgggagccgcacggtcccctctccttccccatcctctcccctcccctctccgggttcccccacccacaggagccttgggccgaccactcccccgatggcctcagccacggaggaccccgttctggagcgttatttcaaaggccacaaagctgcgatcacctccttggacctcagccccaacggcaagcaacttgctactgcttcttgggatacctttctcatgctatggaatttcaagccacatgctagagcttacagatatgtgggtcacaaggatgttgtaaccagcgtgcagttttctccacatggaaacttattggcgtctgcctcacgagacagaaccgtgagactctggattcctgataagagaggaaaattctcagaatttaaagctcatacagctccagttcgaagtgtagacttttcagctgatggccagtttctagctacagcttctgaagacaaatccataaaagtatggagcatgtatcgccagcgcttcctgtattccttgtatcgacatacacactgggtacgctgtgccaaattttcacccgatggaagactaattgtgtcatgtagtgaggataaaactattaaaatttgggataccacaaataagcaatgtgttaataacttctcagattccgttggatttgcaaattttgtggactttaaccctagtggtacatgcatagcttcagcaggttctgatcaaactgtgaaagtctgggatgtaagagtgaacaaattactacagcattaccaagttcacagcggtggagttaattgcatatcattccatccttcgggtaactatctcatcacagcttcttcagatggtacccttaagattctggacctcttagaaggaaggctcatctatacacttcaaggacatacgggacctgtctttactgtttcattttcaaaaggtggagagctatttgcatcaggaggtgcagacacacaggtcttattatggaggactaactttgatgaattgcattgtaaaggtcttaccaaaagaaatctcaaaagattacattttgattcaccaccacatcttcttgatatctacccaagaacaccacatccccatgaggaaaaagttgagactgtagaaattaatccaaagcttgaggtaatcgatttgcagatctctactccccctgttatggatatcctttcttttgattctaccacaacaacagaaaccagtggtaggactctgccagacaagggtgaagaggcctgtggatatttcttgaacccttccttaatgtcaccagaatgtttgccaacaaccacgaaaaagaaaacagaagacatgagtgacctcccctgtgaaagtcaaaggagcatacctctcgctgtgactgatgctttagagcatattatggaacaactcaatgttttgacacagactgtttcaatcttggagcagcgactgactttgacagaggataagctgaaagactgccttgaaaatcagcaaaagcttttcagtgctgtccaacagaaaagctgaataaaaaattcattttcatttgttgggcagaggcccaataaatgaacaaatgtacatacactcaggaaggtagtacaagatactccatacaacacaaccatgtgctatttatcatggcatttcttaaaagggtgagcaacagaacaaaaggcagaaaaggcatacctaaggactaatttaaacacatatcaatgtgaaggactaatttaaattactatcatttatgattgcagtaataaagtgataagcattcaagcaactctgtattttccccatattattttaaatgtccattttcatttataggccaaatcctgccaggaaagtaaccagatctctggatttcactgttaagtcatttcagattgaccatattcagacagtcatggggtgaaataattcacttacctccaaaatagcatcctatatgccaataatgagttattgatctgactagttgtatgtctttctgttcaaaatagaaattatcctttcttactaatgccttgaaagaatgaacaaataaaaattcccagaccacagaatttccacagcaagaatacacttattttaattaacaatagcacagatatagcatagggcagtgggtttttagttaatttatggcgtactttgtttatccattggccaacctgaaggaaatgaaactcacctatctttctatcacagatgaatgtgctagatgaatgattgggttgtatctgatcatggttcacaaaaattatgttagtgtgttttcagtatgctaaaaagtcagagtgatacaaaagtgatatttaaaaatatacacacatgtatgtacacatgcttcagaaatattgttgcttagggtgatttgggcagctaaatagtaagtactttttaaaatttttgcatcatcatcttcctatttaatgaattgtgatttaaaacaaaatgaaaataagccaggtattctaaaagatcctggatacaaattaagaattttgctttattttaaaccaaattgagattaaattgaagaaaagcaagcaaattaatttcagcttgattatcaacctgtatcaagaacaaaaatgggaggaggtgtccacatttatggtgtgtataggtaacatggggaaaatgctattctgtgttttggaaaagaagaaatagtgccgtcctatttatttctatatttagaaatttttctcaaagaaatttcaattgtatctatgagatgggtttctaagtatcttattgtgtgttataagtgccttttaatatcatactaagtgtgagcttctggacattttcaagagcttacaaaaactaagtggcattgtatttttataaccccattgagaagactaagtaagaaatgaaatgtcctatcaattttattttgtcatgcttcaaacaataaagacatttctgctttaaaaacaagattatgaaaaaaaaaaattgtgggggggcgggccaaaagagtttaaacaattgtgggggggcacctgttgagaggggagggccaagaaccgggtcgagggggctccaaaaaccgggggggtgtgcaacagggggggttggtcacaggacggtagg

SEQ ID NO: 351340 - DNA, 1055 bp, Homo sapiens
ggtttgactgggccgccgttgttgtagtgaccgggaggcgctgccgctctgggcagacggttccgggagccgcacggtcccctctccttccccatcctctcccctcccctctccgggttcccccacccacaggagccttgggccgaccactcccccgatggcctcagccacggaggaccccgttctggagcgttatttcaaaggccacaaagctgcgatcacctccttggacctcagccccaacggcaagcaacttgctactgcttcttgggatacctttctcatgctatggaatttcaagccacatgctagagcttacagatatgtgggtcacaaggatgttgtaaccagcgtgcagttttctccacatggaaacttattggcgtctgcctcacgagacagaaccgtgagactctggattcctgataagagaggaaaattctcagaatttaaagctcatacagctccagttcgaagtgtagacttttcagctgatggccagtttctagctacagcttctgaagacaaatccataaaagtatggagcatgtatcgccagcgcttcctgtattccttgtatcgacatacacactgggtacgctgtgccaaattttcacccgatggaagactaattgtgtcatgtagtgaggataaaactattaaaatttgggataccacaaataagcaatgtgttaataacttctcagattccgttggatttgcaaattttgtggactttaaccctagtggtacatgcatagcttcagcaggttctgatcaaactgtgaaagtctgggatgtaagagtgaacaaattactacagcattaccaaggtaacaattttcctaacaaaaaattcagttaccgaatggactccttttggaaggactgattctccttgttggtgtggtttggctgtcttacttggggtcatgggctgccttggaacaggctagagaatagtataattagctcccatcaacagcagggtctcagaagctcaaggacagcaggaagtgaagagaccttaaaaatgatgtgagggctggtttaaa

SEQ ID NO: 351341 - DNA, 3204 bp, Homo sapiens
aaaaaaaagtaccaaagccgaggcgcatcctcgcacctgcctgccttgggccagcgggcggggcccgggaacgtgcatttcaaaggggccgcggttcctgcgatgcgctggactctgggaagcgcgaacagagcgttttgcgggctctgcggggagagctggcgccggcgtctccctgtagcaggactgggcgccgcgcccgtgggtgggctgctgcccggccccgccgcccagccaagccgccgcctgggtggccattcccaagccggactccggggaagtggcagcgtggatcccagccgccagaattcgaggtctgcggcggctttcaaaacttgacaactttcctttccaggaggaccccgttctggagcgttatttcaaaggccacaaagctgcgatcacctccttggacctcagccccaacggcaagcaacttgctactgcttcttgggatacctttctcatgctatggaatttcaagccacatgctagagcttacagatatgtgggtcacaaggatgttgtaaccagcgtgcagttttctccacatggaaacttattggcgtctgcctcacgagacagaaccgtgagactctggattcctgataagagaggaaaattctcagaatttaaagctcatacagctccagttcgaagtgtagacttttcagctgatggccagtttctagctacagcttctgaagacaaatccataaaagtatggagcatgtatcgccagcgcttcctgtattccttgtatcgacatacacactgggtacgctgtgccaaattttcacccgatggaagactaattgtgtcatgtagtgaggataaaactattaaaatttgggataccacaaataagcaatgtgttaataacttctcagattccgttggatttgcaaattttgtggactttaaccctagtggtacatgcatagcttcagcaggttctgatcaaactgtgaaagtctgggatgtaagagtgaacaaattactacagcattaccaagttcacagcggtggagttaattgcatatcattccatccttcgggtaactatctcatcacagcttcttcagatggtacccttaagattctggacctcttagaaggaaggctcatctatacacttcaaggacatacgggacctgtctttactgtttcattttcaaaaggtggagagctatttgcatcaggaggtgcagacacacaggtcttattatggaggactaactttgatgaattgcattgtaaaggtcttaccaaaagaaatctcaaaagattacattttgattcaccaccacatcttcttgatatctacccaagaacaccacatccccatgaggaaaaagttgagactgtagaaattaatccaaagcttgaggtaatcgatttgcagatctctactccccctgttatggatatcctttcttttgattctaccacaacaacagaaaccagtggtaggactctgccagacaagggtgaagaggcctgtggatatttcttgaacccttccttaatgtcaccagaatgtttgccaacaaccacgaaaaagaaaacagaagacatgagtgacctcccctgtgaaagtcaaaggagcatacctctcgctgtgactgatgctttagagcatattatggaacaactcaatgttttgacacagactgtttcaatcttggagcagcgactgactttgacagaggataagctgaaagactgccttgaaaatcagcaaaagcttttcagtgctgtccaacagaaaagctgaataaaaaattcattttcatttgttgggcagaggcccaataaatgaacaaatgtacatacactcaggaaggtagtacaagatactccatacaacacaaccatgtgctatttatcatggcatttcttaaaagggtgagcaacagaacaaaaggcagaaaaggcatacctaaggactaatttaaacacatatcaatgtgaaggactaatttaaattactatcatttatgattgcagtaataaagtgataagcattcaagcaactctgtattttccccatattattttaaatgtccattttcatttataggccaaatcctgccaggaaagtaaccagatctctggatttcactgttaagtcatttcagattgaccatattcagacagtcatggggtgaaataattcacttacctccaaaatagcatcctatatgccaataatgagttattgatctgactagttgtatgtctttctgttcaaaatagaaattatcctttcttactaatgccttgaaagaatgaacaaataaaaattcccagaccacagaatttccacagcaagaatacacttattttaattaacaatagcacagatatagcatagggcagtgggtttttagttaatttatggcgtactttgtttatccattggccaacctgaaggaaatgaaactcacctatctttctatcacagatgaatgtgctagatgaatgattgggttgtatctgatcatggttcacaaaaattatgttagtgtgttttcagtatgctaaaaagtcagagtgatacaaaagtgatatttaaaaatatacacacatgtatgtacacatgcttcagaaatattgttgcttagggtgatttgggcagctaaatagtaagtactttttaaaatttttgcatcatcatcttcctatttaatgaattgtgatttaaaacaaaatgaaaataagccaggtattctaaaagatcctggatacaaattaagaattttgctttattttaaaccaaattgagattaaattgaagaaaagcaagcaaattaatttcagcttgattatcaacctgtatcaagaacaaaaatgggaggaggtgtccacatttatggtgtgtataggtaacatggggaaaatgctattctgtgttttggaaaagaagaaatagtgccgtcctatttatttctatatttagaaatttttctcaaagaaatttcaattgtatctatgagatgggtttctaagtatcttattgtgtgttataagtgccttttaatatcatactaagtgtgagcttctggacattttcaagagcttacaaaaactaagtggcattgtatttttataaccccattgagaagactaagtaagaaatgaaatgtcctatcaattttattttgtcatgcttcaaacaataaagacatttctgctttaaaa

SEQ ID NO: 351342 - DNA, 3040 bp, Homo sapiens
ggtttgactgggccgccgttgttgtagtgaccgggaggcgctgccgctctgggcagacggttccgggagccgcacggtcccctctccttccccatcctctcccctcccctctccgggttcccccacccacaggagccttgggccgaccactcccccgatggcctcagccacggaggaccccgttctggagcgttatttcaaaggccacaaagctgcgatcacctccttggacctcagccccaacggcaagcaacttgctactgcttcttgggatacctttctcatgctatggaatttcaagccacatgctagagcttacagatatgtgggtcacaaggatgttgtaaccagcgtgcagttttctccacatggaaacttattggcgtctgcctcacgagacagaaccgtgagactctggattcctgataagagaggaaaattctcagaatttaaagctcatacagctccagttcgaagtgtagacttttcagctgatggccagtttctagctacagcttctgaagacaaatccataaaagtatggagcatgtatcgccagcgcttcctgtattccttgtatcgacatacacactgggtacgctgtgccaaattttcacccgatggaagactaattgtgtcatgtagtgaggataaaactattaaaatttgggataccacaaataagcaatgtgttaataacttctcagattccgttggatttgcaaattttgtggactttaaccctagtggtacatgcatagcttcagcaggttctgatcaaactgtgaaagtctgggatgtaagagtgaacaaattactacagcattaccaagttcacagcggtggagttaattgcatatcattccatccttcgggtaactatctcatcacagcttcttcagatggtacccttaagattctggacctcttagaaggaaggctcatctatacacttcaaggacatacgggacctgtctttactgtttcattttcaaaaggtggagagctatttgcatcaggaggtgcagacacacaggtcttattatggaggactaactttgatgaattgcattgtaaaggtcttaccaaaagaaatctcaaaagattacattttgattcaccaccacatcttcttgatatctacccaagaacaccacatccccatgaggaaaaagttgagactgtagaagagttttttcttcatctttattaatccaaagcttgaggtaatcgatttgcagatctctactccccctgttatggatatcctttcttttgattctaccacaacaacagaaaccagtggtaggactctgccagacaagggtgaagaggcctgtggatatttcttgaacccttccttaatgtcaccagaatgtttgccaacaaccacgaaaaagaaaacagaagacatgagtgacctcccctgtgaaagtcaaaggagcatacctctcgctgtgactgatgctttagagcatattatggaacaactcaatgttttgacacagactgtttcaatcttggagcagcgactgactttgacagaggataagctgaaagactgccttgaaaatcagcaaaagcttttcagtgctgtccaacagaaaagctgaataaaaaattcattttcatttgttgggcagaggcccaataaatgaacaaatgtacatacactcaggaaggtagtacaagatactccatacaacacaaccatgtgctatttatcatggcatttcttaaaagggtgagcaacagaacaaaaggcagaaaaggcatacctaaggactaatttaaacacatatcaatgtgaaggactaatttaaattactatcatttatgattgcagtaataaagtgataagcattcaagcaactctgtattttccccatattattttaaatgtccattttcatttataggccaaatcctgccaggaaagtaaccagatctctggatttcactgttaagtcatttcagattgaccatattcagacagtcatggggtgaaataattcacttacctccaaaatagcatcctatatgccaataatgagttattgatctgactagttgtatgtctttctgttcaaaatagaaattatcctttcttactaatgccttgaaagaatgaacaaataaaaattcccagaccacagaatttccacagcaagaatacacttattttaattaacaatagcacagatatagcatagggcagtgggtttttagttaatttatggcgtactttgtttatccattggccaacctgaaggaaatgaaactcacctatctttctatcacagatgaatgtgctagatgaatgattgggttgtatctgatcatggttcacaaaaattatgttagtgtgttttcagtatgctaaaaagtcagagtgatacaaaagtgatatttaaaaatatacacacatgtatgtacacatgcttcagaaatattgttgcttagggtgatttgggcagctaaatagtaagtactttttaaaatttttgcatcatcatcttcctatttaatgaattgtgatttaaaacaaaatgaaaataagccaggtattctaaaagatcctggatacaaattaagaattttgctttattttaaaccaaattgagattaaattgaagaaaagcaagcaaattaatttcagcttgattatcaacctgtatcaagaacaaaaatgggaggaggtgtccacatttatggtgtgtataggtaacatggggaaaatgctattctgtgttttggaaaagaagaaatagtgccgtcctatttatttctatatttagaaatttttctcaaagaaatttcaattgtatctatgagatgggtttctaagtatcttattgtgtgttataagtgccttttaatatcatactaagtgtgagcttctggacattttcaagagcttacaaaaactaagtggcattgtatttttataaccccattgagaagactaagtaagaaatgaaatgtcctatcaattttattttgtcatgcttcaaacaataaagacatttctgctttaaaa

SEQ ID NO: 351343 - DNA, 2663 bp, Homo sapiens
ggtttgactgggccgccgttgttgtagtgaccgggaggcgctgccgctctgggcagacggttccgggagccgcacggtcccctctccttccccatcctctcccctcccctctccgggttcccccacccacaggagccttgggccgaccactcccccgatggcctcagccacggaggaccccgttctggagcgttatttcaaaggccacaaagctgcgatcacctccttggacctcagccccaacggcaagcaacttgctactgcttcttgggatacctttctcatgctatggaatttcaagccacatgctagagcttacagatatgtgggtcacaaggatgttgtaaccagcgtgcagttttctccacatggaaacttattggcgtctgcctcacgagacagaaccgtgagactctggattcctgataagagaggaaaattctcagaatttaaagctcatacagctccagttcgaagtgtagacttttcagctgatggccagtttctagctacagcttctgaagacaaatccataaaagtatggagcatgtatcgccagcgcttcctgtattccttgtatcgacatacacactgggtacgctgtgccaaggacctgtctttactgtttcattttcaaaaggtggagagctatttgcatcaggaggtgcagacacacaggtcttattatggaggactaactttgatgaattgcattgtaaaggtcttaccaaaagaaatctcaaaagattacattttgattcaccaccacatcttcttgatatctacccaagaacaccacatccccatgaggaaaaagttgagactgtagaaattaatccaaagcttgaggtaatcgatttgcagatctctactccccctgttatggatatcctttcttttgattctaccacaacaacagaaaccagtggtaggactctgccagacaagggtgaagaggcctgtggatatttcttgaacccttccttaatgtcaccagaatgtttgccaacaaccacgaaaaagaaaacagaagacatgagtgacctcccctgtgaaagtcaaaggagcatacctctcgctgtgactgatgctttagagcatattatggaacaactcaatgttttgacacagactgtttcaatcttggagcagcgactgactttgacagaggataagctgaaagactgccttgaaaatcagcaaaagcttttcagtgctgtccaacagaaaagctgaataaaaaattcattttcatttgttgggcagaggcccaataaatgaacaaatgtacatacactcaggaaggtagtacaagatactccatacaacacaaccatgtgctatttatcatggcatttcttaaaagggtgagcaacagaacaaaaggcagaaaaggcatacctaaggactaatttaaacacatatcaatgtgaaggactaatttaaattactatcatttatgattgcagtaataaagtgataagcattcaagcaactctgtattttccccatattattttaaatgtccattttcatttataggccaaatcctgccaggaaagtaaccagatctctggatttcactgttaagtcatttcagattgaccatattcagacagtcatggggtgaaataattcacttacctccaaaatagcatcctatatgccaataatgagttattgatctgactagttgtatgtctttctgttcaaaatagaaattatcctttcttactaatgccttgaaagaatgaacaaataaaaattcccagaccacagaatttccacagcaagaatacacttattttaattaacaatagcacagatatagcatagggcagtgggtttttagttaatttatggcgtactttgtttatccattggccaacctgaaggaaatgaaactcacctatctttctatcacagatgaatgtgctagatgaatgattgggttgtatctgatcatggttcacaaaaattatgttagtgtgttttcagtatgctaaaaagtcagagtgatacaaaagtgatatttaaaaatatacacacatgtatgtacacatgcttcagaaatattgttgcttagggtgatttgggcagctaaatagtaagtactttttaaaatttttgcatcatcatcttcctatttaatgaattgtgatttaaaacaaaatgaaaataagccaggtattctaaaagatcctggatacaaattaagaattttgctttattttaaaccaaattgagattaaattgaagaaaagcaagcaaattaatttcagcttgattatcaacctgtatcaagaacaaaaatgggaggaggtgtccacatttatggtgtgtataggtaacatggggaaaatgctattctgtgttttggaaaagaagaaatagtgccgtcctatttatttctatatttagaaatttttctcaaagaaatttcaattgtatctatgagatgggtttctaagtatcttattgtgtgttataagtgccttttaatatcatactaagtgtgagcttctggacattttcaagagcttacaaaaactaagtggcattgtatttttataaccccattgagaagactaagtaagaaatgaaatgtcctatcaattttattttgtcatgcttcaaacaataaagacatttctgctttaaaa

SEQ ID NO: 351344 - DNA, 1972 bp, Homo sapiens
gttaatggcaggaggctgtgtttgatttctgctttatgggacagccaggaagagataacggttttggctagctgagctgattgcccctcatccttaccatgcacagctttattccttctttactatagcattgcagttatatctcccctttaacacactggctggataattataaaatgattttactgtttctaaaactacagccatacccatcaagcatgacaacagaaaccagtggtaggactctgccagacaagggtgaagaggcctgtggatatttcttgaacccttccttaatgtcaccagaatgtttgccaacaaccacgaaaaagaaaacagaagacatgagtgacctcccctgtgaaagtcaaaggagcatacctctcgctgtgactgatgctttagagcatattatggaacaactcaatgttttgacacagactgtttcaatcttggagcagcgactgactttgacagaggataagctgaaagactgccttgaaaatcagcaaaagcttttcagtgctgtccaacagaaaagctgaataaaaaattcattttcatttgttgggcagaggcccaataaatgaacaaatgtacatacactcaggaaggtagtacaagatactccatacaacacaaccatgtgctatttatcatggcatttcttaaaagggtgagcaacagaacaaaaggcagaaaaggcatacctaaggactaatttaaacacatatcaatgtgaaggactaatttaaattactatcatttatgattgcagtaataaagtgataagcattcaagcaactctgtattttccccatattattttaaatgtccattttcatttataggccaaatcctgccaggaaagtaaccagatctctggatttcactgttaagtcatttcagattgaccatattcagacagtcatggggtgaaataattcacttacctccaaaatagcatcctatatgccaataatgagttattgatctgactagttgtatgtctttctgttcaaaatagaaattatcctttcttactaatgccttgaaagaatgaacaaataaaaattcccagaccacagaatttccacagcaagaatacacttattttaattaacaatagcacagatatagcatagggcagtgggtttttagttaatttatggcgtactttgtttatccattggccaacctgaaggaaatgaaactcacctatctttctatcacagatgaatgtgctagatgaatgattgggttgtatctgatcatggttcacaaaaattatgttagtgtgttttcagtatgctaaaaagtcagagtgatacaaaagtgatatttaaaaatatacacacatgtatgtacacatgcttcagaaatattgttgcttagggtgatttgggcagctaaatagtaagtactttttaaaatttttgcatcatcatcttcctatttaatgaattgtgatttaaaacaaaatgaaaataagccaggtattctaaaagatcctggatacaaattaagaattttgctttattttaaaccaaattgagattaaattgaagaaaagcaagcaaattaatttcagcttgattatcaacctgtatcaagaacaaaaatgggaggaggtgtccacatttatggtgtgtataggtaacatggggaaaatgctattctgtgttttggaaaagaagaaatagtgccgtcctatttatttctatatttagaaatttttctcaaagaaatttcaattgtatctatgagatgggtttctaagtatcttattgtgtgttataagtgccttttaatatcatactaagtgtgagcttctggacattttcaagagcttacaaaaactaagtggcattgtatttttataaccccattgagaagactaagtaagaaatgaaatgtcctatcaattttattttgtcatgcttcaaacaataaagacatttctgctttaaaa

SEQ ID NO: 351345 - DNA, 1788 bp, Homo sapiens
ggtttgactgggccgccgttgttgtagtgaccgggaggcgctgccgctctgggcagacggttccgggagccgcacggtcccctctccttccccatcctctcccctcccctctccgggttcccccacccacaggagccttgggccgaccactcccccgatggcctcagccacggaggaccccgttctggagcgttatttcaaaggccacaaagctgcgatcacctccttggacctcagccccaacggcaagcaacttgctactgcttcttgggatacctttctcatgctatggaatttcaagccacatgctagagcttacagatatgtgggtcacaaggatgttgtaaccagcgtgcagttttctccacatggaaacttattggcgtctgcctcacgagacagaaccgtgagactctggattcctgataagagaggaaaattctcagaatttaaagctcatacagctccagttcgaagtgtagacttttcagctgatggccagtttctagctacagcttctgaagacaaatccataaaagtatggagcatgtatcgccagcgcttcctgtattccttgtatcgacatacacactgggtacgctgtgccaaattttcacccgatggaagactaattgtgtcatgtagtgaggataaaactattaaaatttgggataccacaaataagcaatgtgttaataacttctcagattccgttggatttgcaaattttgtggactttaaccctagtggtacatgcatagcttcagcaggttctgatcaaactgtgaaagtctgggatgtaagagtgaacaaattactacagcattaccaagttcacagcggtggagttaattgcatatcattccatccttcgggtaactatctcatcacagcttcttcagatggtacccttaagattctggacctcttagaaggaaggctcatctatacacttcaaggacatacgggacctgtctttactgtttcattttcaaaaggtggagagctatttgcatcaggaggtgcagacacacaggtcttattatggaggactaactttgatgaattgcattgtaaaggtcttaccaaaagaaatctcaaaagattacattttgattcaccaccacatcttcttgatatctacccaagaacaccacatccccatgaggaaaaagttgagactgtagaaatcttttattaaagagccgtcatatgccgtgtttcctccataggaagtctttctcactgtctaagccaagcttgtccagcccacaggtcacatgctggctttgaatccagcccaacacaaattcgtaaactgtcttaaaacattatgagatatttttgcaatttttttttttttagctcatcagctatcattaatgttagtgtattttatgtgtggcccaagacaattcttccaatgtggcccagggaaagccaaagattggacactcctgataagcgctcagtcaatagtttcttctttaaggttcgttagtacacttattggtaccattcatttgatataaaactctgctatctttgttgctctttgtttacttctttgtattcataatgtttcaattttatttttaatttttatgtcttttcaaattctgaaatagcctccctcaaagttagtcaccactctaggtaatcattctgttgcttttctttgtaactttatatatttgaatctataattattgtttaattttgaatgagtttgaactttatgtaaatggaattatattgaatgtatattttccgtaacttactttttaa

SEQ ID NO: 351346 - DNA, 762 bp, Homo sapiens
gagagtggactgagcagccagtaggggagagagcagttaaggcacacagagcaccagctccctcctgcctgaagatgttccaccaaatttgggcagctctgctctacttctatggtattatccttaactccatctaccagtgccctgagcacagtcaactgacaactctgggcgtggatgggaaggagttcccagaggtccacttgggccagtggtactttatcgcaggggcagctcccaccaaggaggagttggcaacttttgaccctgtggacaacattgtcttcaatatggctgctggctctgccccgatgcagctccaccttcgtgctaccatccgcatgaaagatgggctctgtgtgccccggaaatggatctaccacctgactgaagggagcacagatctcagaactgaaggccgccctgacatgaagactgagctcttttccagctcatgcccaggtggaatcatgctgaatgagacaggccagggttaccagcgctttctcctctacaatcgctcaccacatcctcccgaaaagtgtgtggaggaattcaagtccctgacttcctgcctggactccaaagccttcttattgactcctaggaatcaagaggcctgtgagctgtccaataactgacctgtaacttcatctaagtccccagatgggtacaatgggagctgagttgttggagggagaagctggagacttccagctccagctcccactcaagataataaagataatttttcaatcctca

SEQ ID NO: 351347 - DNA, 702 bp, Homo sapiens
ctgccaccgacggccacttccgtttccccgatagtatttggggatctcgaagcgatacttccggctccccccaggtccccaagctttacttttgtggggcacgacgagaaagtccgcagccccaaacattcccagaggtccacttgggccagtggtactttatcgcaggggcagctcccaccaaggaggagttggcaacttttgaccctgtggacaacattgtcttcaatatggctgctggctctgccccgatgcagctccaccttcgtgctaccatccgcatgaaagatgggctctgtgtgccccggaaatggatctaccacctgactgaagggagcacagatctcagaactgaaggccgccctgacatgaagactgagctcttttccagctcatgcccaggtggaatcatgctgaatgagacaggccagggttaccagcgctttctcctctacaatcgctcaccacatcctcccgaaaagtgtgtggaggaattcaagtccctgacttcctgcctggactccaaagccttcttattgactcctaggaatcaagaggcctgtgagctgtccaataactgacctgtaacttcatctaagtccccagatgggtacaatgggagctgagttgttggagggagaagctggagacttccagctccagctcccactcaagataataaagataatttttcaatcctca

SEQ ID NO: 351348 - DNA, 975 bp, Homo sapiens
  misc_feature (769)..(769): n is a, c, g, or t
gagagtggactgagcagccagtaggggagagagcagttaaggcacacagagcaccagctccctcctgcctgaagatgttccaccaaatttgggcagctctgctctacttctatggtattatccttaactccatctaccagtgccctgagcacagtcaactgacaactctgggcgtggatgggaaggagttcccagaggtccacttgggccagtggtactttatcgcaggggcagctcccaccaaggaggagttggcaacttttgaccctgtggacaacattgtcttcaatatggctgctggctctgccccgatgcagctccaccttcgtgctaccatccgcatgaaagatgggctctgtgtgccccggaaatggatctaccacctgactgaagggagcacagatctcagaactgaaggccgccctgacatgaagactgagctcttttccagctcatgcccaggtggaatcatgctgaatgagacaggccagggttaccagcgctttctcctctacaatcgctcaccacatcctcccgaaaagtgtgtggaggaattcaagtccctgacttcctgcctggactccaaagccttcttattgactcctaggaatcaagaggcctgtgagctgtccaataactgacctgtaacttcatctaagtccccagatgggtacaatgggagctgagttgttggagggagaagctggagacttccagctccagctcccactcaagataataaagataatttttcaatcctcaaaaaaanaaaacaaaaaaaacaacacgagaagaacaacagcaagagaaaagaaacaagaaagacaaatgggagacatgaatagacgaagagaaaaaaaagaagttatagagagatagaacaagaagtaagacgccgagtattttagaagacgtgaaaaaaagaggagcaacatagggaggaggaataatagacaaagagagagcgaataaagc

SEQ ID NO: 351349 - DNA, 915 bp, Homo sapiens
  misc_feature (709)..(709): n is a, c, g, or t
ctgccaccgacggccacttccgtttccccgatagtatttggggatctcgaagcgatacttccggctccccccaggtccccaagctttacttttgtggggcacgacgagaaagtccgcagccccaaacattcccagaggtccacttgggccagtggtactttatcgcaggggcagctcccaccaaggaggagttggcaacttttgaccctgtggacaacattgtcttcaatatggctgctggctctgccccgatgcagctccaccttcgtgctaccatccgcatgaaagatgggctctgtgtgccccggaaatggatctaccacctgactgaagggagcacagatctcagaactgaaggccgccctgacatgaagactgagctcttttccagctcatgcccaggtggaatcatgctgaatgagacaggccagggttaccagcgctttctcctctacaatcgctcaccacatcctcccgaaaagtgtgtggaggaattcaagtccctgacttcctgcctggactccaaagccttcttattgactcctaggaatcaagaggcctgtgagctgtccaataactgacctgtaacttcatctaagtccccagatgggtacaatgggagctgagttgttggagggagaagctggagacttccagctccagctcccactcaagataataaagataatttttcaatcctcaaaaaaanaaaacaaaaaaaacaacacgagaagaacaacagcaagagaaaagaaacaagaaagacaaatgggagacatgaatagacgaagagaaaaaaaagaagttatagagagatagaacaagaagtaagacgccgagtattttagaagacgtgaaaaaaagaggagcaacatagggaggaggaataatagacaaagagagagcgaataaagc

SEQ ID NO: 351350 - DNA, 1101 bp, Homo sapiens
gagagtggactgagcagccagtaggggagagagcagttaaggcacacagagcaccagctccctcctgcctgaagatgttccaccaaatttgggcagctctgctctacttctatggtattatccttaactccatctaccagtgccctgagcacagtcaactgacaactctgggcgtggatgggaaggagttcccagaggtccacttgggccagtggtactttatcgcaggggcagctcccaccaaggaggagttggcaacttttgaccctgtggacaacattgtcttcaatatggctgctggctctgccccgatgcagctccaccttcgtgctaccatccgcatgaaagatgggctctgtgtgccccggaaatggatctaccacctgactgaagggagcacagatctcagaactgaaggccgccctgacatgaagactgagctcttttccagctcatgcccaggtggaatcatgctgaatgagacaggccagggttaccagcgctttctcctctacaatcgctcaccacatcctcccgaaaagtgtgtggaggaattcaagtccctgacttcctgcctggactccaaagccttcttattgactcctaggaatcaaggtaaggggttaaaatctcataaaacaggattaggactcaccaagtcttctggtgttacagggtgaaagaggctcgtgtgatgtcaccagagggatgtggctaagagctgtgatgtcacctgagggaggcaggatgggttctgggctactcaaaagagaggtttctgagtttgcactggataaagggggcagagggtcatacgtggagggaaaagagccttagagactcccctttgacacagggaatgaaagaacacgttctcccccaccccattactatcaactttgcttttctccctggacttcccttctgtccttctttttccctccccccatcacaaggcctgtgagctgtccaataactgacctgtaacttcatctaagtccccagatgggtacaatgggagctgagttgttggagggagaagctggagacttccagctccagctcccactcaagataataaagataatttttcaatcctca

SEQ ID NO: 351351 - DNA, 1041 bp, Homo sapiens
ctgccaccgacggccacttccgtttccccgatagtatttggggatctcgaagcgatacttccggctccccccaggtccccaagctttacttttgtggggcacgacgagaaagtccgcagccccaaacattcccagaggtccacttgggccagtggtactttatcgcaggggcagctcccaccaaggaggagttggcaacttttgaccctgtggacaacattgtcttcaatatggctgctggctctgccccgatgcagctccaccttcgtgctaccatccgcatgaaagatgggctctgtgtgccccggaaatggatctaccacctgactgaagggagcacagatctcagaactgaaggccgccctgacatgaagactgagctcttttccagctcatgcccaggtggaatcatgctgaatgagacaggccagggttaccagcgctttctcctctacaatcgctcaccacatcctcccgaaaagtgtgtggaggaattcaagtccctgacttcctgcctggactccaaagccttcttattgactcctaggaatcaaggtaaggggttaaaatctcataaaacaggattaggactcaccaagtcttctggtgttacagggtgaaagaggctcgtgtgatgtcaccagagggatgtggctaagagctgtgatgtcacctgagggaggcaggatgggttctgggctactcaaaagagaggtttctgagtttgcactggataaagggggcagagggtcatacgtggagggaaaagagccttagagactcccctttgacacagggaatgaaagaacacgttctcccccaccccattactatcaactttgcttttctccctggacttcccttctgtccttctttttccctccccccatcacaaggcctgtgagctgtccaataactgacctgtaacttcatctaagtccccagatgggtacaatgggagctgagttgttggagggagaagctggagacttccagctccagctcccactcaagataataaagataatttttcaatcctca

SEQ ID NO: 351352 - DNA, 373 bp, Homo sapiens
gccagggttaccagcgctttctcctctacagtgagtagggatacaaggcaggaagggttggagggaaacaagggagggcaggagaactcctcactctgggtcctatgacaccctcccaggaagagctaggtgcttccaggggttttgactggcctgaccccaccttgcccttccagatcgctcaccacatcctcccgaaaagtgtgtggaggaattcaagtccctgacttcctgcctggactccaaagccttcttattgactcctaggaatcaaggtaaggggttaaaatctcataaaacaggattaggactcaccaagtcttctggtgttacagggtgaaagaggctcgtgtgatgtcaccagagggatgtg

SEQ ID NO: 351353 - DNA, 815 bp, Homo sapiens
gagagtggactgagcagccagtaggggagagagcagttaaggcacacagagcaccagctccctcctgcctgaagatgttccaccaaatttgggcagctctgctctacttctatggtattatccttaactccatctaccagtgccctgagcacagtcaactgacaactctgggcgtggatgggaaggagttcccagaggtccacttgggccagtggtactttatcgcaggggcagctcccaccaaggaggagttggcaacttttgaccctgtggacaacattgtcttcaatatggctgctggctctgccccgatgcagctccaccttcgtgctaccatccgcatgaaagatgggctctgtgtgccccggaaatggatctaccacctgactgaagggagcacagatctcagaactgaaggccgccctgacatgaagactgagctcttttccagctcatgcccaggtggaatcatgctgaatgagacaggccagggttaccagcgctttctcctctacaatcgctcaccacatcctcccgaaaagtgtgtggaggaattcaagtccctgacttcctgcctggactccaaagccttcttattgactcctaggaatcaagaggcctgtgagctgtccaataactgacctgtaacttcatctaagtccccagatgggtacaatgggagctgagttgttggagggagaagctggagacttccagctccagctcccactcaagataataaagataatttttcaatcctcaaataaaaaaatcgaactgcagataacgcttggagcagcccgtggccccaaaac

SEQ ID NO: 351354 - DNA, 654 bp, Homo sapiens
cgcagttaggggacaagaagccccggctcctcttgcctaaaaatgtcccacaaattggggcagctttgttcacttctattttcccagaggtccacttgggccagtggtactttatcgcaggggcagctcccaccaaggaggagttggcaacttttgaccctgtggacaacattgtcttcaatatggctgctggctctgccccgatgcagctccaccttcgtgctaccatccgcatgaaagatgggctctgtgtgccccggaaatggatctaccacctgactgaagggagcacagatctcagaactgaaggccgccctgacatgaagactgagctcttttccagctcatgcccaggtggaatcatgctgaatgagacaggccagggttaccagcgctttctcctctacaatcgctcaccacatcctcccgaaaagtgtgtggaggaattcaagtccctgacttcctgcctggactccaaagccttcttattgactcctaggaatcaagaggcctgtgagctgtccaataactgacctgtaacttcatctaagtccccagatgggtacaatgggagctgagttgttggagggagaagctggagacttccagctccagctcccactcaagataataaagataatttttcaatcctca

SEQ ID NO: 351355 - DNA, 759 bp, Homo sapiens
gagagtggactgagcagccagtaggggagagagcagttaaggcacacagagcaccagctccctcctgcctgaagatgttccaccaaatttgggcagctctgctctacttctatggtattatccttaactccatctaccagtgccctgagcacagtcaactgacaactctgggcgtggatgggaaggagttcccagaggtccacttgggccagtggtactttatcgcaggggcagctcccaccaaggaggagttggcaacttttgaccctgtggacaacattgtcttcaatatggctgctggctctgccccgatgcagctccaccttcgtgctaccatccgcatgaaagatgggctctgtgtgccccggaaatggatctaccacctgactgaagggagcacagatctcagaactgaaggccgccctgacatgaagactgagctcttttccagctcatgcccaggtggaatcatgctgaatgagacaggccagggttaccagcgctttctcctctacaatcgctcaccacatcctcccgtcttattgactcctaggaatcaaggcctgtgagctgtccaataactgacctgtaacttcatctaagtccccagatgggtacaatgggagctgagttgttggagggagaagctggagacttccagctccagctcccactcaagataataaagataatttttcaatcctcaaataaaaaaatcgaactgcagataacgcttggagcagcccgtggccccaaaac

SEQ ID NO: 351356 - DNA, 5157 bp, Homo sapiens
acgggaacggaagtgtggcggcgttgggttgagcgggctttttggaagtttgtggcggagttctgtgatatgagcaacaatggaccagaagattttatctctagcagcagaaaaaacagcagacaaactgcaagaatttcttcaaaccctgagagaaggtgatttgactaatctccttcagaatcaagcagtgaaaggaaaagttgctggagcactcctgagagccatcttcaaaggttccccctgctctgaggaagctggaacacttaggagacgtaagatatacacttgttgtatccagttggtggaatcgggggatttgcagaaagaaatagcgtctgagatcataggattactgatgctggaggctcaccattttccaggaccattattggttgaattagccaatgagtttattagtgctgtcagagaaggcagcctagtgaatggaaaatctttggagttactacctatcattctcactgccctggctacgaaaaaggaaaatctggcttatggaaaaggtgtactgagtggggaagaatgtaagaaacagttgattaacaccctgtgttctggcaggtgggatcagcaatatgtaatccaactcacctccatgttcaaggatgtccctctgactgcagaagaggtggaatttgtggtggaaaaagcattgagcatgttctccaagatgaatcttcaagaaataccacctttggtctatcagcttctggttctctcctccaagggaagcagaaagagtgttttggaaggaatcatagccttcttcagtgcactagataagcagcacaatgaggaacagagtggtgacgagctattggatgttgtcactgtgccatcaggtgaacttcgtcatgtggaaggcaccattattctacacattgtgtttgccatcaaattggactatgaactaggcagagaactcgtgaaacacttaaaggtaggacagcaaggagattccaataataacttaagtcccttcagcattgctcttcttctgtctgtaacaagaatacaaagatttcaggaccaggtgcttgatcttttaaagacttcggttgtaaagagctttaaggatcttcaactcctccaaggctcaaaatttcttcagaatctagttcctcatagatcttatgtttcaaccatgatcttggaagtagtgaagaatagcgttcatagctgggaccatgttactcagggcctcgtagaacttggtttcattttgatggattcatatgggccaaagaaggttcttgatggaaaaactattgaaaccagcccaagtctttctagaatgccaaaccagcatgcatgtaagctcggagctaatatcctgttggaaacttttaagatccatgagatgatcagacaagaaattttggagcaggtcctcaacagggttgttaccagagcatcttctcccatcagtcatttcttagacctgctttcaaatatcgtcatgtatgcacccttagttcttcaaagttgttcttctaaagtcacagaagcttttgactatttgtcctttctgccccttcagactgtacaaaggctgcttaaggcagtgcagccccttctcaaagtcagcatgtcaatgagagactgcttgatacttgtccttcggaaagctatgtttgccaaccagcttgatgcccgaaaatctgcagttgctgggtttttgctgctcctgaagaactttaaagttttaggcagcctgtcatcctctcagtgcagtcagtctctcagtgtcagtcaggttcatgtggatgttcacagccattacaattctgtcgccaatgaaactttttgccttgagatcatggatagtttgaggagatgcttaagccagcaagctgatgttcgactcatgctttatgaggggttttatgatgttcttcgaaggaactctcagctggctaattcagtcatgcaaactctgctctcacagttaaaacagttctatgagccaaaacctgatctgctgcctcctctgaaattagaagcttgtattctgacccaaggagataagatctctctacaagaaccactggattatctgctgtgttgtattcagcattgtttggcctggtataagaatacagtcatacccttacagcagggagaggaggaagaggaggaggaagaggcattctacgaagacctagatgatatattggagtccattactaatagaatgattaagagtgagctggaagactttgaactggataaatcagcagatttttctcagagcaccagtattggcataaaaaataatatctgtgcttttcttgtgatgggagtttgtgaggttttaatagaatacaatttctccataagtagtttcagtaagaataggtttgaggacattctgagcttatttatgtgttacaaaaaactctctgacattcttaatgaaaaagcgggtaaagccaaaactaaaatggccaacaagacaagtgatagtcttttgtccatgaaatttgtgtccagtcttctcactgctcttttcagagtcttgctatggagatacacttcaattcctacttcagtggaagagtcgggaaagaaagagaaaggaaagagcatctcactgctgtgcttggagggtttacagaaaatattcagtgctgtgcaacagttctatcagcccaagattcagcagtttctcagagctctggatgtcacagataaggaaggagaagagagagaagatgcagatgtcagtgtcactcagagaacagcattccagatccggcaatttcagaggtccttgttgaatttacttagcagtcaagaggaagattttaatagcaaagaagccctcctgctagtcacggttcttaccagtttgtccaagttactggagccctcctctcctcagtttgtgcagatgttatcctggacatcaaagatttgcaaggaaaacagccgggaggatgccttgttttgcaagagcttgatgaacttgctcttcagcctgcatgtttcgtataagagtcctgtcattctgctgcgtgacttgtcccaggatatccacgggcatctgggagatatagaccaggatgtagaggtggagaaaacaaaccactttgcaatagtgaatttgagaacggctgcccccactgtctgtttacttgttctgagtcaggccgagaaggttctagaagaagtggactggctaatcaccaagcttaagggacaagtgagccaagaaaccttatcagaagaggcctcttctcaggcaaccctaccaaatcagcctgttgagaaagctatcatcatgcaactgggaactctgcttacatttttccacgagctggtgcagacagctctgccatcaggcagctgtgtggacaccttgttaaaggacttgtgcaaaatgtacaccacacttacagcccttgtcagatattatctccaggtgtgtcagagctccggaggaattccaaaaaatatggaaaagctggtgaagctgtctggttctcatctgacccccctgtgttattctttcatttcttacgtacagaataagagtaagagcctgaactatacgggagagaaaaaggagaaacctgctgccgttgccacagccatggccagagttcttcgggaaaccaagccaatccctaacctcatctttgccatagaacagtatgaaaaatttctcatccacctttctaagaagtccaaggtgaacctgatgcagcacatgaagctcagcacctcacgagacttcaagatcaaaggaaacatcctagacatggttcttcgagaggatggtgaagatgaaaatgaagagggcactgcatcagagcatgggggacagaacaaagaaccagccaagaagaaaaggaaaaaataaatgaaatgcctgagttaatgtgaactttggggcttctgcttcatttttacccaacaagcaacaatgccccttgtcctgtagtccacaccgatgttggcatcttggttctgaacccactgaattcaactgcaccttcagttagaaggaatcttcttggcaggtcctgctactgaaaaatggctggccttaggcaagcccttttgcaaaaagcacagctgaaagcctgagtttgggagcctgcacccaccccgatgaagctccacgggagcaaatacagagcctccaggcagtgctatggtccaggctggcttcgtttttccaaggagcctttggtgagttcaattatctggtaaatatccagcgcttcacctgaaagatagtgcaaattggttaggatgccacctcaagaactgtaactgagagctcagaagtgagcaaaggagcttaatgctaaggtcaaaaggagagtgaaaggttgagaacaattgccacgaacggtaatgttacatgttaggagggtctgttttctttttatataagtgtgtcttagatatattttaaatagaaaataagctttctgatttacttgtttggtatttaaagcacagtttgtttttctgtcacctatagagtgcaagaatgcactctatagaataaattctctttaaacatttcttctgtggttgaagtaggggacaggtacaggtagaatatttgaagctctgctgccttcatttttgaaacatcatatcacattcactctggacacagggcaccttataaactgaaattagcctagaatatagcctgagtcaagagtggattctctggggccccaagtttcctgttctccaagacccactttctagtccacctcagatcctatgtgtaatgaggaacaaatgtgttgtgctcaccctggggaatcccgtatctcctttccatcccagttgggttggaaggggttttacaatccatggtcacttccttcctgaggcaccggtcaatatcgactgcactgaaaaaggcgactgactggggcaagtcattcagacccagcttgtaggcaaacatgcacctgaaagagacccaatctactctcacagtcatgcccctcctgtgaacagatgcatcactcctggagcaatgaccccaacaccccttagagcagggcttcccctggaccaacaccccatctgttcacttagctaagtcaagaaaggtgaaggtccagcactgtttccatccagcagcctaacctcccactgaga

SEQ ID NO: 351357 - DNA, 5275 bp, Homo sapiens
acgggaacggaagtgtggcggcgttgggttgagcgggctttttggaagtttgtggcggaggtgaggccgaggtgactgcagagcggctcgcgagggttttggactgataaagcaatggaagccactgaagagctttaagatgaggatggcatggagggaagataagtcacataatcagttctgtgatatgagcaacaatggaccagaagattttatctctagcagcagaaaaaacagcagacaaactgcaagaatttcttcaaaccctgagagaaggtgatttgactaatctccttcagaatcaagcagtgaaaggaaaagttgctggagcactcctgagagccatcttcaaaggttccccctgctctgaggaagctggaacacttaggagacgtaagatatacacttgttgtatccagttggtggaatcgggggatttgcagaaagaaatagcgtctgagatcataggattactgatgctggaggctcaccattttccaggaccattattggttgaattagccaatgagtttattagtgctgtcagagaaggcagcctagtgaatggaaaatctttggagttactacctatcattctcactgccctggctacgaaaaaggaaaatctggcttatggaaaaggtgtactgagtggggaagaatgtaagaaacagttgattaacaccctgtgttctggcaggtgggatcagcaatatgtaatccaactcacctccatgttcaaggatgtccctctgactgcagaagaggtggaatttgtggtggaaaaagcattgagcatgttctccaagatgaatcttcaagaaataccacctttggtctatcagcttctggttctctcctccaagggaagcagaaagagtgttttggaaggaatcatagccttcttcagtgcactagataagcagcacaatgaggaacagagtggtgacgagctattggatgttgtcactgtgccatcaggtgaacttcgtcatgtggaaggcaccattattctacacattgtgtttgccatcaaattggactatgaactaggcagagaactcgtgaaacacttaaaggtaggacagcaaggagattccaataataacttaagtcccttcagcattgctcttcttctgtctgtaacaagaatacaaagatttcaggaccaggtgcttgatcttttaaagacttcggttgtaaagagctttaaggatcttcaactcctccaaggctcaaaatttcttcagaatctagttcctcatagatcttatgtttcaaccatgatcttggaagtagtgaagaatagcgttcatagctgggaccatgttactcagggcctcgtagaacttggtttcattttgatggattcatatgggccaaagaaggttcttgatggaaaaactattgaaaccagcccaagtctttctagaatgccaaaccagcatgcatgtaagctcggagctaatatcctgttggaaacttttaagatccatgagatgatcagacaagaaattttggagcaggtcctcaacagggttgttaccagagcatcttctcccatcagtcatttcttagacctgctttcaaatatcgtcatgtatgcacccttagttcttcaaagttgttcttctaaagtcacagaagcttttgactatttgtcctttctgccccttcagactgtacaaaggctgcttaaggcagtgcagccccttctcaaagtcagcatgtcaatgagagactgcttgatacttgtccttcggaaagctatgtttgccaaccagcttgatgcccgaaaatctgcagttgctgggtttttgctgctcctgaagaactttaaagttttaggcagcctgtcatcctctcagtgcagtcagtctctcagtgtcagtcaggttcatgtggatgttcacagccattacaattctgtcgccaatgaaactttttgccttgagatcatggatagtttgaggagatgcttaagccagcaagctgatgttcgactcatgctttatgaggggttttatgatgttcttcgaaggaactctcagctggctaattcagtcatgcaaactctgctctcacagttaaaacagttctatgagccaaaacctgatctgctgcctcctctgaaattagaagcttgtattctgacccaaggagataagatctctctacaagaaccactggattatctgctgtgttgtattcagcattgtttggcctggtataagaatacagtcatacccttacagcagggagaggaggaagaggaggaggaagaggcattctacgaagacctagatgatatattggagtccattactaatagaatgattaagagtgagctggaagactttgaactggataaatcagcagatttttctcagagcaccagtattggcataaaaaataatatctgtgcttttcttgtgatgggagtttgtgaggttttaatagaatacaatttctccataagtagtttcagtaagaataggtttgaggacattctgagcttatttatgtgttacaaaaaactctctgacattcttaatgaaaaagcgggtaaagccaaaactaaaatggccaacaagacaagtgatagtcttttgtccatgaaatttgtgtccagtcttctcactgctcttttcagagtcttgctatggagatacacttcaattcctacttcagtggaagagtcgggaaagaaagagaaaggaaagagcatctcactgctgtgcttggagggtttacagaaaatattcagtgctgtgcaacagttctatcagcccaagattcagcagtttctcagagctctggatgtcacagataaggaaggagaagagagagaagatgcagatgtcagtgtcactcagagaacagcattccagatccggcaatttcagaggtccttgttgaatttacttagcagtcaagaggaagattttaatagcaaagaagccctcctgctagtcacggttcttaccagtttgtccaagttactggagccctcctctcctcagtttgtgcagatgttatcctggacatcaaagatttgcaaggaaaacagccgggaggatgccttgttttgcaagagcttgatgaacttgctcttcagcctgcatgtttcgtataagagtcctgtcattctgctgcgtgacttgtcccaggatatccacgggcatctgggagatatagaccaggatgtagaggtggagaaaacaaaccactttgcaatagtgaatttgagaacggctgcccccactgtctgtttacttgttctgagtcaggccgagaaggttctagaagaagtggactggctaatcaccaagcttaagggacaagtgagccaagaaaccttatcagaagaggcctcttctcaggcaaccctaccaaatcagcctgttgagaaagctatcatcatgcaactgggaactctgcttacatttttccacgagctggtgcagacagctctgccatcaggcagctgtgtggacaccttgttaaaggacttgtgcaaaatgtacaccacacttacagcccttgtcagatattatctccaggtgtgtcagagctccggaggaattccaaaaaatatggaaaagctggtgaagctgtctggttctcatctgacccccctgtgttattctttcatttcttacgtacagaataagagtaagagcctgaactatacgggagagaaaaaggagaaacctgctgccgttgccacagccatggccagagttcttcgggaaaccaagccaatccctaacctcatctttgccatagaacagtatgaaaaatttctcatccacctttctaagaagtccaaggtgaacctgatgcagcacatgaagctcagcacctcacgagacttcaagatcaaaggaaacatcctagacatggttcttcgagaggatggtgaagatgaaaatgaagagggcactgcatcagagcatgggggacagaacaaagaaccagccaagaagaaaaggaaaaaataaatgaaatgcctgagttaatgtgaactttggggcttctgcttcatttttacccaacaagcaacaatgccccttgtcctgtagtccacaccgatgttggcatcttggttctgaacccactgaattcaactgcaccttcagttagaaggaatcttcttggcaggtcctgctactgaaaaatggctggccttaggcaagcccttttgcaaaaagcacagctgaaagcctgagtttgggagcctgcacccaccccgatgaagctccacgggagcaaatacagagcctccaggcagtgctatggtccaggctggcttcgtttttccaaggagcctttggtgagttcaattatctggtaaatatccagcgcttcacctgaaagatagtgcaaattggttaggatgccacctcaagaactgtaactgagagctcagaagtgagcaaaggagcttaatgctaaggtcaaaaggagagtgaaaggttgagaacaattgccacgaacggtaatgttacatgttaggagggtctgttttctttttatataagtgtgtcttagatatattttaaatagaaaataagctttctgatttacttgtttggtatttaaagcacagtttgtttttctgtcacctatagagtgcaagaatgcactctatagaataaattctctttaaacatttcttctgtggttgaagtaggggacaggtacaggtagaatatttgaagctctgctgccttcatttttgaaacatcatatcacattcactctggacacagggcaccttataaactgaaattagcctagaatatagcctgagtcaagagtggattctctggggccccaagtttcctgttctccaagacccactttctagtccacctcagatcctatgtgtaatgaggaacaaatgtgttgtgctcaccctggggaatcccgtatctcctttccatcccagttgggttggaaggggttttacaatccatggtcacttccttcctgaggcaccggtcaatatcgactgcactgaaaaaggcgactgactggggcaagtcattcagacccagcttgtaggcaaacatgcacctgaaagagacccaatctactctcacagtcatgcccctcctgtgaacagatgcatcactcctggagcaatgaccccaacaccccttagagcagggcttcccctggaccaacaccccatctgttcacttagctaagtcaagaaaggtgaaggtccagcactgtttccatccagcagcctaacctcccactgaga

SEQ ID NO: 351358 - DNA, 6068 bp, Homo sapiens
acgggaacggaagtgtggcggcgttgggttgagcgggctttttggaagtttgtggcggaggtgaggccgaggtgactgcagagcggctcgcgagttctgtgatatgagcaacaatggaccagaagattttatctctagcagcagaaaaaacagcagacaaactgcaagaatttcttcaaaccctgagagaaggtgatttgactaatctccttcagaatcaagcagtgaaaggaaaagttgctggagcactcctgagagccatcttcaaaggttccccctgctctgaggaagctggaacacttaggagacgtaagatatacacttgttgtatccagttggtggaatcgggggatttgcagaaagaaatagcgtctgagatcataggattactgatgctggaggctcaccattttccaggaccattattggttgaattagccaatgagtttattagtgctgtcagagaaggcagcctagtgaatggaaaatctttggagttactacctatcattctcactgccctggctacgaaaaaggaaaatctggcttatggaaaaggtgtactgagtggggaagaatgtaagaaacagttgattaacaccctgtgttctggcaggtgggatcagcaatatgtaatccaactcacctccatgttcaaggatgtccctctgactgcagaagaggtggaatttgtggtggaaaaagcattgagcatgttctccaagatgaatcttcaagaaataccacctttggtctatcagcttctggttctctcctccaagggaagcagaaagagtgttttggaaggaatcatagccttcttcagtgcactagataagcagcacaatgaggaacagagtggtgacgagctattggatgttgtcactgtgccatcaggtgaacttcgtcatgtggaaggcaccattattctacacattgtgtttgccatcaaattggactatgaactaggcagagaactcgtgaaacacttaaaggtaggacagcaaggagattccaataataacttaagtcccttcagcattgctcttcttctgtctgtaacaagaatacaaagatttcaggaccaggtgcttgatcttttaaagacttcggttgtaaagagctttaaggatcttcaactcctccaaggctcaaaatttcttcagaatctagttcctcatagatcttatgtttcaaccatgatcttggaagtagtgaagaatagcgttcatagctgggaccatgttactcagggcctcgtagaacttggtttcattttgatggattcatatgggccaaagaaggttcttgatggaaaaactattgaaaccagcccaagtctttctagaatgccaaaccagcatgcatgtaagctcggagctaatatcctgttggaaacttttaagatccatgagatgatcagacaagaaattttggagcaggtcctcaacagggttgttaccagagcatcttctcccatcagtcatttcttagacctgctttcaaatatcgtcatgtatgcacccttagttcttcaaagttgttcttctaaagtcacagaagcttttgactatttgtcctttctgccccttcagactgtacaaaggctgcttaaggcagtgcagccccttctcaaagtcagcatgtcaatgagagactgcttgatacttgtccttcggaaagctatgtttgccaagtatgtagcatctttttctatcataggaagacgttgtcttctaatgttggagctaaagttatctctgccatctcctagtaccacctgttcacagtgatcatgagaattcctagccccgcagagcaatttcatcaaataaggcattttgctaagtgctttatgtgcttttttcatttagtcttcagagcaaccctatgaagtaagaattattgcaattcccattttacagataagaaaagttaggcttagagaagatgagtgactttccaaaagtaaaacagtagttggtggtggagcaaggattcaaagtcaggtctaacatcagagcttgtgatgtcaagtactttgctctactacattagaataatcttcagggtaatgttctagtgtcaaatactctgaaacctgagctggcagcagttccaaaggggaaagtaccttagtcaagaagattatacttaagaatctcattttagtgaacatctgaattatgatctagaggctagtagatcaaattaattgttgaggggaatgagttttatttgtagcttagccagtccctcctaacatctcttcctttatttcttagtatataagctagagatgatcttgccatctcctaaaaatataagacagtaatatgtgaaaagcatttggtactttgaggataagatgcccaattaatatcacattggccatattataatatattcatgggtgtccagaggaacaactaagccatatgctattatctttgttctagaattaaaagtttttgttactcctcacccaaaggcatagcgaatagactgagatattacgttgtaacatctttaacatgaattaatcattgcgcctcagtgagaagacaagtgtgacattttctggatggacagtttacatggcatcaaatattacattatcctatgatgaaagagagcatatgaagggaagcactccttcaaacatggcaaaatcagcaatttcttacatttgagtaaccagccaattttacagtctctcagcagtcttcttattcctcacatagacttgagagcaggatagaaggaagtagagtatcatgagttaagtattgaaaaaagtcagttgaatttctgtactataaattgctttgaacagctgataccttattttgagtacataaattcactttgttttgctctacgcttcattgtttatacatatgccttctctgtatgcaactagctggatttttctgacccagaagcatattcctgtgaaatagtactgtttgttaacttctctatttctgagctagccagcttgatgcccgaaaatctgcagttgctgggtttttgctgctcctgaagaactttaaagttttaggcagcctgtcatcctctcagtgcagtcagtctctcagtgtcagtcaggttcatgtggatgttcacagccattacaattctgtcgccaatgaaactttttgccttgagatcatggatagtttgaggagatgcttaagccagcaagctgatgttcgactcatgctttatgaggggttttatgatgttcttcgaaggaactctcagctggctaattcagtcatgcaaactctgctctcacagttaaaacagttctatgagccaaaacctgatctgctgcctcctctgaaattagaagcttgtattctgacccaaggagataagatctctctacaagaaccactggattatctgctgtgttgtattcagcattgtttggcctggtataagaatacagtcatacccttacagcagggagaggaggaagaggaggaggaagaggcattctacgaagacctagatgatatattggagtccattactaatagaatgattaagagtgagctggaagactttgaactggataaatcagcagatttttctcagagcaccagtattggcataaaaaataatatctgtgcttttcttgtgatgggagtttgtgaggttttaatagaatacaatttctccataagtagtttcagtaagaataggtttgaggacattctgagcttatttatgtgttacaaaaaactctctgacattcttaatgaaaaagcgggtaaagccaaaactaaaatggccaacaagacaagtgatagtcttttgtccatgaaatttgtgtccagtcttctcactgctcttttcagggatagtatccaaagccaccaagaaagcctttctgttctcaggtccagcaatgagtttatgcgctatgcagtgaatgtagctctgcagaaagtacagcagctaaaggaaacagggcatgtgagtggccctgatggccaaaacccagaaaagatctttcagaacctctgtgacataactcgagtcttgctatggagatacacttcaattcctacttcagtggaagagtcgggaaagaaagagaaaggaaagagcatctcactgctgtgcttggagggtttacagaaaatattcagtgctgtgcaacagttctatcagcccaagattcagcagtttctcagagctctggatgtcacagataaggaaggagaagagagagaagatgcagatgtcagtgtcactcagagaacagcattccagatccggcaatttcagaggtccttgttgaatttacttagcagtcaagaggaagattttaatagcaaagaagccctcctgctagtcacggttcttaccagtttgtccaagttactggagccctcctctcctcagtttgtgcagatgttatcctggacatcaaagatttgcaaggaaaacagccgggaggatgccttgttttgcaagagcttgatgaacttgctcttcagcctgcatgtttcgtataagagtcctgtcattctgctgcgtgacttgtcccaggatatccacgggcatctgggagatatagaccaggatgtagaggtggagaaaacaaaccactttgcaatagtgaatttgagaacggctgcccccactgtctgtttacttgttctgagtcaggccgagaaggttctagaagaagtggactggctaatcaccaagcttaagggacaagtgagccaagaaaccttatcagaagaggcctcttctcaggcaaccctaccaaatcagcctgttgagaaagctatcatcatgcaactgggaactctgcttacatttttccacgagctggtgcagacagctctgccatcaggcagctgtgtggacaccttgttaaaggacttgtgcaaaatgtacaccacacttacagcccttgtcagatattatctccaggtgtgtcagagctccggaggaattccaaaaaatatggaaaagctggtgaagctgtctggttctcatctgacccccctgtgttattctttcatttcttacgtacagaataagagtaagagcctgaactatacgggagagaaaaaggagaaacctgctgccgttgccacagccatggccagagttcttcgggaaaccaagccaatccctaacctcatctttgccatagaacagtatgaaaaatttctcatccacctttctaagaagtccaaggtgaacctgatgcagcacatgaagctcagcacctcacgagacttcaagatcaaaggaaacatcctagacatggttcttcgagaggatggtgaagatgaaaatgaagagggcactgcatcagagcatgggggacagaacaaagaaccagccaagaagaaaaggaaaaaataaatgaaatgcctgagttaatgtgaactttggggcttctgcttcatttttacccaacaagcaacaatgccccttgtcctgtagtccacaccgatgttggcatcttggttctgaacccactgaattcaactgcaccttcagttagaaggaatcttcttggcaggtcctgctactgaaaaatggctggccttaggcaagcccttttgcaaaaagcacagctgaaagcctgagtttgggagcctgcacccaccccgatgaagctccacgggagcaaatacagagcctccaggcagtgctatggtccaggctggcttcgtttttccaaggagcctttggtgagttcaattatctggtaaatatccagcgcttcacctgaaagatagtgcaaattggttaggatgccacctcaagaactgtaactgagagctcagaagtgagcaaaggagcttaatgctaaggtcaaaaggagagtgaaaggttgagaacaattgccacgaacggtaatgttacatgttaggagggtctgttttctttttatataagtgtgtcttagatatattttaaatagaaaataagctttctgatttacttgtttggtatttaaagcacagtttgtttttctgtcacctatagagtgcaagaatgcactctatagaataaattctctttaa

SEQ ID NO: 351359 - DNA, 5941 bp, Homo sapiens
acgggaacggaagtgtggcggcgttgggttgagcgggctttttggaagtttgtggcggaggtgaggccgaggtgactgcagagcggctcgcgagttctgtgatatgagcaacaatggaccagaagattttatctctagcagcagaaaaaacagcagacaaactgcaagaatttcttcaaaccctgagagaaggtgatttgactaatctccttcagaatcaagcagtgaaaggaaaagttgctggagcactcctgagagccatcttcaaaggttccccctgctctgaggaagctggaacacttaggagacgtaagatatacacttgttgtatccagttggtggaatcgggggatttgcagaaagaaatagcgtctgagatcataggattactgatgctggaggctcaccattttccaggaccattattggttgaattagccaatgagtttattagtgctgtcagagaaggcagcctagtgaatggaaaatctttggagttactacctatcattctcactgccctggctacgaaaaaggaaaatctggcttatggaaaaggtgtactgagtggggaagaatgtaagaaacagttgattaacaccctgtgttctggcaggtgggatcagcaatatgtaatccaactcacctccatgttcaaggatgtccctctgactgcagaagaggtggaatttgtggtggaaaaagcattgagcatgttctccaagatgaatcttcaagaaataccacctttggtctatcagcttctggttctctcctccaagggaagcagaaagagtgttttggaaggaatcatagccttcttcagtgcactagataagcagcacaatgaggaacagagtggtgacgagtaggacagcaaggagattccaataataacttaagtcccttcagcattgctcttcttctgtctgtaacaagaatacaaagatttcaggaccaggtgcttgatcttttaaagacttcggttgtaaagagctttaaggatcttcaactcctccaaggctcaaaatttcttcagaatctagttcctcatagatcttatgtttcaaccatgatcttggaagtagtgaagaatagcgttcatagctgggaccatgttactcagggcctcgtagaacttggtttcattttgatggattcatatgggccaaagaaggttcttgatggaaaaactattgaaaccagcccaagtctttctagaatgccaaaccagcatgcatgtaagctcggagctaatatcctgttggaaacttttaagatccatgagatgatcagacaagaaattttggagcaggtcctcaacagggttgttaccagagcatcttctcccatcagtcatttcttagacctgctttcaaatatcgtcatgtatgcacccttagttcttcaaagttgttcttctaaagtcacagaagcttttgactatttgtcctttctgccccttcagactgtacaaaggctgcttaaggcagtgcagccccttctcaaagtcagcatgtcaatgagagactgcttgatacttgtccttcggaaagctatgtttgccaagtatgtagcatctttttctatcataggaagacgttgtcttctaatgttggagctaaagttatctctgccatctcctagtaccacctgttcacagtgatcatgagaattcctagccccgcagagcaatttcatcaaataaggcattttgctaagtgctttatgtgcttttttcatttagtcttcagagcaaccctatgaagtaagaattattgcaattcccattttacagataagaaaagttaggcttagagaagatgagtgactttccaaaagtaaaacagtagttggtggtggagcaaggattcaaagtcaggtctaacatcagagcttgtgatgtcaagtactttgctctactacattagaataatcttcagggtaatgttctagtgtcaaatactctgaaacctgagctggcagcagttccaaaggggaaagtaccttagtcaagaagattatacttaagaatctcattttagtgaacatctgaattatgatctagaggctagtagatcaaattaattgttgaggggaatgagttttatttgtagcttagccagtccctcctaacatctcttcctttatttcttagtatataagctagagatgatcttgccatctcctaaaaatataagacagtaatatgtgaaaagcatttggtactttgaggataagatgcccaattaatatcacattggccatattataatatattcatgggtgtccagaggaacaactaagccatatgctattatctttgttctagaattaaaagtttttgttactcctcacccaaaggcatagcgaatagactgagatattacgttgtaacatctttaacatgaattaatcattgcgcctcagtgagaagacaagtgtgacattttctggatggacagtttacatggcatcaaatattacattatcctatgatgaaagagagcatatgaagggaagcactccttcaaacatggcaaaatcagcaatttcttacatttgagtaaccagccaattttacagtctctcagcagtcttcttattcctcacatagacttgagagcaggatagaaggaagtagagtatcatgagttaagtattgaaaaaagtcagttgaatttctgtactataaattgctttgaacagctgataccttattttgagtacataaattcactttgttttgctctacgcttcattgtttatacatatgccttctctgtatgcaactagctggatttttctgacccagaagcatattcctgtgaaatagtactgtttgttaacttctctatttctgagctagccagcttgatgcccgaaaatctgcagttgctgggtttttgctgctcctgaagaactttaaagttttaggcagcctgtcatcctctcagtgcagtcagtctctcagtgtcagtcaggttcatgtggatgttcacagccattacaattctgtcgccaatgaaactttttgccttgagatcatggatagtttgaggagatgcttaagccagcaagctgatgttcgactcatgctttatgaggggttttatgatgttcttcgaaggaactctcagctggctaattcagtcatgcaaactctgctctcacagttaaaacagttctatgagccaaaacctgatctgctgcctcctctgaaattagaagcttgtattctgacccaaggagataagatctctctacaagaaccactggattatctgctgtgttgtattcagcattgtttggcctggtataagaatacagtcatacccttacagcagggagaggaggaagaggaggaggaagaggcattctacgaagacctagatgatatattggagtccattactaatagaatgattaagagtgagctggaagactttgaactggataaatcagcagatttttctcagagcaccagtattggcataaaaaataatatctgtgcttttcttgtgatgggagtttgtgaggttttaatagaatacaatttctccataagtagtttcagtaagaataggtttgaggacattctgagcttatttatgtgttacaaaaaactctctgacattcttaatgaaaaagcgggtaaagccaaaactaaaatggccaacaagacaagtgatagtcttttgtccatgaaatttgtgtccagtcttctcactgctcttttcagggatagtatccaaagccaccaagaaagcctttctgttctcaggtccagcaatgagtttatgcgctatgcagtgaatgtagctctgcagaaagtacagcagctaaaggaaacagggcatgtgagtggccctgatggccaaaacccagaaaagatctttcagaacctctgtgacataactcgagtcttgctatggagatacacttcaattcctacttcagtggaagagtcgggaaagaaagagaaaggaaagagcatctcactgctgtgcttggagggtttacagaaaatattcagtgctgtgcaacagttctatcagcccaagattcagcagtttctcagagctctggatgtcacagataaggaaggagaagagagagaagatgcagatgtcagtgtcactcagagaacagcattccagatccggcaatttcagaggtccttgttgaatttacttagcagtcaagaggaagattttaatagcaaagaagccctcctgctagtcacggttcttaccagtttgtccaagttactggagccctcctctcctcagtttgtgcagatgttatcctggacatcaaagatttgcaaggaaaacagccgggaggatgccttgttttgcaagagcttgatgaacttgctcttcagcctgcatgtttcgtataagagtcctgtcattctgctgcgtgacttgtcccaggatatccacgggcatctgggagatatagaccaggatgtagaggtggagaaaacaaaccactttgcaatagtgaatttgagaacggctgcccccactgtctgtttacttgttctgagtcaggccgagaaggttctagaagaagtggactggctaatcaccaagcttaagggacaagtgagccaagaaaccttatcagaagaggcctcttctcaggcaaccctaccaaatcagcctgttgagaaagctatcatcatgcaactgggaactctgcttacatttttccacgagctggtgcagacagctctgccatcaggcagctgtgtggacaccttgttaaaggacttgtgcaaaatgtacaccacacttacagcccttgtcagatattatctccaggtgtgtcagagctccggaggaattccaaaaaatatggaaaagctggtgaagctgtctggttctcatctgacccccctgtgttattctttcatttcttacgtacagaataagagtaagagcctgaactatacgggagagaaaaaggagaaacctgctgccgttgccacagccatggccagagttcttcgggaaaccaagccaatccctaacctcatctttgccatagaacagtatgaaaaatttctcatccacctttctaagaagtccaaggtgaacctgatgcagcacatgaagctcagcacctcacgagacttcaagatcaaaggaaacatcctagacatggttcttcgagaggatggtgaagatgaaaatgaagagggcactgcatcagagcatgggggacagaacaaagaaccagccaagaagaaaaggaaaaaataaatgaaatgcctgagttaatgtgaactttggggcttctgcttcatttttacccaacaagcaacaatgccccttgtcctgtagtccacaccgatgttggcatcttggttctgaacccactgaattcaactgcaccttcagttagaaggaatcttcttggcaggtcctgctactgaaaaatggctggccttaggcaagcccttttgcaaaaagcacagctgaaagcctgagtttgggagcctgcacccaccccgatgaagctccacgggagcaaatacagagcctccaggcagtgctatggtccaggctggcttcgtttttccaaggagcctttggtgagttcaattatctggtaaatatccagcgcttcacctgaaagatagtgcaaattggttaggatgccacctcaagaactgtaactgagagctcagaagtgagcaaaggagcttaatgctaaggtcaaaaggagagtgaaaggttgagaacaattgccacgaacggtaatgttacatgttaggagggtctgttttctttttatataagtgtgtcttagatatattttaaatagaaaataagctttctgatttacttgtttggtatttaaagcacagtttgtttttctgtcacctatagagtgcaagaatgcactctatagaataaattctctttaa

SEQ ID NO: 351360 - DNA, 4643 bp, Homo sapiens
acgggaacggaagtgtggcggcgttgggttgagcgggctttttggaagtttgtggcggaggtgaggccgaggtgactgcagagcggctcgcgagttctgtgatatgagcaacaatggaccagaagattttatctctagcagcagaaaaaacagcagacaaactgcaagaatttcttcaaaccctgagagaaggtgatttgactaatctccttcagaatcaagcagtgaaaggaaaagttgctggagcactcctgagagccatcttcaaaggttccccctgctctgaggaagctggaacacttaggagacgtaagatatacacttgttgtatccagttggtggaatcgggggatttgcagaaagaaatagcgtctgagatcataggattactgatgctggaggctcaccattttccaggaccattattggttgaattagccaatgagtttattagtgctgtcagagaaggcagcctagtgaatggaaaatctttggagttactacctatcattctcactgccctggctacgaaaaaggaaaatctggcttatggaaaaggtgtactgagtggggaagaatgtaagaaacagttgattaacaccctgtgttctggcaggtgggatcagcaatatgtaatccaactcacctccatgttcaaggatgtccctctgactgcagaagaggtggaatttgtggtggaaaaagcattgagcatgttctccaagatgaatcttcaagaaataccacctttggtctatcagcttctggttctctcctccaagggaagcagaaagagtgttttggaaggaatcatagccttcttcagtgcactagataagcagcacaatgaggaacagagtggtgacgagctattggatgttgtcactgtgccatcaggtgaacttcgtcatgtggaaggcaccattattctacacattgtgtttgccatcaaattggactatgaactaggcagagaactcgtgaaacacttaaaggtaggacagcaaggagattccaataataacttaagtcccttcagcattgctcttcttctgtctgtaacaagaatacaaagatttcaggaccaggtgcttgatcttttaaagacttcggttgtaaagagctttaaggatcttcaactcctccaaggctcaaaatttcttcagaatctagttcctcatagatcttatgtttcaaccatgatcttggaagtagtgaagaatagcgttcatagctgggaccatgttactcagggcctcgtagaacttggtttcattttgatggattcatatgggccaaagaaggttcttgatggaaaaactattgaaaccagcccaagtctttctagaatgccaaaccagcatgcatgtaagctcggagctaatatcctgttggaaacttttaagatccatgagatgatcagacaagaaattttggagcaggtcctcaacagggttgttaccagagcatcttctcccatcagtcatttcttagacctgctttcaaatatcgtcatgtatgcacccttagttcttcaaagttgttcttctaaagtcacagaagcttttgactatttgtcctttctgccccttcagactgtacaaaggctgcttaaggcagtgcagccccttctcaaagtcagcatgtcaatgagagactgcttgatacttgtccttcggaaagctatgtttgccaaccagcttgatgcccgaaaatctgcagttgctgggtttttgctgctcctgaagaactttaaagttttaggcagcctgtcatcctctcagtgcagtcagtctctcagtgtcagtcaggttcatgtggatgttcacagccattacaattctgtcgccaatgaaactttttgccttgagatcatggatagtttgaggagatgcttaagccagcaagctgatgttcgactcatgctttatgaggggttttatgatgttcttcgaaggaactctcagctggctaattcagtcatgcaaactctgctctcacagttaaaacagttctatgagccaaaacctgatctgctgcctcctctgaaattagaagcttgtattctgacccaaggagataagatctctctacaagaaccactggattatctgctgtgttgtattcagcattgtttggcctggtataagaatacagtcatacccttacagcagggagaggaggaagaggaggaggaagaggcattctacgaagacctagatgatatattggagtccattactaatagaatgattaagagtgagctggaagactttgaactggataaatcagcagatttttctcagagcaccagtattggcataaaaaataatatctgtgcttttcttgtgatgggagtttgtgaggttttaatagaatacaatttctccataagtagtttcagtaagaataggtttgaggacattctgagcttatttatgtgttacaaaaaactctctgacattcttaatgaaaaagcgggtaaagccaaaactaaaatggccaacaagacaagtgatagtcttttgtccatgaaatttgtgtccagtcttctcactgctcttttcagagtcttgctatggagatacacttcaattcctacttcagtggaagagtcgggaaagaaagagaaaggaaagagcatctcactgctgtgcttggagggtttacagaaaatattcagtgctgtgcaacagttctatcagcccaagattcagcagtttctcagagctctggatgtcacagataaggaaggagaagagagagaagatgcagatgtcagtgtcactcagagaacagcattccagatccggcaatttcagaggtccttgttgaatttacttagcagtcaagaggaagattttaatagcaaagaagccctcctgctagtcacggttcttaccagtttgtccaagttactggagccctcctctcctcagtttgtgcagatgttatcctggacatcaaagatttgcaaggaaaacagccgggaggatgccttgttttgcaagagcttgatgaacttgctcttcagcctgcatgtttcgtataagagtcctgtcattctgctgcgtgacttgtcccaggatatccacgggcatctgggagatatagaccaggatgtagaggtggagaaaacaaaccactttgcaatagtgaatttgagaacggctgcccccactgtctgtttacttgttctgagtcaggccgagaaggttctagaagaagtggactggctaatcaccaagcttaagggacaagtgagccaagaaaccttatcagaagaggcctcttctcaggcaaccctaccaaatcagcctgttgagaaagctatcatcatgcaactgggaactctgcttacatttttccacgagctggtgcagacagctctgccatcaggcagctgtgtggacaccttgttaaaggacttgtgcaaaatgtacaccacacttacagcccttgtcagatattatctccaggtgtgtcagagctccggaggaattccaaaaaatatggaaaagctggtgaagctgtctggttctcatctgacccccctgtgttattctttcatttcttacgtacagaataagagtaagagcctgaactatacgggagagaaaaaggagaaacctgctgccgttgccacagccatggccagagttcttcgggaaaccaagccaatccctaacctcatctttgccatagaacagtatgaaaaatttctcatccacctttctaagaagtccaaggtgaacctgatgcagcacatgaagctcagcacctcacgagacttcaagatcaaaggaaacatcctagacatggttcttcgagaggatggtgaagatgaaaatgaagagggcactgcatcagagcatgggggacagaacaaagaaccagccaagaagaaaaggaaaaaataaatgaaatgcctgagttaatgtgaactttggggcttctgcttcatttttacccaacaagcaacaatgccccttgtcctgtagtccacaccgatgttggcatcttggttctgaacccactgaattcaactgcaccttcagttagaaggaatcttcttggcaggtcctgctactgaaaaatggctggccttaggcaagcccttttgcaaaaagcacagctgaaagcctgagtttgggagcctgcacccaccccgatgaagctccacgggagcaaatacagagcctccaggcagtgctatggtccaggctggcttcgtttttccaaggagcctttggtgagttcaattatctggtaaatatccagcgcttcaccctggggaatcccgtatctcctttccatcccagttgggttggaaggggttttacaatccatggtcacttccttcctgaggcaccggtcaatatcgactgcactgaaaaaggcgactgactggggcaagtcattcagacccagcttgtaggcaaacatgcacctgaaagagacccaatctactctcacagtcatgcccctcctgtgaacagatgcatcactcctggagcaatgaccccaacaccccttagagcagggcttcccctggaccaacaccccatctgttcacttagctaagtcaagaaaggtgaaggtccagcactgtttccatccagcagcctaacctcccactgaga

SEQ ID NO: 351361 - DNA, 4726 bp, Homo sapiens
acgggaacggaagtgtggcggcgttgggttgagcgggctttttggaagtttgtggcggaggtgaggccgaggtgactgcagagcggctcgcgagttctgtgatatgagcaacaatggaccagaagattttatctctagcagcagaaaaaacagcagacaaactgcaagaatttcttcaaaccctgagagaaggtgatttgactaatctccttcagaatcaagcagtgaaaggaaaagttgctggagcactcctgagagccatcttcaaaggttccccctgctctgaggaagctggaacacttaggagacgtaagatatacacttgttgtatccagttggtggaatcgggggatttgcagaaagaaatagcgtctgagatcataggattactgatgctggaggctcaccattttccaggaccattattggttgaattagccaatgagtttattagtgctgtcagagaaggcagcctagtgaatggaaaatctttggagttactacctatcattctcactgccctggctacgaaaaaggaaaatctggcttatggaaaaggtgtactgagtggggaagaatgtaagaaacagttgattaacaccctgtgttctggcaggtgggatcagcaatatgtaatccaactcacctccatgttcaaggatgtccctctgactgcagaagaggtggaatttgtggtggaaaaagcattgagcatgttctccaagatgaatcttcaagaaataccacctttggtctatcagcttctggttctctcctccaagggaagcagaaagagtgttttggaaggaatcatagccttcttcagtgcactagataagcagcacaatgaggaacagagtggtgacgagctattggatgttgtcactgtgccatcaggtgaacttcgtcatgtggaaggcaccattattctacacattgtgtttgccatcaaattggactatgaactaggcagagaactcgtgaaacacttaaaggtaggacagcaaggagattccaataataacttaagtcccttcagcattgctcttcttctgtctgtaacaagaatacaaagatttcaggaccaggtgcttgatcttttaaagacttcggttgtaaagagctttaaggatcttcaactcctccaaggctcaaaatttcttcagaatctagttcctcatagatcttatgtttcaaccatgatcttggaagtagtgaagaatagcgttcatagctgggaccatgttactcagggcctcgtagaacttggtttcattttgatggattcatatgggccaaagaaggttcttgatggaaaaactattgaaaccagcccaagtctttctagaatgccaaaccagcatgcatgtaagctcggagctaatatcctgttggaaacttttaagatccatgagatgatcagacaagaaattttggagcaggtcctcaacagggttgttaccagagcatcttctcccatcagtcatttcttagacctgctttcaaatatcgtcatgtatgcacccttagttcttcaaagttgttcttctaaagtcacagaagcttttgactatttgtcctttctgccccttcagactgtacaaaggctgcttaaggcagtgcagccccttctcaaagtcagcatgtcaatgagagactgcttgatacttgtccttcggaaagctatgtttgccaaccagcttgatgcccgaaaatctgcagttgctgggtttttgctgctcctgaagaactttaaagttttaggcagcctgtcatcctctcagtgcagtcagtctctcagtgtcagtcaggttcatgtggatgttcacagccattacaattctgtcgccaatgaaactttttgccttgagatcatggatagtttgaggagatgcttaagccagcaagctgatgttcgactcatgctttatgaggggttttatgatgttcttcgaaggaactctcagctggctaattcagtcatgcaaactctgctctcacagttaaaacagttctatgagccaaaacctgatctgctgcctcctctgaaattagaagcttgtattctgacccaaggagataagatctctctacaagaaccactggattatctgctgtgttgtattcagcattgtttggcctggtataagaatacagtcatacccttacagcagggagaggaggaagaggaggaggaagaggcattctacgaagacctagatgatatattggagtccattactaatagaatgattaagagtgagctggaagactttgaactggataaatcagcagatttttctcagagcaccagtattggcataaaaaataatatctgtgcttttcttgtgatgggagtttgtgaggttttaatagaatacaatttctccataagtagtttcagtaagaataggtttgaggacattctgagcttatttatgtgttacaaaaaactctctgacattcttaatgaaaaagcgggtaaagccaaaactaaaatggccaacaagacaagtgatagtcttttgtccatgaaatttgtgtccagtcttctcactgctcttttcaggtccagcaatgagtttatgcgctatgcagtgaatgtagctctgcagaaagtacagcagctaaaggaaacagggcatgtgagtggccctgatggccaaaacccagaaaagatctttcagaacctctgtgacataactcgagtcttgctatggagatacacttcaattcctacttcagtggaagagtcgggaaagaaagagaaaggaaagagcatctcactgctgtgcttggagggtttacagaaaatattcagtgctgtgcaacagttctatcagcccaagattcagcagtttctcagagctctggatgtcacagataaggaaggagaagagagagaagatgcagatgtcagtgtcactcagagaacagcattccagatccggcaatttcagaggtccttgttgaatttacttagcagtcaagaggaagattttaatagcaaagaagccctcctgctagtcacggttcttaccagtttgtccaagttactggagccctcctctcctcagtttgtgcagatgttatcctggacatcaaagatttgcaaggaaaacagccgggaggatgccttgttttgcaagagcttgatgaacttgctcttcagcctgcatgtttcgtataagagtcctgtcattctgctgcgtgacttgtcccaggatatccacgggcatctgggagatatagaccaggatgtagaggtggagaaaacaaaccactttgcaatagtgaatttgagaacggctgcccccactgtctgtttacttgttctgagtcaggccgagaaggttctagaagaagtggactggctaatcaccaagcttaagggacaagtgagccaagaaaccttatcagaagaggcctcttctcaggcaaccctaccaaatcagcctgttgagaaagctatcatcatgcaactgggaactctgcttacatttttccacgagctggtgcagacagctctgccatcaggcagctgtgtggacaccttgttaaaggacttgtgcaaaatgtacaccacacttacagcccttgtcagatattatctccaggtgtgtcagagctccggaggaattccaaaaaatatggaaaagctggtgaagctgtctggttctcatctgacccccctgtgttattctttcatttcttacgtacagaataagagtaagagcctgaactatacgggagagaaaaaggagaaacctgctgccgttgccacagccatggccagagttcttcgggaaaccaagccaatccctaacctcatctttgccatagaacagtatgaaaaatttctcatccacctttctaagaagtccaaggtgaacctgatgcagcacatgaagctcagcacctcacgagacttcaagatcaaaggaaacatcctagacatggttcttcgagaggatggtgaagatgaaaatgaagagggcactgcatcagagcatgggggacagaacaaagaaccagccaagaagaaaaggaaaaaataaatgaaatgcctgagttaatgtgaactttggggcttctgcttcatttttacccaacaagcaacaatgccccttgtcctgtagtccacaccgatgttggcatcttggttctgaacccactgaattcaactgcaccttcagttagaaggaatcttcttggcaggtcctgctactgaaaaatggctggccttaggcaagcccttttgcaaaaagcacagctgaaagcctgagtttgggagcctgcacccaccccgatgaagctccacgggagcaaatacagagcctccaggcagtgctatggtccaggctggcttcgtttttccaaggagcctttggtgagttcaattatctggtaaatatccagcgcttcacctgaaagatagtgcaaattggttaggatgccacctcaagaactgtaactgagagctcagaagtgagcaaaggagcttaatgctaaggtcaaaaggagagtgaaaggttgagaacaattgccacgaacggtaatgttacatgttaggagggtctgttttctttttatataagtgtgtcttagatatattttaaatagaaaataagctttctgatttacttgtttggtatttaaagcacagtttgtttttctgtcacctatagagtgcaagaatgcactctatagaataaattctctttaa

SEQ ID NO: 351362 - DNA, 1876 bp, Homo sapiens
caagagtttcttttccattcctagatgtcacagataaggaaggagaagagagagaagatgcagatgtcagtgtcactcagagaacagcattccagatccggcaatttcagaggtccttgttgaatttacttagcagtcaagaggaagattttaatagcaaagaagccctcctgctagtcacggttcttaccagtttgtccaagttactggagccctcctctcctcagtttgtgcagatgttatcctggacatcaaagatttgcaaggaaaacagccgggaggatgccttgttttgcaagagcttgatgaacttgctcttcagcctgcatgtttcgtataagagtcctgtcattctgctgcgtgacttgtcccaggatatccacgggcatctgggagatatagaccaggatgtagaggtggagaaaacaaaccactttgcaatagtgaatttgagaacggctgcccccactgtctgtttacttgttctgagtcaggccgagaaggttctagaagaagtggactggctaatcaccaagcttaagggacaagtgagccaagaaaccttatcagaagaggcctcttctcaggcaaccctaccaaatcagcctgttgagaaagctatcatcatgcaactgggaactctgcttacatttttccacgagctggtgcagacagctctgccatcaggcagctgtgtggacaccttgttaaaggacttgtgcaaaatgtacaccacacttacagcccttgtcagatattatctccaggtgtgtcagagctccggaggaattccaaaaaatatggaaaagctggtgaagctgtctggttctcatctgacccccctgtgttattctttcatttcttacgtacagaataagagtaagagcctgaactatacgggagagaaaaaggagaaacctgctgccgttgccacagccatggccagagttcttcgggaaaccaagccaatccctaacctcatctttgccatagaacagtatgaaaaatttctcatccacctttctaagaagtccaaggtgaacctgatgcagcacatgaagctcagcacctcacgagacttcaagatcaaaggaaacatcctagacatggttcttcgagaggatggtgaagatgaaaatgaagagggcactgcatcagagcatgggggacagaacaaagaaccagccaagaagaaaaggaaaaaataaatgaaatgcctgagttaatgtgaactttggggcttctgcttcatttttacccaacaagcaacaatgccccttgtcctgtagtccacaccgatgttggcatcttggttctgaacccactgaattcaactgcaccttcagttagaaggaatcttcttggcaggtcctgctactgaaaaatggctggccttaggcaagcccttttgcaaaaagcacagctgaaagcctgagtttgggagcctgcacccaccccgatgaagctccacgggagcaaatacagagcctccaggcagtgctatggtccaggctggcttcgtttttccaaggagcctttggtgagttcaattatctggtaaatatccagcgcttcacctgaaagatagtgcaaattggttaggatgccacctcaagaactgtaactgagagctcagaagtgagcaaaggagcttaatgctaaggtcaaaaggagagtgaaaggttgagaacaattgccacgaacggtaatgttacatgttaggagggtctgttttctttttatataagtgtgtcttagatatattttaaatagaaaataagctttctgatttacttgtttggtatttaaagcacagtttgtttttctgtcacctatagagtgcaagaatgcactctatagaataaattctctttaa

SEQ ID NO: 351363 - DNA, 4091 bp, Homo sapiens
acgggaacggaagtgtggcggcgttgggttgagcgggctttttggaagtttgtggcggaggtgaggccgaggtgactgcagagcggctcgcgagttctgtgatatgagcaacaatggaccagaagattttatctctagcagcagaaaaaacagcagacaaactgcaagaatttcttcaaaccctgagagaaggtgatttgactaatctccttcagaatcaagcagtgaaaggaaaagttgctggagcactcctgagagccatcttcaaaggttccccctgctctgaggaagctggaacacttaggagacgtaagatatacacttgttgtatccagttggtggaatcgggggatttgcagaaagaaatagcgtctgagatcataggattactgatgctggaggctcaccattttccaggaccattattggttgaattagccaatgagtttattagtgctgtcagagaaggcagcctagtgaatggaaaatctttggagttactacctatcattctcactgccctggctacgaaaaaggaaaatctggcttatggaaaaggtgtactgagtggggaagaatgtaagaaacagttgattaacaccctgtgttctggcaggtgggatcagcaatatgtaatccaactcacctccatgttcaaggatgtccctctgactgcagaagaggtggaatttgtggtggaaaaagcattgagcatgttctccaagatgaatcttcaagaaataccacctttggtctatcagcttctggttctctcctccaagggaagcagaaagagtgttttggaaggaatcatagccttcttcagtgcactagataagcagcacaatgaggaacagagtggtgacgagctattggatgttgtcactgtgccatcaggtgaacttcgtcatgtggaaggcaccattattctacacattgtgtttgccatcaaattggactatgaactaggcagagaactcgtgaaacacttaaaggtaggacagcaaggagattccaataataacttaagtcccttcagcattgctcttcttctgtctgtaacaagaatacaaagatttcaggaccaggtgcttgatcttttaaagacttcggttgtaaagagctttaaggatcttcaactcctccaaggctcaaaatttcttcagaatctagttcctcatagatcttatgtttcaaccatgatcttggaagtagtgaagaatagcgttcatagctgggaccatgttactcagggcctcgtagaacttggtttcattttgatggattcatatgggccaaagaaggttcttgatggaaaaactattgaaaccagcccaagtctttctagaatgccaaaccagcatgcatgtaagctcggagctaatatcctgttggaaacttttaagatccatgagatgatcagacaagaaattttggagcaggtcctcaacagggttgttaccagagcatcttctcccatcagtcatttcttagacctgctttcaaatatcgtcatgtatgcacccttagttcttcaaagttgttcttctaaagtcacagaagcttttgactatttgtcctttctgccccttcagactgtacaaaggctgcttaaggcagtgcagccccttctcaaagtcagcatgtcaatgagagactgcttgatacttgtccttcggaaagctatgtttgccaaccagcttgatgcccgaaaatctgcagttgctgggtttttgctgctcctgaagaactttaaagttttaggcagcctgtcatcctctcagtgcagtcagtctctcagtgtcagtcaggttcatgtggatgttcacagccattacaattctgtcgccaatgaaactttttgccttgagatcatggatagtttgaggagatgcttaagccagcaagctgatgttcgactcatgctttatgaggggttttatgatgttcttcgaaggaactctcagctggctaattcagtcatgcaaactctgctctcacagttaaaacagttctatgagccaaaacctgatctgctgcctcctctgaaattagaagcttgtattctgacccaaggagataagatctctctacaagaaccactggattatctgctgtgttgtattcagcattgtttggcctggtataagaatacagtcatacccttacagcagggagaggaggaagaggaggaggaagaggcattctacgaagacctagatgatatattggagtccattactaatagaatgattaagagtgagctggaagactttgaactggataaatcagcagatttttctcagagcaccagtattggcataaaaaataatatctgtgcttttcttgtgatgggagtttgtgaggttttaatagaatacaatttctccataagtagtttcagtaagaataggtttgaggacattctgagcttatttatgtgttacaaaaaactctctgacattcttaatgaaaaagcgggtaaagccaaaactaaaatggccaacaagacaagtgatagtcttttgtccatgaaatttgtgtccagtcttctcactgctcttttcagggatagtatccaaagccaccaagaaagcctttctgttctcaggtccagcaatgagtttatgcgctatgcagtgaatgtagctctgcagaaagtacagcagctaaaggaaacagggcatgtgagtggccctgatggccaaaacccagaaaagatctttcagaacctctgtgacataactcgagtcttgctatggagatacacttcaattcctacttcagtggaagagtcgggaaagaaagagaaaggaaagagcatctcactgctgtgcttggagggtttacagaaaatattcagtgctgtgcaacagttctatcagcccaagattcagcagtttctcagagctctggatgtcacagataaggaaggagaagagagagaagatgcagatgtcagtgtcactcagagaacagcattccagatccggcaatttcagaggtccttgttgaatttacttagcagtcaagaggaagattttaatagcaaagaagccctcctgctagtcacggttcttaccagtttgtccaagttactggagccctcctctcctcagtttgtgcagatgttatcctggacatcaaagatttgcaaggaaaacagccgggaggatgccttgttttgcaagagcttgatgaacttgctcttcagcctgcatgtttcgtataagagtcctgtcattctgctgcgtgacttgtcccaggatatccacgggcatctgggagatatagaccaggatgtagaggtggagaaaacaaaccactttgcaatagtgaatttgagaacggctgcccccactgtctgtttacttgttctgagtcaggccgagaaggttctagaagaagtggactggctaatcaccaagcttaagggacaagtgagccaagaaaccttatcagaagaggcctcttctcaggcaaccctaccaaatcagcctgttgagaaagctatcatcatgcaactgggaactctgcttacatttttccacgagctggtgcagacagctctgccatcaggcagctgtgtggacaccttgttaaaggacttgtgcaaaatgtacaccacacttacagcccttgtcagatattatctccaggtgtgtcagagctccggaggaattccaaaaaatatggaaaagctggtgaagctgtctggttctcatctgacccccctgtgttattctttcatttcttacgtacagaataagagtaagagcctgaactatacgggagagaaaaaggagaaacctgctgccgttgccacagccatggccagagttcttcgggaaaccaagccaatccctaacctcatctttgccatagaacagtatgaaaaatttctcatccacctttctaagaagtccaaggtgaacctgatgcagcacatgaagctcagcacctcacgagacttcaagatcaaaggaaacatcctagacatggttcttcgagaggatggtgaagatgaaaatgaagagggcactgtcagagcatgggggacagaatacttctcggataccagggttacacaa

SEQ ID NO: 351364 - DNA, 1942 bp, Homo sapiens
acaggagagaattggtctccatgtggagggaaaaccatatgggaaaccacagtgcgcaaaaaggacccagttggtgcaattggaagtaggaattagtttggtgttgctggggtgtggtttccatgtaaaaataaccagcccgaaggtaaaagggtgcccagatccggcaatttcagaggtccttgttgaatttacttagcagtcaagaggaagattttaatagcaaagaagccctcctgctagtcacggttcttaccagtttgtccaagttactggagccctcctctcctcagtttgtgcagatgttatcctggacatcaaagatttgcaaggaaaacagccgggaggatgccttgttttgcaagagcttgatgaacttgctcttcagcctgcatgtttcgtataagagtcctgtcattctgctgcgtgacttgtcccaggatatccacgggcatctgggagatatagaccaggatgtagaggtggagaaaacaaaccactttgcaatagtgaatttgagaacggctgcccccactgtctgtttacttgttctgagtcaggccgagaaggttctagaagaagtggactggctaatcaccaagcttaagggacaagtgagccaagaaaccttatcagaagaggcctcttctcaggcaaccctaccaaatcagcctgttgagaaagctatcatcatgcaactgggaactctgcttacatttttccacgagctggtgcagacagctctgccatcaggcagctgtgtggacaccttgttaaaggacttgtgcaaaatgtacaccacacttacagcccttgtcagatattatctccaggtgtgtcagagctccggaggaattccaaaaaatatggaaaagctggtgaagctgtctggttctcatctgacccccctgtgttattctttcatttcttacgtacagaataagagtaagagcctgaactatacgggagagaaaaaggagaaacctgctgccgttgccacagccatggccagagttcttcgggaaaccaagccaatccctaacctcatctttgccatagaacagtatgaaaaatttctcatccacctttctaagaagtccaaggtgaacctgatgcagcacatgaagctcagcacctcacgagacttcaagatcaaaggaaacatcctagacatggttcttcgagaggatggtgaagatgaaaatgaagagggcactgcatcagagcatgggggacagaacaaagaaccagccaagaagaaaaggaaaaaataaatgaaatgcctgagttaatgtgaactttggggcttctgcttcatttttacccaacaagcaacaatgccccttgtcctgtagtccacaccgatgttggcatcttggttctgaacccactgaattcaactgcaccttcagttagaaggaatcttcttggcaggtcctgctactgaaaaatggctggccttaggcaagcccttttgcaaaaagcacagctgaaagcctgagtttgggagcctgcacccaccccgatgaagctccacgggagcaaatacagagcctccaggcagtgctatggtccaggctggcttcgtttttccaaggagcctttggtgagttcaattatctggtaaatatccagcgcttcacctgaaagatagtgcaaattggttaggatgccacctcaagaactgtaactgagagctcagaagtgagcaaaggagcttaatgctaaggtcaaaaggagagtgaaaggttgagaacaattgccacgaacggtaatgttacatgttaggagggtctgttttctttttatataagtgtgtcttagatatattttaaatagaaaataagctttctgatttacttgtttggtatttaaagcacagtttgtttttctgtcacctatagagtgcaagaatgcactctatagaataaattctctttaa

SEQ ID NO: 351365 - DNA, 1260 bp, Homo sapiens
gccaaaataggcttaagaatttcaagtcagaaaagcaactaaatttctacaagtgatcctgccctcctcagccattttctagataacaacaaatactggaattataaatgaaatggatcagtgcaattatctctactggcatttgggtccttccagattgaactgccaaaaattttagattactggtatacaagtacaactgcatttgattgggagacagactagttttcccctaaagccatacagttttgtaagtgacagcttcagaggaaaacttcaaaaaccattgaacctgaaatttaagtcttatgttctttgcccttaggccagagttcttcgggaaaccaagccaatccctaacctcatctttgccatagaacagtatgaaaaatttctcatccacctttctaagaagtccaaggtgaacctgatgcagcacatgaagctcagcacctcacgagacttcaagatcaaaggaaacatcctagacatggttcttcgagaggatggtgaagatgaaaatgaagagggcactgcatcagagcatgggggacagaacaaagaaccagccaagaagaaaaggaaaaaataaatgaaatgcctgagttaatgtgaactttggggcttctgcttcatttttacccaacaagcaacaatgccccttgtcctgtagtccacaccgatgttggcatcttggttctgaacccactgaattcaactgcaccttcagttagaaggaatcttcttggcaggtcctgctactgaaaaatggctggccttaggcaagcccttttgcaaaaagcacagctgaaagcctgagtttgggagcctgcacccaccccgatgaagctccacgggagcaaatacagagcctccaggcagtgctatggtccaggctggcttcgtttttccaaggagcctttggtgagttcaattatctggtaaatatccagcgcttcacctgaaagatagtgcaaattggttaggatgccacctcaagaactgtaactgagagctcagaagtgagcaaaggagcttaatgctaaggtcaaaaggagagtgaaaggttgagaacaattgccacgaacggtaatgttacatgttaggagggtctgttttctttttatataagtgtgtcttagatatattttaaatagaaaataagctttctgatttacttgtttggtatttaaagcacagtttgtttttctgtcacctatagagtgcaagaatgcactctatagaataaattctctttaa

SEQ ID NO: 351366 - DNA, 1114 bp, Homo sapiens
acgggaacggaagtgtggcggcgttgggttgagcgggctttttggaagtttgtggcggaggtgaggccgaggtgactgcagagcggctcgcgaggagtctccctctgttgccaggctggagtgcagtggcgcgatctcggctcactgcaacctccgcctcctgagttcaagtgattctcctgcctcagcctcacaagtagctgggactacagggttttggactgataaagcaatggaagccactgaagagctttaagatgaggatggcatggagggaagataagtcacataatcagttctgtgatatgagcaacaatggaccagaagattttatctctagcagcagaaaaaacagcagacaaactgcaagaatttcttcaaaccctgagagaaggtgatttgactaatctccttcagaatcaagcagtgaaaggaaaagttgctggagcactcctgagagccatcttcaaaggttccccctgctctgaggaagctggaacacttaggagacgtaagatatacacttgttgtatccagttggtggaatcgggggatttgcagaaagaaatagcgtctgagatcataggattactgatgctggaggctcaccattttccaggaccattattggttgaattagccaatgagtttattagtgctgtcagagaaggcagcctagtgaatggaaaatctttggagttactacctatcattctcactgccctggctacgaaaaaggaaaatctggcttatggaaaaggtgtactgagtggggaagaatgtaagaaacagttgattaacaccctgtgttctggcaggtgggatcagcaatatgtaatccaactcacctccatgttcaaggatgtccctctgactgcagaagaggtggaatttgtggtggaaaaagcattgagcatgttctccaagatgaatcttcaagaaataccacctttggtctatcagcttctggttctctcctccaagggaagcagaaagagtgttttggaaggaatcatagccttcttcagtgcactagataagcagcacaatgaggaacagagtggtgacgagtgagtaatatagtgtagaaataaagatcatttttacaaattca

SEQ ID NO: 351367 - DNA, 1101 bp, Homo sapiens
acgggaacggaagtgtggcggcgttgggttgagcgggctttttggaagtttgtggcggaggtgaggccgaggtgactgcagagcggctcgcgagttctgtgatatgagcaacaatggaccagaagattttatctctagcagcagaaaaaacagcagacaaactgcaagaatttcttcaaaccctgagagaaggtgatttgactaatctccttcagaatcaagcagtgaaaggaaaagttgctggagcactcctgagagccatcttcaaaggttccccctgctctgaggaagctggaacacttaggagacgtaagatatacacttgttgtatccagttggtggaatcgggggatttgcagaaagaaatagcgtctgagatcataggattactgatgctggaggctcaccattttccaggaccattattggttgaattagccaatgagtttattagtgctgtcagagaaggcagcctagtgaatggaaaatctttggagttactacctatcattctcactgccctggctacgaaaaaggaaaatctggcttatggaaaaggtgtactgagtggggaagaatgtaagaaacagttgattaacaccctgtgttctggcaggtgggatcagcaatatgtaatccaactcacctccatgttcaaggatgtccctctgactgcagaagaggtggaatttgtggtggaaaaagcattgagcatgttctccaagatgaatcttcaagaaataccacctttggtctatcagcttctggttctctcctccaagggaagcagaaagagtgttttggaaggaatcatagccttcttcagtgcactagataagcagcacaatgaggaacagagtggtgacgagctattggatgttgtcactgtgccatcaggtgaacttcgtcatgtggaaggcaccattattctacacattgtgtttgccatcaaattggactatgaactaggcagagaactcgtgaaacacttaaaggtagcatcaaacttgtaaggtgatctgggtctcttttgaatgaaagtgtttgaacttaagccactgttatgccagttaatgacaggaaataaatactgtaaaatga

SEQ ID NO: 351368 - DNA, 962 bp, Homo sapiens
  misc_feature (958)..(958): n is a, c, g, or t
acgggaacggaagtgtggcggcgttgggttgagcgggctttttggaagtttgtggcggaggtgaggccgaggtgactgcagagcggctcgcgagttctgtgatatgagcaacaatggaccagaagattttatctctagcagcagaaaaaacagcagacaaactgcaagaatttcttcaaaccctgagagaaggtgatttgactaatctccttcagaatcaagcagtgaaaggaaaagttgctggagcactcctgagagccatcttcaaaggttccccctgctctgaggaagctggaacacttaggagacgtaagatatacacttgttgtatccagttggtggaatcgggggatttgcagaaagaaatagcgtctgagatcataggattactgatgctggaggctcaccattttccaggaccattattggttgaattagccaatgagtttattagtgctgtcagagaaggcagcctagtgaatggaaaatctttggagttactacctatcattctcactgccctggctacgaaaaaggaaaatctggcttatggaaaaggtgtactgagtggggaagaatgtaagaaacagttgattaacaccctgtgttctggcaggtgggatcagcaatatgtaatccaactcacctccatgttcaaggatgtccctctgactgcagaagaggtggaatttgtggtggaaaaagcattgagcatgttctccaagatgaatcttcaagaaataccacctttggtctatcagcttctggttctctcctccaagggaagcagaaagagtgttttggaaggaatcatagccttcttcagtgcactagataagcagcacaatgaggaacagagtggtgacgagtgagtaatatagtgtagaaataaagatcatttttacaaattcaaaaaaaaaaaaaaaaaaaaaaaaaaaaaaaaaaaaaaaaaaaaaanaaaa

SEQ ID NO: 351369 - DNA, 332 bp, Homo sapiens
ccagttggtggaatcgggggatttgcagaaagaaatagcgtctgagatcataggattactgatgctggaggtaagatggcaaacaaaaacttttatttgggggtaggtttttgagggtttgtaatttgttgagggaaggaaaacttaagtgcccaacctagcatagtccttatttatgagtaagacctgttgttaaaaaacaaagaagcaggccgggcatggtgactcacacctgtaatcccagcactttgggaggctgaggtgaggatcgcttgagctcaggagtttgagaccaccctctgcaacatggtgaaaccccatctctaccaaaa

SEQ ID NO: 351370 - DNA, 324 bp, Homo sapiens
aagcccttaaccattgctgttctaagcaccgtagtaatcagtcgtttgataattctgtttttttgtatttaactacaaacctgttcgtttttcctatttacctgtcaatgttgtaagacttgtttctgaaccccctgtttaaaacaataaggttccccctgctctgaggaagctggaacacttaggagacgtaagatatacacttgttgtatccagttggtggaatcgggggatttgcagaaagaaatagcgtctgagatcataggattactgatgctggaggtaagatggcaaacaaaaacttttatttgggggtaggttttt

SEQ ID NO: 351371 - DNA, 545 bp, Homo sapiens
ttatatagcagagcaaacatagccgaacatagatgctttcatttcacgtgagcaaacatagccgaacatagatgctttcatttcacatatagtggtttggtctggtaaaaggatcatacttctcatccaaggaaaacatgcattatctcttgtattgccacattttctttgcggaggtaaaagggataaagatctcagaaagggtagactataggccccataaattcttacagtaagaggtatttcaaatcttgtttcaacatgaaagtgttctatacattcttagtttgagtctaagtcatagattatttatttaaatttgtactggagaattctttaagctgaaaactactttgaattcaaattggttattttgctgttaattgggagaccttaccaattttgtattgttttcagggaagcagaaagagtgttttggaaggaatcatagccttcttcagtgcactagataagcagcacaatgaggaacagagtggtgacgagtgagtaatatagtgtagaaataaagatcatttttacaaatt

SEQ ID NO: 351372 - DNA, 257 bp, Homo sapiens
aaaaatatggtcatttatattagggcatttaggactgtcaaatatggtctcaataggaaaaaactgagaagaggataaagaaagtgttatttttaagttatgattgtccagatcactagtatctctgttaaagtgcttatttcttctctttgattcctcttaggggttttatgatgttcttcgaaggaactctcagctggctaattcagtcatgcaaactctgctctcacaggtaaaatacatttttatggatatat

SEQ ID NO: 351373 - DNA, 418 bp, Homo sapiens
gtccagcaatgagtttatgcgctatgcagtgaatgtagctctgcagaaagtacagcagctaaaggaaacagggcatgtgagtggccctgatggccaaaacccagaaaagatctttcagaacctctgtgacataactcggtaagccactcccaccccttagaaacttattccacttggctgtggtgtctccaagagaacaaactgggaacagaggatgaaggtaatttgaggttggacatattttaggagtgaaagaatataaaacattagccaggtggcaggcacttgtaatcccagctactcaggaagctgaggcaagagaatcacttgaaccaggaggtggaggtcgcagtgagctgagttcataccactgcactctagcctgggtgacagggcaagactctcaaaagaaaaaaaa

SEQ ID NO: 351374 - DNA, 5191 bp, Homo sapiens
acgggaacggaagtgtggcggcgttgggttgagcgggctttttggaagtttgtggcggaggtgaggccgaggtgactgcagagcggctcgcgagttctgtgatatgagcaacaatggaccagaagattttatctctagcagcagaaaaaacagcagacaaactgcaagaatttcttcaaaccctgagagaaggtgatttgactaatctccttcagaatcaagcagtgaaaggaaaagttgctggagcactcctgagagccatcttcaaaggttccccctgctctgaggaagctggaacacttaggagacgtaagatatacacttgttgtatccagttggtggaatcgggggatttgcagaaagaaatagcgtctgagatcataggattactgatgctggaggctcaccattttccaggaccattattggttgaattagccaatgagtttattagtgctgtcagagaaggcagcctagtgaatggaaaatctttggagttactacctatcattctcactgccctggctacgaaaaaggaaaatctggcttatggaaaaggtgtactgagtggggaagaatgtaagaaacagttgattaacaccctgtgttctggcaggtgggatcagcaatatgtaatccaactcacctccatgttcaaggatgtccctctgactgcagaagaggtggaatttgtggtggaaaaagcattgagcatgttctccaagatgaatcttcaagaaataccacctttggtctatcagcttctggttctctcctccaagggaagcagaaagagtgttttggaaggaatcatagccttcttcagtgcactagataagcagcacaatgaggaacagagtggtgacgagctattggatgttgtcactgtgccatcaggtgaacttcgtcatgtggaaggcaccattattctacacattgtgtttgccatcaaattggactatgaactaggcagagaactcgtgaaacacttaaaggtaggacagcaaggagattccaataataacttaagtcccttcagcattgctcttcttctgtctgtaacaagaatacaaagatttcaggaccaggtgcttgatcttttaaagacttcggttgtaaagagctttaaggatcttcaactcctccaaggctcaaaatttcttcagaatctagttcctcatagatcttatgtttcaaccatgatcttggaagtagtgaagaatagcgttcatagctgggaccatgttactcagggcctcgtagaacttggtttcattttgatggattcatatgggccaaagaaggttcttgatggaaaaactattgaaaccagcccaagtctttctagaatgccaaaccagcatgcatgtaagctcggagctaatatcctgttggaaacttttaagatccatgagatgatcagacaagaaattttggagcaggtcctcaacagggttgttaccagagcatcttctcccatcagtcatttcttagacctgctttcaaatatcgtcatgtatgcacccttagttcttcaaagttgttcttctaaagtcacagaagcttttgactatttgtcctttctgccccttcagactgtacaaaggctgcttaaggcagtgcagccccttctcaaagtcagcatgtcaatgagagactgcttgatacttgtccttcggaaagctatgtttgccaaccagcttgatgcccgaaaatctgcagttgctgggtttttgctgctcctgaagaactttaaagttttaggcagcctgtcatcctctcagtgcagtcagtctctcagtgtcagtcaggttcatgtggatgttcacagccattacaattctgtcgccaatgaaactttttgccttgagatcatggatagtttgaggagatgcttaagccagcaagctgatgttcgactcatgctttatgaggggttttatgatgttcttcgaaggaactctcagctggctaattcagtcatgcaaactctgctctcacagttaaaacagttctatgagccaaaacctgatctgctgcctcctctgaaattagaagcttgtattctgacccaaggagataagatctctctacaagaaccactggattatctgctgtgttgtattcagcattgtttggcctggtataagaatacagtcatacccttacagcagggagaggaggaagaggaggaggaagaggcattctacgaagacctagatgatatattggagtccattactaatagaatgattaagagtgagctggaagactttgaactggataaatcagcagatttttctcagagcaccagtattggcataaaaaataatatctgtgcttttcttgtgatgggagtttgtgaggttttaatagaatacaatttctccataagtagtttcagtaagaataggtttgaggacattctgagcttatttatgtgttacaaaaaactctctgacattcttaatgaaaaagcgggtaaagccaaaactaaaatggccaacaagacaagtgatagtcttttgtccatgaaatttgtgtccagtcttctcactgctcttttcagagtcttgctatggagatacacttcaattcctacttcagtggaagagtcgggaaagaaagagaaaggaaagagcatctcactgctgtgcttggagggtttacagaaaatattcagtgctgtgcaacagttctatcagcccaagattcagcagtttctcagagctctggatgtcacagataaggaaggagaagagagagaagatgcagatgtcagtgtcactcagagaacagcattccagatccggcaatttcagaggtccttgttgaatttacttagcagtcaagaggaagattttaatagcaaagaagccctcctgctagtcacggttcttaccagtttgtccaagttactggagccctcctctcctcagtttgtgcagatgttatcctggacatcaaagatttgcaaggaaaacagccgggaggatgccttgttttgcaagagcttgatgaacttgctcttcagcctgcatgtttcgtataagagtcctgtcattctgctgcgtgacttgtcccaggatatccacgggcatctgggagatatagaccaggatgtagaggtggagaaaacaaaccactttgcaatagtgaatttgagaacggctgcccccactgtctgtttacttgttctgagtcaggccgagaaggttctagaagaagtggactggctaatcaccaagcttaagggacaagtgagccaagaaaccttatcagaagaggcctcttctcaggcaaccctaccaaatcagcctgttgagaaagctatcatcatgcaactgggaactctgcttacatttttccacgagctggtgcagacagctctgccatcaggcagctgtgtggacaccttgttaaaggacttgtgcaaaatgtacaccacacttacagcccttgtcagatattatctccaggtgtgtcagagctccggaggaattccaaaaaatatggaaaagctggtgaagctgtctggttctcatctgacccccctgtgttattctttcatttcttacgtacagaataagagtaagagcctgaactatacgggagagaaaaaggagaaacctgctgccgttgccacagccatggccagagttcttcgggaaaccaagccaatccctaacctcatctttgccatagaacagtatgaaaaatttctcatccacctttctaagaagtccaaggtgaacctgatgcagcacatgaagctcagcacctcacgagacttcaagatcaaaggaaacatcctagacatggttcttcgagaggatggtgaagatgaaaatgaagagggcactgcatcagagcatgggggacagaacaaagaaccagccaagaagaaaaggaaaaaataaatgaaatgcctgagttaatgtgaactttggggcttctgcttcatttttacccaacaagcaacaatgccccttgtcctgtagtccacaccgatgttggcatcttggttctgaacccactgaattcaactgcaccttcagttagaaggaatcttcttggcaggtcctgctactgaaaaatggctggccttaggcaagcccttttgcaaaaagcacagctgaaagcctgagtttgggagcctgcacccaccccgatgaagctccacgggagcaaatacagagcctccaggcagtgctatggtccaggctggcttcgtttttccaaggagcctttggtgagttcaattatctggtaaatatccagcgcttcacctgaaagatagtgcaaattggttaggatgccacctcaagaactgtaactgagagctcagaagtgagcaaaggagcttaatgctaaggtcaaaaggagagtgaaaggttgagaacaattgccacgaacggtaatgttacatgttaggagggtctgttttctttttatataagtgtgtcttagatatattttaaatagaaaataagctttctgatttacttgtttggtatttaaagcacagtttgtttttctgtcacctatagagtgcaagaatgcactctatagaataaattctctttaaacatttcttctgtggttgaagtaggggacaggtacaggtagaatatttgaagctctgctgccttcatttttgaaacatcatatcacattcactctggacacagggcaccttataaactgaaattagcctagaatatagcctgagtcaagagtggattctctggggccccaagtttcctgttctccaagacccactttctagtccacctcagatcctatgtgtaatgaggaacaaatgtgttgtgctcaccctggggaatcccgtatctcctttccatcccagttgggttggaaggggttttacaatccatggtcacttccttcctgaggcaccggtcaatatcgactgcactgaaaaaggcgactgactggggcaagtcattcagacccagcttgtaggcaaacatgcacctgaaagagacccaatctactctcacagtcatgcccctcctgtgaacagatgcatcactcctggagcaatgaccccaacaccccttagagcagggcttcccctggaccaacaccccatctgttcacttagctaagtcaagaaaggtgaaggtccagcactgtttccatccagcagcctaacctcccactgaga

SEQ ID NO: 351375 - DNA, 5411 bp, Homo sapiens
acgggaacggaagtgtggcggcgttgggttgagcgggctttttggaagtttgtggcggaggtgaggccgaggtgactgcagagcggctcgcgaggagtctccctctgttgccaggctggagtgcagtggcgcgatctcggctcactgcaacctccgcctcctgagttcaagtgattctcctgcctcagcctcacaagtagctgggactacagttccagatggaaacatgtggaagggcctgtggcagaaagaacttggagatttgaaggactggaagcaattctgcatggctggagcagagtgatgaaagggagttctgtgatatgagcaacaatggaccagaagattttatctctagcagcagaaaaaacagcagacaaactgcaagaatttcttcaaaccctgagagaaggtgatttgactaatctccttcagaatcaagcagtgaaaggaaaagttgctggagcactcctgagagccatcttcaaaggttccccctgctctgaggaagctggaacacttaggagacgtaagatatacacttgttgtatccagttggtggaatcgggggatttgcagaaagaaatagcgtctgagatcataggattactgatgctggaggctcaccattttccaggaccattattggttgaattagccaatgagtttattagtgctgtcagagaaggcagcctagtgaatggaaaatctttggagttactacctatcattctcactgccctggctacgaaaaaggaaaatctggcttatggaaaaggtgtactgagtggggaagaatgtaagaaacagttgattaacaccctgtgttctggcaggtgggatcagcaatatgtaatccaactcacctccatgttcaaggatgtccctctgactgcagaagaggtggaatttgtggtggaaaaagcattgagcatgttctccaagatgaatcttcaagaaataccacctttggtctatcagcttctggttctctcctccaagggaagcagaaagagtgttttggaaggaatcatagccttcttcagtgcactagataagcagcacaatgaggaacagagtggtgacgagctattggatgttgtcactgtgccatcaggtgaacttcgtcatgtggaaggcaccattattctacacattgtgtttgccatcaaattggactatgaactaggcagagaactcgtgaaacacttaaaggtaggacagcaaggagattccaataataacttaagtcccttcagcattgctcttcttctgtctgtaacaagaatacaaagatttcaggaccaggtgcttgatcttttaaagacttcggttgtaaagagctttaaggatcttcaactcctccaaggctcaaaatttcttcagaatctagttcctcatagatcttatgtttcaaccatgatcttggaagtagtgaagaatagcgttcatagctgggaccatgttactcagggcctcgtagaacttggtttcattttgatggattcatatgggccaaagaaggttcttgatggaaaaactattgaaaccagcccaagtctttctagaatgccaaaccagcatgcatgtaagctcggagctaatatcctgttggaaacttttaagatccatgagatgatcagacaagaaattttggagcaggtcctcaacagggttgttaccagagcatcttctcccatcagtcatttcttagacctgctttcaaatatcgtcatgtatgcacccttagttcttcaaagttgttcttctaaagtcacagaagcttttgactatttgtcctttctgccccttcagactgtacaaaggctgcttaaggcagtgcagccccttctcaaagtcagcatgtcaatgagagactgcttgatacttgtccttcggaaagctatgtttgccaaccagcttgatgcccgaaaatctgcagttgctgggtttttgctgctcctgaagaactttaaagttttaggcagcctgtcatcctctcagtgcagtcagtctctcagtgtcagtcaggttcatgtggatgttcacagccattacaattctgtcgccaatgaaactttttgccttgagatcatggatagtttgaggagatgcttaagccagcaagctgatgttcgactcatgctttatgaggggttttatgatgttcttcgaaggaactctcagctggctaattcagtcatgcaaactctgctctcacagttaaaacagttctatgagccaaaacctgatctgctgcctcctctgaaattagaagcttgtattctgacccaaggagataagatctctctacaagaaccactggattatctgctgtgttgtattcagcattgtttggcctggtataagaatacagtcatacccttacagcagggagaggaggaagaggaggaggaagaggcattctacgaagacctagatgatatattggagtccattactaatagaatgattaagagtgagctggaagactttgaactggataaatcagcagatttttctcagagcaccagtattggcataaaaaataatatctgtgcttttcttgtgatgggagtttgtgaggttttaatagaatacaatttctccataagtagtttcagtaagaataggtttgaggacattctgagcttatttatgtgttacaaaaaactctctgacattcttaatgaaaaagcgggtaaagccaaaactaaaatggccaacaagacaagtgatagtcttttgtccatgaaatttgtgtccagtcttctcactgctcttttcagagtcttgctatggagatacacttcaattcctacttcagtggaagagtcgggaaagaaagagaaaggaaagagcatctcactgctgtgcttggagggtttacagaaaatattcagtgctgtgcaacagttctatcagcccaagattcagcagtttctcagagctctggatgtcacagataaggaaggagaagagagagaagatgcagatgtcagtgtcactcagagaacagcattccagatccggcaatttcagaggtccttgttgaatttacttagcagtcaagaggaagattttaatagcaaagaagccctcctgctagtcacggttcttaccagtttgtccaagttactggagccctcctctcctcagtttgtgcagatgttatcctggacatcaaagatttgcaaggaaaacagccgggaggatgccttgttttgcaagagcttgatgaacttgctcttcagcctgcatgtttcgtataagagtcctgtcattctgctgcgtgacttgtcccaggatatccacgggcatctgggagatatagaccaggatgtagaggtggagaaaacaaaccactttgcaatagtgaatttgagaacggctgcccccactgtctgtttacttgttctgagtcaggccgagaaggttctagaagaagtggactggctaatcaccaagcttaagggacaagtgagccaagaaaccttatcagaagaggcctcttctcaggcaaccctaccaaatcagcctgttgagaaagctatcatcatgcaactgggaactctgcttacatttttccacgagctggtgcagacagctctgccatcaggcagctgtgtggacaccttgttaaaggacttgtgcaaaatgtacaccacacttacagcccttgtcagatattatctccaggtgtgtcagagctccggaggaattccaaaaaatatggaaaagctggtgaagctgtctggttctcatctgacccccctgtgttattctttcatttcttacgtacagaataagagtaagagcctgaactatacgggagagaaaaaggagaaacctgctgccgttgccacagccatggccagagttcttcgggaaaccaagccaatccctaacctcatctttgccatagaacagtatgaaaaatttctcatccacctttctaagaagtccaaggtgaacctgatgcagcacatgaagctcagcacctcacgagacttcaagatcaaaggaaacatcctagacatggttcttcgagaggatggtgaagatgaaaatgaagagggcactgcatcagagcatgggggacagaacaaagaaccagccaagaagaaaaggaaaaaataaatgaaatgcctgagttaatgtgaactttggggcttctgcttcatttttacccaacaagcaacaatgccccttgtcctgtagtccacaccgatgttggcatcttggttctgaacccactgaattcaactgcaccttcagttagaaggaatcttcttggcaggtcctgctactgaaaaatggctggccttaggcaagcccttttgcaaaaagcacagctgaaagcctgagtttgggagcctgcacccaccccgatgaagctccacgggagcaaatacagagcctccaggcagtgctatggtccaggctggcttcgtttttccaaggagcctttggtgagttcaattatctggtaaatatccagcgcttcacctgaaagatagtgcaaattggttaggatgccacctcaagaactgtaactgagagctcagaagtgagcaaaggagcttaatgctaaggtcaaaaggagagtgaaaggttgagaacaattgccacgaacggtaatgttacatgttaggagggtctgttttctttttatataagtgtgtcttagatatattttaaatagaaaataagctttctgatttacttgtttggtatttaaagcacagtttgtttttctgtcacctatagagtgcaagaatgcactctatagaataaattctctttaaacatttcttctgtggttgaagtaggggacaggtacaggtagaatatttgaagctctgctgccttcatttttgaaacatcatatcacattcactctggacacagggcaccttataaactgaaattagcctagaatatagcctgagtcaagagtggattctctggggccccaagtttcctgttctccaagacccactttctagtccacctcagatcctatgtgtaatgaggaacaaatgtgttgtgctcaccctggggaatcccgtatctcctttccatcccagttgggttggaaggggttttacaatccatggtcacttccttcctgaggcaccggtcaatatcgactgcactgaaaaaggcgactgactggggcaagtcattcagacccagcttgtaggcaaacatgcacctgaaagagacccaatctactctcacagtcatgcccctcctgtgaacagatgcatcactcctggagcaatgaccccaacaccccttagagcagggcttcccctggaccaacaccccatctgttcacttagctaagtcaagaaaggtgaaggtccagcactgtttccatccagcagcctaacctcccactgaga

SEQ ID NO: 351376 - DNA, 5393 bp, Homo sapiens
acgggaacggaagtgtggcggcgttgggttgagcgggctttttggaagtttgtggcggaggtgaggccgaggtgactgcagagcggctcgcgaggagtctccctctgttgccaggctggagtgcagtggcgcgatctcggctcactgcaacctccgcctcctgagttcaagtgattctcctgcctcagcctcacaagtagctgggactacagggttttggactgataaagcaatggaagccactgaagagctttaagatgaggatggcatggagggaagataagtcacataatcagttctgtgatatgagcaacaatggaccagaagattttatctctagcagcagaaaaaacagcagacaaactgcaagaatttcttcaaaccctgagagaaggtgatttgactaatctccttcagaatcaagcagtgaaaggaaaagttgctggagcactcctgagagccatcttcaaaggttccccctgctctgaggaagctggaacacttaggagacgtaagatatacacttgttgtatccagttggtggaatcgggggatttgcagaaagaaatagcgtctgagatcataggattactgatgctggaggctcaccattttccaggaccattattggttgaattagccaatgagtttattagtgctgtcagagaaggcagcctagtgaatggaaaatctttggagttactacctatcattctcactgccctggctacgaaaaaggaaaatctggcttatggaaaaggtgtactgagtggggaagaatgtaagaaacagttgattaacaccctgtgttctggcaggtgggatcagcaatatgtaatccaactcacctccatgttcaaggatgtccctctgactgcagaagaggtggaatttgtggtggaaaaagcattgagcatgttctccaagatgaatcttcaagaaataccacctttggtctatcagcttctggttctctcctccaagggaagcagaaagagtgttttggaaggaatcatagccttcttcagtgcactagataagcagcacaatgaggaacagagtggtgacgagctattggatgttgtcactgtgccatcaggtgaacttcgtcatgtggaaggcaccattattctacacattgtgtttgccatcaaattggactatgaactaggcagagaactcgtgaaacacttaaaggtaggacagcaaggagattccaataataacttaagtcccttcagcattgctcttcttctgtctgtaacaagaatacaaagatttcaggaccaggtgcttgatcttttaaagacttcggttgtaaagagctttaaggatcttcaactcctccaaggctcaaaatttcttcagaatctagttcctcatagatcttatgtttcaaccatgatcttggaagtagtgaagaatagcgttcatagctgggaccatgttactcagggcctcgtagaacttggtttcattttgatggattcatatgggccaaagaaggttcttgatggaaaaactattgaaaccagcccaagtctttctagaatgccaaaccagcatgcatgtaagctcggagctaatatcctgttggaaacttttaagatccatgagatgatcagacaagaaattttggagcaggtcctcaacagggttgttaccagagcatcttctcccatcagtcatttcttagacctgctttcaaatatcgtcatgtatgcacccttagttcttcaaagttgttcttctaaagtcacagaagcttttgactatttgtcctttctgccccttcagactgtacaaaggctgcttaaggcagtgcagccccttctcaaagtcagcatgtcaatgagagactgcttgatacttgtccttcggaaagctatgtttgccaaccagcttgatgcccgaaaatctgcagttgctgggtttttgctgctcctgaagaactttaaagttttaggcagcctgtcatcctctcagtgcagtcagtctctcagtgtcagtcaggttcatgtggatgttcacagccattacaattctgtcgccaatgaaactttttgccttgagatcatggatagtttgaggagatgcttaagccagcaagctgatgttcgactcatgctttatgaggggttttatgatgttcttcgaaggaactctcagctggctaattcagtcatgcaaactctgctctcacagttaaaacagttctatgagccaaaacctgatctgctgcctcctctgaaattagaagcttgtattctgacccaaggagataagatctctctacaagaaccactggattatctgctgtgttgtattcagcattgtttggcctggtataagaatacagtcatacccttacagcagggagaggaggaagaggaggaggaagaggcattctacgaagacctagatgatatattggagtccattactaatagaatgattaagagtgagctggaagactttgaactggataaatcagcagatttttctcagagcaccagtattggcataaaaaataatatctgtgcttttcttgtgatgggagtttgtgaggttttaatagaatacaatttctccataagtagtttcagtaagaataggtttgaggacattctgagcttatttatgtgttacaaaaaactctctgacattcttaatgaaaaagcgggtaaagccaaaactaaaatggccaacaagacaagtgatagtcttttgtccatgaaatttgtgtccagtcttctcactgctcttttcagagtcttgctatggagatacacttcaattcctacttcagtggaagagtcgggaaagaaagagaaaggaaagagcatctcactgctgtgcttggagggtttacagaaaatattcagtgctgtgcaacagttctatcagcccaagattcagcagtttctcagagctctggatgtcacagataaggaaggagaagagagagaagatgcagatgtcagtgtcactcagagaacagcattccagatccggcaatttcagaggtccttgttgaatttacttagcagtcaagaggaagattttaatagcaaagaagccctcctgctagtcacggttcttaccagtttgtccaagttactggagccctcctctcctcagtttgtgcagatgttatcctggacatcaaagatttgcaaggaaaacagccgggaggatgccttgttttgcaagagcttgatgaacttgctcttcagcctgcatgtttcgtataagagtcctgtcattctgctgcgtgacttgtcccaggatatccacgggcatctgggagatatagaccaggatgtagaggtggagaaaacaaaccactttgcaatagtgaatttgagaacggctgcccccactgtctgtttacttgttctgagtcaggccgagaaggttctagaagaagtggactggctaatcaccaagcttaagggacaagtgagccaagaaaccttatcagaagaggcctcttctcaggcaaccctaccaaatcagcctgttgagaaagctatcatcatgcaactgggaactctgcttacatttttccacgagctggtgcagacagctctgccatcaggcagctgtgtggacaccttgttaaaggacttgtgcaaaatgtacaccacacttacagcccttgtcagatattatctccaggtgtgtcagagctccggaggaattccaaaaaatatggaaaagctggtgaagctgtctggttctcatctgacccccctgtgttattctttcatttcttacgtacagaataagagtaagagcctgaactatacgggagagaaaaaggagaaacctgctgccgttgccacagccatggccagagttcttcgggaaaccaagccaatccctaacctcatctttgccatagaacagtatgaaaaatttctcatccacctttctaagaagtccaaggtgaacctgatgcagcacatgaagctcagcacctcacgagacttcaagatcaaaggaaacatcctagacatggttcttcgagaggatggtgaagatgaaaatgaagagggcactgcatcagagcatgggggacagaacaaagaaccagccaagaagaaaaggaaaaaataaatgaaatgcctgagttaatgtgaactttggggcttctgcttcatttttacccaacaagcaacaatgccccttgtcctgtagtccacaccgatgttggcatcttggttctgaacccactgaattcaactgcaccttcagttagaaggaatcttcttggcaggtcctgctactgaaaaatggctggccttaggcaagcccttttgcaaaaagcacagctgaaagcctgagtttgggagcctgcacccaccccgatgaagctccacgggagcaaatacagagcctccaggcagtgctatggtccaggctggcttcgtttttccaaggagcctttggtgagttcaattatctggtaaatatccagcgcttcacctgaaagatagtgcaaattggttaggatgccacctcaagaactgtaactgagagctcagaagtgagcaaaggagcttaatgctaaggtcaaaaggagagtgaaaggttgagaacaattgccacgaacggtaatgttacatgttaggagggtctgttttctttttatataagtgtgtcttagatatattttaaatagaaaataagctttctgatttacttgtttggtatttaaagcacagtttgtttttctgtcacctatagagtgcaagaatgcactctatagaataaattctctttaaacatttcttctgtggttgaagtaggggacaggtacaggtagaatatttgaagctctgctgccttcatttttgaaacatcatatcacattcactctggacacagggcaccttataaactgaaattagcctagaatatagcctgagtcaagagtggattctctggggccccaagtttcctgttctccaagacccactttctagtccacctcagatcctatgtgtaatgaggaacaaatgtgttgtgctcaccctggggaatcccgtatctcctttccatcccagttgggttggaaggggttttacaatccatggtcacttccttcctgaggcaccggtcaatatcgactgcactgaaaaaggcgactgactggggcaagtcattcagacccagcttgtaggcaaacatgcacctgaaagagacccaatctactctcacagtcatgcccctcctgtgaacagatgcatcactcctggagcaatgaccccaacaccccttagagcagggcttcccctggaccaacaccccatctgttcacttagctaagtcaagaaaggtgaaggtccagcactgtttccatccagcagcctaacctcccactgaga

SEQ ID NO: 351377 - DNA, 3944 bp, Homo sapiens
acgggaacggaagtgtggcggcgttgggttgagcgggctttttggaagtttgtggcggaggtgaggccgaggtgactgcagagcggctcgcgagttctgtgatatgagcaacaatggaccagaagattttatctctagcagcagaaaaaacagcagacaaactgcaagaatttcttcaaaccctgagagaaggtgatttgactaatctccttcagaatcaagcagtgaaaggaaaagttgctggagcactcctgagagccatcttcaaaggttccccctgctctgaggaagctggaacacttaggagacgtaagatatacacttgttgtatccagttggtggaatcgggggatttgcagaaagaaatagcgtctgagatcataggattactgatgctggaggctcaccattttccaggaccattattggttgaattagccaatgagtttattagtgctgtcagagaaggcagcctagtgaatggaaaatctttggagttactacctatcattctcactgccctggctacgaaaaaggaaaatctggcttatggaaaaggtgtactgagtggggaagaatgtaagaaacagttgattaacaccctgtgttctggcaggtgggatcagcaatatgtaatccaactcacctccatgttcaaggatgtccctctgactgcagaagaggtggaatttgtggtggaaaaagcattgagcatgttctccaagatgaatcttcaagaaataccacctttggtctatcagcttctggttctctcctccaagggaagcagaaagagtgttttggaaggaatcatagccttcttcagtgcactagataagcagcacaatgaggaacagagtggtgacgagctattggatgttgtcactgtgccatcaggtgaacttcgtcatgtggaaggcaccattattctacacattgtgtttgccatcaaattggactatgaactaggcagagaactcgtgaaacacttaaaggtaggacagcaaggagattccaataataacttaagtcccttcagcattgctcttcttctgtctgtaacaagaatacaaagatttcaggaccaggtgcttgatcttttaaagacttcggttgtaaagagctttaaggatcttcaactcctccaaggctcaaaatttcttcagaatctagttcctcatagatcttatgtttcaaccatgatcttggaagtagtgaagaatagcgttcatagctgggaccatgttactcagggcctcgtagaacttggtttcattttgatggattcatatgggccaaagaaggttcttgatggaaaaactattgaaaccagcccaagtctttctagaatgccaaaccagcatgcatgtaagctcggagctaatatcctgttggaaacttttaagatccatgagatgatcagacaagaaattttggagcaggtcctcaacagggttgttaccagagcatcttctcccatcagtcatttcttagacctgctttcaaatatcgtcatgtatgcacccttagttcttcaaagttgttcttctaaagtcacagaagcttttgactatttgtcctttctgccccttcagactgtacaaaggctgcttaaggcagtgcagccccttctcaaagtcagcatgtcaatgagagactgcttgatacttgtccttcggaaagctatgtttgccaaccagcttgatgcccgaaaatctgcagttgctgggtttttgctgctcctgaagaactttaaagttttaggcagcctgtcatcctctcagtgcagtcagtctctcagtgtcagtcaggttcatgtggatgttcacagccattacaattctgtcgccaatgaaactttttgccttgagatcatggatagtttgaggagatgcttaagccagcaagctgatgttcgactcatgctttatgaggggttttatgatgttcttcgaaggaactctcagctggctaattcagtcatgcaaactctgctctcacagttaaaacagttctatgagccaaaacctgatctgctgcctcctctgaaattagaagcttgtattctgacccaaggagataagatctctctacaagaaccactggattatctgctgtgttgtattcagcattgtttggcctggtataagaatacagtcatacccttacagcagggagaggaggaagaggaggaggaagaggcattctacgaagacctagatgatatattggagtccattactaatagaatgattaagagtgagctggaagactttgaactggataaatcagcagatttttctcagagcaccagtattggcataaaaaataatatctgtgcttttcttgtgatgggagtttgtgaggttttaatagaatacaatttctccataagtagtttcagtaagaataggtttgaggacattctgagcttatttatgtgttacaaaaaactctctgacattcttaatgaaaaagcgggtaaagccaaaactaaaatggccaacaagacaagtgatagtcttttgtccatgaaatttgtgtccagtcttctcactgctcttttcagagtcttgctatggagatacacttcaattcctacttcagtggaagagtcgggaaagaaagagaaaggaaagagcatctcactgctgtgcttggagggtttacagaaaatattcagtgctgtgcaacagttctatcagcccaagattcagcagtttctcagagctctggatgtcacagataaggaaggagaagagagagaagatgcagatgtcagtgtcactcagagaacagcattccagatccggcaatttcagaggtccttgttgaatttacttagcagtcaagaggaagattttaatagcaaagaagccctcctgctagtcacggttcttaccagtttgtccaagttactggagccctcctctcctcagtttgtgcagatgttatcctggacatcaaagatttgcaaggaaaacagccgggaggatgccttgttttgcaagagcttgatgaacttgctcttcagcctgcatgtttcgtataagagtcctgtcattctgctgcgtgacttgtcccaggatatccacgggcatctgggagatatagaccaggatgtagaggtggagaaaacaaaccactttgcaatagtgaatttgagaacggctgcccccactgtctgtttacttgttctgagtcaggccgagaaggttctagaagaagtggactggctaatcaccaagcttaagggacaagtgagccaagaaaccttatcagaagaggcctcttctcaggcaaccctaccaaatcagcctgttgagaaagctatcatcatgcaactgggaactctgcttacatttttccacgagctggtgcagacagctctgccatcaggcagctgtgtggacaccttgttaaaggacttgtgcaaaatgtacaccacacttacagcccttgtcagatattatctccaggtgtgtcagagctccggaggaattccaaaaaatatggaaaagctggtgaagctgtctggttctcatctgacccccctgtgttattctttcatttcttacgtacagaataagagtaagagcctgaactatacgggagagaaaaaggagaaacctgctgccgttgccacagccatggccagagttcttcgggaaaccaagccaatccctaacctcatctttgccatagaacagtatgaaaaatttctcatccacctttctaagaagtccaaggtgaacctgatgcagcacatgaagctcagcacctcacgagacttcaagatcaaaggaaacatcctagacatggttcttcgagaggatggtgaagatgaaaatgaagagggcactgcatcagagcatgggggacagaacaaagaaccagccaagaagaaaaggaaaaaataaatgaaatgcctgagttaatgtgaa

SEQ ID NO: 351378 - DNA, 3994 bp, Homo sapiens
  misc_feature (3990)..(3990): n is a, c, g, or t
acgggaacggaagtgtggcggcgttgggttgagcgggctttttggaagtttgtggcggaggtgaggccgaggtgactgcagagcggctcgcgagttctgtgatatgagcaacaatggaccagaagattttatctctagcagcagaaaaaacagcagacaaactgcaagaatttcttcaaaccctgagagaaggtgatttgactaatctccttcagaatcaagcagtgaaaggaaaagttgctggagcactcctgagagccatcttcaaaggttccccctgctctgaggaagctggaacacttaggagacgtaagatatacacttgttgtatccagttggtggaatcgggggatttgcagaaagaaatagcgtctgagatcataggattactgatgctggaggctcaccattttccaggaccattattggttgaattagccaatgagtttattagtgctgtcagagaaggcagcctagtgaatggaaaatctttggagttactacctatcattctcactgccctggctacgaaaaaggaaaatctggcttatggaaaaggtgtactgagtggggaagaatgtaagaaacagttgattaacaccctgtgttctggcaggtgggatcagcaatatgtaatccaactcacctccatgttcaaggatgtccctctgactgcagaagaggtggaatttgtggtggaaaaagcattgagcatgttctccaagatgaatcttcaagaaataccacctttggtctatcagcttctggttctctcctccaagggaagcagaaagagtgttttggaaggaatcatagccttcttcagtgcactagataagcagcacaatgaggaacagagtggtgacgagctattggatgttgtcactgtgccatcaggtgaacttcgtcatgtggaaggcaccattattctacacattgtgtttgccatcaaattggactatgaactaggcagagaactcgtgaaacacttaaaggtaggacagcaaggagattccaataataacttaagtcccttcagcattgctcttcttctgtctgtaacaagaatacaaagatttcaggaccaggtgcttgatcttttaaagacttcggttgtaaagagctttaaggatcttcaactcctccaaggctcaaaatttcttcagaatctagttcctcatagatcttatgtttcaaccatgatcttggaagtagtgaagaatagcgttcatagctgggaccatgttactcagggcctcgtagaacttggtttcattttgatggattcatatgggccaaagaaggttcttgatggaaaaactattgaaaccagcccaagtctttctagaatgccaaaccagcatgcatgtaagctcggagctaatatcctgttggaaacttttaagatccatgagatgatcagacaagaaattttggagcaggtcctcaacagggttgttaccagagcatcttctcccatcagtcatttcttagacctgctttcaaatatcgtcatgtatgcacccttagttcttcaaagttgttcttctaaagtcacagaagcttttgactatttgtcctttctgccccttcagactgtacaaaggctgcttaaggcagtgcagccccttctcaaagtcagcatgtcaatgagagactgcttgatacttgtccttcggaaagctatgtttgccaaccagcttgatgcccgaaaatctgcagttgctgggtttttgctgctcctgaagaactttaaagttttaggcagcctgtcatcctctcagtgcagtcagtctctcagtgtcagtcaggttcatgtggatgttcacagccattacaattctgtcgccaatgaaactttttgccttgagatcatggatagtttgaggagatgcttaagccagcaagctgatgttcgactcatgctttatgaggggttttatgatgttcttcgaaggaactctcagctggctaattcagtcatgcaaactctgctctcacagttaaaacagttctatgagccaaaacctgatctgctgcctcctctgaaattagaagcttgtattctgacccaaggagataagatctctctacaagaaccactggattatctgctgtgttgtattcagcattgtttggcctggtataagaatacagtcatacccttacagcagggagaggaggaagaggaggaggaagaggcattctacgaagacctagatgatatattggagtccattactaatagaatgattaagagtgagctggaagactttgaactggataaatcagcagatttttctcagagcaccagtattggcataaaaaataatatctgtgcttttcttgtgatgggagtttgtgaggttttaatagaatacaatttctccataagtagtttcagtaagaataggtttgaggacattctgagcttatttatgtgttacaaaaaactctctgacattcttaatgaaaaagcgggtaaagccaaaactaaaatggccaacaagacaagtgatagtcttttgtccatgaaatttgtgtccagtcttctcactgctcttttcagagtcttgctatggagatacacttcaattcctacttcagtggaagagtcgggaaagaaagagaaaggaaagagcatctcactgctgtgcttggagggtttacagaaaatattcagtgctgtgcaacagttctatcagcccaagattcagcagtttctcagagctctggatgtcacagataaggaaggagaagagagagaagatgcagatgtcagtgtcactcagagaacagcattccagatccggcaatttcagaggtccttgttgaatttacttagcagtcaagaggaagattttaatagcaaagaagccctcctgctagtcacggttcttaccagtttgtccaagttactggagccctcctctcctcagtttgtgcagatgttatcctggacatcaaagatttgcaaggaaaacagccgggaggatgccttgttttgcaagagcttgatgaacttgctcttcagcctgcatgtttcgtataagagtcctgtcattctgctgcgtgacttgtcccaggatatccacgggcatctgggagatatagaccaggatgtagaggtggagaaaacaaaccactttgcaatagtgaatttgagaacggctgcccccactgtctgtttacttgttctgagtcaggccgagaaggttctagaagaagtggactggctaatcaccaagcttaagggacaagtgagccaagaaaccttatcagaagaggcctcttctcaggcaaccctaccaaatcagcctgttgagaaagctatcatcatgcaactgggaactctgcttacatttttccacgagctggtgcagacagctctgccatcaggcagctgtgtggacaccttgttaaaggacttgtgcaaaatgtacaccacacttacagcccttgtcagatattatctccaggtgtgtcagagctccggaggaattccaaaaaatatggaaaagctggtgaagctgtctggttctcatctgacccccctgtgttattctttcatttcttacgtacagaataagagtaagagcctgaactatacgggagagaaaaaggagaaacctgctgccgttgccacagccatggccagagttcttcgggaaaccaagccaatccctaacctcatctttgccatagaacagtatgaaaaatttctcatccacctttctaagaagtccaaggtgaacctgatgcagcacatgaagctcagcacctcacgagacttcaagatcaaaggaaacatcctagacatggttcttcgagaggatggtgaagatgaaaatgaagagggcactgcatcagagcatgggggacagaacaaagaaccagccaagaagaaaaggaaaaaataaatgaaatgcctgagttaatgtgaaaaaaaaaaaaaaaaaaaaaaaaaaaaaaaaaaaaaaaaaaaaaaanaaaa

SEQ ID NO: 351379 - DNA, 2439 bp, Homo sapiens
cacggggtccttagtctagttacaaggcctgataccaaagccaggacaaggatacaagcaaaaaagaaaactagaggccaatatccctgatgaatatagagtctgctgtgttaaaggcagactcagaaggctatatactgaatgataaccatttttgtatgatgtttcgtagaaagtaaaaccatagggacagaaattagatcagtagttgcttggaaatgggaggagagaattgactatcagtgagcacaagggaacttttagagtgatagaaataccttgattgtggggagattacacaaccatgtaagtttttttaaacttctagaactgttcacctacagggtaagaattttactgtttgttattttatctcggtgaacctgtctttaaaaacaataccactttctcctgcttcagagtcttgctatggagatacacttcaattcctacttcagtggaagagtcgggaaagaaagagaaaggaaagagcatctcactgctgtgcttggagggtttacagaaaatattcagtgctgtgcaacagttctatcagcccaagattcagcagtttctcagagctctggatgtcacagataaggaaggagaagagagagaagatgcagatgtcagtgtcactcagagaacagcattccagatccggcaatttcagaggtccttgttgaatttacttagcagtcaagaggaagattttaatagcaaagaagccctcctgctagtcacggttcttaccagtttgtccaagttactggagccctcctctcctcagtttgtgcagatgttatcctggacatcaaagatttgcaaggaaaacagccgggaggatgccttgttttgcaagagcttgatgaacttgctcttcagcctgcatgtttcgtataagagtcctgtcattctgctgcgtgacttgtcccaggatatccacgggcatctgggagatatagaccaggatgtagaggtggagaaaacaaaccactttgcaatagtgaatttgagaacggctgcccccactgtctgtttacttgttctgagtcaggccgagaaggttctagaagaagtggactggctaatcaccaagcttaagggacaagtgagccaagaaaccttatcagaagaggcctcttctcaggcaaccctaccaaatcagcctgttgagaaagctatcatcatgcaactgggaactctgcttacatttttccacgagctggtgcagacagctctgccatcaggcagctgtgtggacaccttgttaaaggacttgtgcaaaatgtacaccacacttacagcccttgtcagatattatctccaggtgtgtcagagctccggaggaattccaaaaaatatggaaaagctggtgaagctgtctggttctcatctgacccccctgtgttattctttcatttcttacgtacagaataagagtaagagcctgaactatacgggagagaaaaaggagaaacctgctgccgttgccacagccatggccagagttcttcgggaaaccaagccaatccctaacctcatctttgccatagaacagtatgaaaaatttctcatccacctttctaagaagtccaaggtgaacctgatgcagcacatgaagctcagcacctcacgagacttcaagatcaaaggaaacatcctagacatggttcttcgagaggatggtgaagatgaaaatgaagagggcactgcatcagagcatgggggacagaacaaagaaccagccaagaagaaaaggaaaaaataaatgaaatgcctgagttaatgtgaactttggggcttctgcttcatttttacccaacaagcaacaatgccccttgtcctgtagtccacaccgatgttggcatcttggttctgaacccactgaattcaactgcaccttcagttagaaggaatcttcttggcaggtcctgctactgaaaaatggctggccttaggcaagcccttttgcaaaaagcacagctgaaagcctgagtttgggagcctgcacccaccccgatgaagctccacgggagcaaatacagagcctccaggcagtgctatggtccaggctggcttcgtttttccaaggagcctttggtgagttcaattatctggtaaatatccagcgcttcacctgaaagatagtgcaaattggttaggatgccacctcaagaactgtaactgagagctcagaagtgagcaaaggagcttaatgctaaggtcaaaaggagagtgaaaggttgagaacaattgccacgaacggtaatgttacatgttaggagggtctgttttctttttatataagtgtgtcttagatatattttaaatagaaaataagctttctgatttacttgtttggtatttaaagcacagtttgtttttctgtcacctatagagtgcaagaatgcactctatagaataaattctctttaa

SEQ ID NO: 351380 - DNA, 4101 bp, Homo sapiens
acgggaacggaagtgtggcggcgttgggttgagcgggctttttggaagtttgtggcggaggtgaggccgaggtgactgcagagcggctcgcgagttctgtgatatgagcaacaatggaccagaagattttatctctagcagcagaaaaaacagcagacaaactgcaagaatttcttcaaaccctgagagaaggtgatttgactaatctccttcagaatcaagcagtgaaaggaaaagttgctggagcactcctgagagccatcttcaaaggttccccctgctctgaggaagctggaacacttaggagacgtaagatatacacttgttgtatccagttggtggaatcgggggatttgcagaaagaaatagcgtctgagatcataggattactgatgctggaggctcaccattttccaggaccattattggttgaattagccaatgagtttattagtgctgtcagagaaggcagcctagtgaatggaaaatctttggagttactacctatcattctcactgccctggctacgaaaaaggaaaatctggcttatggaaaaggtgtactgagtggggaagaatgtaagaaacagttgattaacaccctgtgttctggcaggtgggatcagcaatatgtaatccaactcacctccatgttcaaggatgtccctctgactgcagaagaggtggaatttgtggtggaaaaagcattgagcatgttctccaagatgaatcttcaagaaataccacctttggtctatcagcttctggttctctcctccaagggaagcagaaagagtgttttggaaggaatcatagccttcttcagtgcactagataagcagcacaatgaggaacagagtggtgacgagctattggatgttgtcactgtgccatcaggtgaacttcgtcatgtggaaggcaccattattctacacattgtgtttgccatcaaattggactatgaactaggcagagaactcgtgaaacacttaaaggtaggacagcaaggagattccaataataacttaagtcccttcagcattgctcttcttctgtctgtaacaagaatacaaagatttcaggaccaggtgcttgatcttttaaagacttcggttgtaaagagctttaaggatcttcaactcctccaaggctcaaaatttcttcagaatctagttcctcatagatcttatgtttcaaccatgatcttggaagtagtgaagaatagcgttcatagctgggaccatgttactcagggcctcgtagaacttggtttcattttgatggattcatatgggccaaagaaggttcttgatggaaaaactattgaaaccagcccaagtctttctagaatgccaaaccagcatgcatgtaagctcggagctaatatcctgttggaaacttttaagatccatgagatgatcagacaagaaattttggagcaggtcctcaacagggttgttaccagagcatcttctcccatcagtcatttcttagacctgctttcaaatatcgtcatgtatgcacccttagttcttcaaagttgttcttctaaagtcacagaagcttttgactatttgtcctttctgccccttcagactgtacaaaggctgcttaaggcagtgcagccccttctcaaagtcagcatgtcaatgagagactgcttgatacttgtccttcggaaagctatgtttgccaaccagcttgatgcccgaaaatctgcagttgctgggtttttgctgctcctgaagaactttaaagttttaggcagcctgtcatcctctcagtgcagtcagtctctcagtgtcagtcaggttcatgtggatgttcacagccattacaattctgtcgccaatgaaactttttgccttgagatcatggatagtttgaggagatgcttaagccagcaagctgatgttcgactcatgctttatgaggggttttatgatgttcttcgaaggaactctcagctggctaattcagtcatgcaaactctgctctcacagttaaaacagttctatgagccaaaacctgatctgctgcctcctctgaaattagaagcttgtattctgacccaaggagataagatctctctacaagaaccactggattatctgctgtgttgtattcagcattgtttggcctggtataagaatacagtcatacccttacagcagggagaggaggaagaggaggaggaagaggcattctacgaagacctagatgatatattggagtccattactaatagaatgattaagagtgagctggaagactttgaactggataaatcagcagatttttctcagagcaccagtattggcataaaaaataatatctgtgcttttcttgtgatgggagtttgtgaggttttaatagaatacaatttctccataagtagtttcagtaagaataggtttgaggacattctgagcttatttatgtgttacaaaaaactctctgacattcttaatgaaaaagcgggtaaagccaaaactaaaatggccaacaagacaagtgatagtcttttgtccatgaaatttgtgtccagtcttctcactgctcttttcagggatagtatccaaagccaccaagaaagcctttctgttctcaggtccagcaatgagtttatgcgctatgcagtgaatgtagctctgcagaaagtacagcagctaaaggaaacagggcatgtgagtggccctgatggccaaaacccagaaaagatctttcagaacctctgtgacataactcgagtcttgctatggagatacacttcaattcctacttcagtggaagagtcgggaaagaaagagaaaggaaagagcatctcactgctgtgcttggagggtttacagaaaatattcagtgctgtgcaacagttctatcagcccaagattcagcagtttctcagagctctggatgtcacagataaggaaggagaagagagagaagatgcagatgtcagtgtcactcagagaacagcattccagatccggcaatttcagaggtccttgttgaatttacttagcagtcaagaggaagattttaatagcaaagaagccctcctgctagtcacggttcttaccagtttgtccaagttactggagccctcctctcctcagtttgtgcagatgttatcctggacatcaaagatttgcaaggaaaacagccgggaggatgccttgttttgcaagagcttgatgaacttgctcttcagcctgcatgtttcgtataagagtcctgtcattctgctgcgtgacttgtcccaggatatccacgggcatctgggagatatagaccaggatgtagaggtggagaaaacaaaccactttgcaatagtgaatttgagaacggctgcccccactgtctgtttacttgttctgagtcaggccgagaaggttctagaagaagtggactggctaatcaccaagcttaagggacaagtgagccaagaaaccttatcagaagaggcctcttctcaggcaaccctaccaaatcagcctgttgagaaagctatcatcatgcaactgggaactctgcttacatttttccacgagctggtgcagacagctctgccatcaggcagctgtgtggacaccttgttaaaggacttgtgcaaaatgtacaccacacttacagcccttgtcagatattatctccaggtgtgtcagagctccggaggaattccaaaaaatatggaaaagctggtgaagctgtctggttctcatctgacccccctgtgttattctttcatttcttacgtacagaataagagtaagagcctgaactatacgggagagaaaaaggagaaacctgctgccgttgccacagccatggccagagttcttcgggaaaccaagccaatccctaacctcatctttgccatagaacagtatgaaaaatttctcatccacctttctaagaagtccaaggtgaacctgatgcagcacatgaagctcagcacctcacgagacttcaagatcaaaggaaacatcctagacatggttcttcgagaggatggtgaagatgaaaatgaagagggcactgcatcagagcactgcgtgacagatatttactctataaccgggatcctcaagatcagcc

SEQ ID NO: 351381 - DNA, 1233 bp, Homo sapiens
atattctgccccactgtctgtttacttgttctgagtcaggccgagaaggttctagaagaagtggactggctaatcaccaagcttaagggacaagtgagccaagaaaccttatcagtatctccaggtgtgtcagagctccggaggaattccaaaaaatatggaaaagctggtgaagctgtctggttctcatctgacccccctgtgttattctttcatttcttacgtacagaataagagtaagagcctgaactatacgggagagaaaaaggagaaacctgctgccgttgccacagccatggccagagttcttcgggaaaccaagccaatccctaacctcatctttgccatagaacagtatgaaaaatttctcatccacctttctaagaagtccaaggtgaacctgatgcagcacatgaagctcagcacctcacgagacttcaagatcaaaggaaacatcctagacatggttcttcgagaggatggtgaagatgaaaatgaagagggcactgcatcagagcatgggggacagaacaaagaaccagccaagaagaaaaggaaaaaataaatgaaatgcctgagttaatgtgaactttggggcttctgcttcatttttacccaacaagcaacaatgccccttgtcctgtagtccacaccgatgttggcatcttggttctgaacccactgaattcaactgcaccttcagttagaaggaatcttcttggcaggtcctgctactgaaaaatggctggccttaggcaagcccttttgcaaaaagcacagctgaaagcctgagtttgggagcctgcacccaccccgatgaagctccacgggagcaaatacagagcctccaggcagtgctatggtccaggctggcttcgtttttccaaggagcctttggtgagttcaattatctggtaaatatccagcgcttcacctgaaagatagtgcaaattggttaggatgccacctcaagaactgtaactgagagctcagaagtgagcaaaggagcttaatgctaaggtcaaaaggagagtgaaaggttgagaacaattgccacgaacggtaatgttacatgttaggagggtctgttttctttttatataagtgtgtcttagatatattttaaatagaaaataagctttctgatttacttgtttggtatttaaagcacagtttgtttttctgtcacctatagagtgcaagaatgcactctatagaataaattctctttaa

SEQ ID NO: 351382 - DNA, 3620 bp, Homo sapiens
acgggaacggaagtgtggcggcgttgggttgagcgggctttttggaagtttgtggcggaggtgaggccgaggtgactgcagagcggctcgcgagttctgtgatatgagcaacaatggaccagaagattttatctctagcagcagaaaaaacagcagacaaactgcaagaatttcttcaaaccctgagagaaggtgatttgactaatctccttcagaatcaagcagtgaaaggaaaagttgctggagcactcctgagagccatcttcaaaggttccccctgctctgaggaagctggaacacttaggagacgtaagatatacacttgttgtatccagttggtggaatcgggggatttgcagaaagaaatagcgtctgagatcataggattactgatgctggaggctcaccattttccaggaccattattggttgaattagccaatgagtttattagtgctgtcagagaaggcagcctagtgaatggaaaatctttggagttactacctatcattctcactgccctggctacgaaaaaggaaaatctggcttatggaaaaggtgtactgagtggggaagaatgtaagaaacagttgattaacaccctgtgttctggcaggtgggatcagcaatatgtaatccaactcacctccatgttcaaggatgtccctctgactgcagaagaggtggaatttgtggtggaaaaagcattgagcatgttctccaagatgaatcttcaagaaataccacctttggtctatcagcttctggttctctcctccaagggaagcagaaagagtgttttggaaggaatcatagccttcttcagtgcactagataagcagcacaatgaggaacagagtggtgacgagctattggatgttgtcactgtgccatcaggtgaacttcgtcatgtggaaggcaccattattctacacattgtgtttgccatcaaattggactatgaactaggcagagaactcgtgaaacacttaaaggtaggacagcaaggagattccaataataacttaagtcccttcagcattgctcttcttctgtctgtaacaagaatacaaagatttcaggaccaggtgcttgatcttttaaagacttcggttgtaaagagctttaaggatcttcaactcctccaaggctcaaaatttcttcagaatctagttcctcatagatcttatgtttcaaccatgatcttggaagtagtgaagaatagcgttcatagctgggaccatgttactcagggcctcgtagaacttggtttcattttgatggattcatatgggccaaagaaggttcttgatggaaaaactattgaaaccagcccaagtctttctagaatgccaaaccagcatgcatgtaagctcggagctaatatcctgttggaaacttttaagatccatgagatgatcagacaagaaattttggagcaggtcctcaacagggttgttaccagagcatcttctcccatcagtcatttcttagacctgctttcaaatatcgtcatgtatgcacccttagttcttcaaagttgttcttctaaagtcacagaagcttttgactatttgtcctttctgccccttcagactgtacaaaggctgcttaaggcagtgcagccccttctcaaagtcagcatgtcaatgagagactgcttgatacttgtccttcggaaagctatgtttgccaagtatgtagcatctttttctatcataggaagacgttgtcttctaatgttggagctaaagttatctctgccatctcctagtaccacctgttcacagtgatcatgagaattcctagccccgcagagcaatttcatcaaataaggcattttgctaagtgctttatgtgcttttttcatttagtcttcagagcaaccctatgaagtaagaattattgcaattcccattttacagataagaaaagttaggcttagagaagatgagtgactttccaaaagtaaaacagtagttggtggtggagcaaggattcaaagtcaggtctaacatcagagcttgtgatgtcaagtactttgctctactacattagaataatcttcagggtaatgttctagtgtcaaatactctgaaacctgagctggcagcagttccaaaggggaaagtaccttagtcaagaagattatacttaagaatctcattttagtgaacatctgaattatgatctagaggctagtagatcaaattaattgttgaggggaatgagttttatttgtagcttagccagtccctcctaacatctcttcctttatttcttagtatataagctagagatgatcttgccatctcctaaaaatataagacagtaatatgtgaaaagcatttggtactttgaggataagatgcccaattaatatcacattggccatattataatatattcatgggtgtccagaggaacaactaagccatatgctattatctttgttctagaattaaaagtttttgttactcctcacccaaaggcatagcgaatagactgagatattacgttgtaacatctttaacatgaattaatcattgcgcctcagtgagaagacaagtgtgacattttctggatggacagtttacatggcatcaaatattacattatcctatgatgaaagagagcatatgaagggaagcactccttcaaacatggcaaaatcagcaatttcttacatttgagtaaccagccaattttacagtctctcagcagtcttcttattcctcacatagacttgagagcaggatagaaggaagtagagtatcatgagttaagtattgaaaaaagtcagttgaatttctgtactataaattgctttgaacagctgataccttattttgagtacataaattcactttgttttgctctacgcttcattgtttatacatatgccttctctgtatgcaactagctggatttttctgacccagaagcatattcctgtgaaatagtactgtttgttaacttctctatttctgagctagccagcttgatgcccgaaaatctgcagttgctgggtttttgctgctcctgaagaactttaaagttttaggcagcctgtcatcctctcagtgcagtcagtctctcagtgtcagtcaggttcatgtggatgttcacagccattacaattctgtcgccaatgaaactttttgccttgagatcatggatagtttgaggagatgcttaagccagcaagctgatgttcgactcatgctttatgaggggttttatgatgttcttcgaaggaactctcagctggctaattcagtcatgcaaactctgctctcacaggtaaaatacatttttatggatatatggaaaacagaccatcaaggatcgagagacagttgatggttttcagacctttcaaaatataaaataattcccaactagtacattagtactttgtgaacatgctgtgggtatgttatgctgttctgggttgtcttatctcggtcaccacttacctgtctgccataataccatcatctagcagttatccttgtgaattaacagtctgtatcctaagtcagaaggacattttgaagaaccatttatataaggaccattgcaactgtatccattatgttatatttctgaaagaaaaa

SEQ ID NO: 351383 - DNA, 487 bp, Homo sapiens
gtttcataggacagtctactaaatctaggaatctttttttattagtatctccaggtgtgtcagagctccggaggaattccaaaaaatatggaaaagctggtgagttgagaatgcctttcctaggaatgggggaagcacttttactgctggttacattggtttccttctcccttgttgtgcaggtgaagctgtctggttctcatctgacccccctgtgttattctttcatttcttacgtacaggtaagagattcagaggcagtacccaataggtcttcaagaaaggatttcttacatgcccaggggactattgatcacctgaactgagcatatataaacttttttccctgcttaccacaagctggaggcacccatcagagaccaagccaaggcttgagggctttgcagcaaggacatctttatgtaaagaaaactgtttcacttaatttggagaaaggaagcatatatgtttgcatttggagcaagga

SEQ ID NO: 351384 - DNA, 552 bp, Homo sapiens
attatctaacacatacattgacatttgttgtctgttttccttcaactttaatataagctatgccacgagaacaataatctttggctttctcctacagttatattccccagtcaacagtacctgggatataataggtgctcaataaatatttgttgttgaaagaatgaatgatctgagtctgtattgtggcaagtttgattgtattgttttggcagagcccaatgttttagagatcaaaggtgcagtaaagttgacagttttttgtgaaaattaggagttcttacctaagttgtcagttggatatagtataggccaggaatatgtatctgaaggcaaagccaggatttaagggaaaaaaaagttctttggcttctttacaacatgaattgagcacctgaagttgtgttctaaactgttttctaaacttgtctgaccataggaattgtctgagacattccttaaaaacggcagaatctgaagcttctccccacacctcctgaatcaaaatttctagaggaggaaccaggatattcttattaaaaacaaagaggg

SEQ ID NO: 351385 - DNA, 2628 bp, Homo sapiens
  misc_feature (1)..(1): n is a, c, g, or t
  misc_feature (5)..(6): n is a, c, g, or t
  misc_feature (10)..(12): n is a, c, g, or t
  misc_feature (15)..(15): n is a, c, g, or t
  misc_feature (17)..(18): n is a, c, g, or t
  misc_feature (21)..(22): n is a, c, g, or t
nactnncttnnngtntnnttnngagattgcatactcaagaagaggaggaacataaaatacgtgatgtcttctcttaagtcaatcgcaggccactctgctgagcatcttctcccaggagtaccagaaacacattaaaagaacacatgccaaacatcatacttcggaagcaattgaaagttattaccagaggtacctgaatggagtggtgaaaaatggagctgccccagtgctcctggacctggccaatgaggtggactatgcgccctcattaatggctcggcttatactggagaggtttctacaggaacacgaggaaactccaccctccaagtctattataaatagtatgctacgggacccttctcagattccagatggagttctagcaaatcaggtctatcagtgcattgtgaacgactgctgttacggaccactagtggactgcatcaagcatgccattggtcatgagcatgaggtcctgctgagagacttgcttctagagaaaaacctgtccttcctagatgaagatcagcttcgtgcaaagggttatgacaaaacaccagacttcattttacaagtaccagttgctgtagaagggcacataattcactggattgaaagcaaagcctcatttggtgatgaatgtagccaccacgcctacctgcatgaccagttctggagctactggaatagatttgggccaggcttagtcatctattggtatggatttatccaggagctggactgcaaccgggaaaggggcatcctgctcaaagcctgtttccccacgaacattgtcaccttatgccacagcatagcttgaccctgaagatcctggaagagaagctgggaggaaaaggtgaatccggaagcaattttactttcctgcactgtaagatcctggcaacatctgccctgaacttcagctgaactcttgctgcccgtagtcacaccactacctctttagacaaacatatcaagagtttctgttttccttcatcccttgctgatgtgaacagccaagaactacagacacaacccactcattatcagcatttctgtctctgtcaaacaattagtttatagatagtcataatctttctttcttccggatggtttatccttgtatgctgaacaaaagaaaaaatgtgaagactgaaaggtgtgatttttcaattctcctcccagttaccgaatcaccctcttatttttttttccctaagcctccgttcactgtctctccctctccctttctcttcatgtgcactcacagagacccagcattgcattaccatcgtggaataatctagcgcaaacctaggaaagctgaagccacaaagtccaaagccacctttgtactcacctgcagagctccagaagaccttgatggcagcctgcctatgctgtgtgtttgctatattcaatctttacggcttcctgacttctgtgacagtaagccaagtgcaaaaatacacttgatgagaatttcctcttttaataatgttatttgaacaccacatattttagatttatcttatttgaaagtattagttccattgtgcctggaaaccacactcctttagattgggggccgagaggcgacaacccaacattgaggagagtttatttttaaacatggctagttgtcagtatgtacgtgagctagtatttttatgagtcgagttttttaaaggcacattctgtatactgcttagtatatgcattttataccatgtaattataaaacactcgagtaagttcagcattagaaatgtttagctttgtatgaactgagtgtgccagaaataaacctggagcaatttttaaataagcaaaataaaggagatttttctatttgttcactttaatttattcacttttgtgtacttttatgtactgcaaatcagatttcagtctaaagcgaaacatcagtaagttaataataaacctatctttcgggaagttgaatattaatctgtacccaaaacgtatttagtaaaatatttgcccccgccaccctgccatgctgacataacaacttttataatgttgaatagatgatatgggaaatactaataacaacaatgtaatttttgcagacagctttaacttatatacattgcttgatttttttcaaaagactaaatatgtcatttatactttgtttattttctaccaaagaaggtttgtaaaaatatgcctgctgcttttccttttgaaggacacaaacctggtcccaacatgtgtggattttaactctgagtggggtgcattaaatcaaaagagagaggcagaagatgaaatgctaaagaagggtcaggcaaacttctgtttcagtataaaattcatcatgcaggcttctgagtgaaatagaatgatttgaaaccactactgtattgcctggatacacacacacacacacacacactttatacaaaaatgttaaaagcaggtttcctggcatgttctaaactgttttttctttaggaataaattacatttatctgcacagatgttgaaaatcctgttaaacccttgtcaaggatttgtttattttacattaaacaaatttattatgatgaacgtgaacaaataaattaaaaaataaaaaaggtacttgcgttttgt

SEQ ID NO: 351386 - DNA, 1249 bp, Homo sapiens
  misc_feature (1217)..(1217): n is a, c, g, or t
tgtacagccagtccccgccgcggaggtgccggtggagcctgggaccgggcgagtctccgccccgcttttgcagctaggggtgtgtttcaggggggattggggcaagccaagcaggcgaggacccgggcctgtgccgctttgcctacccctcatccctcggcaccaaggctacttgagccccagggtgttttttccttgttcccgccacctcctggtccctggcccaacatgatactgaccaaagctcagtacgacgagatagcccagtgcctagtgtctgtgccgcctaccaggcagagcctgaggaagctgaagcagaggtttcccagtcaatcgcaggccactctgctgagcatcttctcccaggagtaccagaaacacattaaaagaacacatgccaaacatcatacttcggaagcaattgaaagttattaccagaggtacctgaatggagtggtgaaaaatggagctgccccagtgctcctggacctggccaatgaggtggactatgcgccctcattaatggctcggcttatactggagaggtttctacaggaacacgaggaaactccaccctccaagtctattataaatagtatgctacgggacccttctcagattccagatggagttctagcaaatcaggtctatcagtgcattgtgaacgactgctgttacggaccactagtggactgcatcaagcatgccattggtcatgagcatgaggtcctgctgagagacttgcttctagagaaaaacctgtccttcctagatgaagatcagcttcgtgcaaagggttatgacaaaacaccagacttcattttacaagtaccagttgctgtagaagggcacataattcactggattgaaagcaaagcctcatttggtgatgaatgtagccaccacgcctacctgcatgaccagttctggagctactggaatagagatgggatctcacaatgttcctcaggctggtgtggaactcctgggctcagcgattcttctgcctcagccacccaaagtgctggaattacaggagcgaggaaacattttctaccaggaatctttatgaaatgtgtttgtaaataacaaaaaacattttcaaattgttggaaatttctcagcagttagtgcattaaaaaaaaaaaagtttcaaccagcatgtgtttcctcatcttaaacaataagtagcaatgtttggaaaatgtttgttatantatctctctaaataaaagttgatagttcccgt

SEQ ID NO: 351387 - DNA, 2833 bp, Homo sapiens
tgtacagccagtccccgccgcggaggtgccggtggagcctgggaccgggcgagtctccgccccgcttttgcagctaggggtgtgtttcaggggggattggggcaagccaagcaggcgaggacccgggcctgtgccgctttgcctacccctcatccctcggcaccaaggctacttgagccccagggtgttttttccttgttcccgccacctcctggtccctggcccaacatgatactgaccaaagctcagtacgacgagatagcccagtgcctagtgtctgtgccgcctaccaggcagagcctgaggaagctgaagcagaggtttcccagaaacacattaaaagaacacatgccaaacatcatacttcggaagcaattgaaagttattaccagaggtacctgaatggagtggtgaaaaatggagctgccccagtgctcctggacctggccaatgaggtggactatgcgccctcattaatggctcggcttatactggagaggtttctacaggaacacgaggaaactccaccctccaagtctattataaatagtatgctacgggacccttctcagattccagatggagttctagcaaatcaggtctatcagtgcattgtgaacgactgctgttacggaccactagtggactgcatcaagcatgccattggtcatgagcatgaggtcctgctgagagacttgcttctagagaaaaacctgtccttcctagatgaagatcagcttcgtgcaaagggttatgacaaaacaccagacttcattttacaagtaccagttgctgtagaagggcacataattcactggattgaaagcaaagcctcatttggtgatgaatgtagccaccacgcctacctgcatgaccagttctggagctactggaatagatttgggccaggcttagtcatctattggtatggatttatccaggagctggactgcaaccgggaaaggggcatcctgctcaaagcctgtttccccacgaacattgtcaccttatgccacagcatagcttgaccctgaagatcctggaagagaagctgggaggaaaaggtgaatccggaagcaattttactttcctgcactgtaagatcctggcaacatctgccctgaacttcagctgaactcttgctgcccgtagtcacaccactacctctttagacaaacatatcaagagtttctgttttccttcatcccttgctgatgtgaacagccaagaactacagacacaacccactcattatcagcatttctgtctctgtcaaacaattagtttatagatagtcataatctttctttcttccggatggtttatccttgtatgctgaacaaaagaaaaaatgtgaagactgaaaggtgtgatttttcaattctcctcccagttaccgaatcaccctcttatttttttttccctaagcctccgttcactgtctctccctctccctttctcttcatgtgcactcacagagacccagcattgcattaccatcgtggaataatctagcgcaaacctaggaaagctgaagccacaaagtccaaagccacctttgtactcacctgcagagctccagaagaccttgatggcagcctgcctatgctgtgtgtttgctatattcaatctttacggcttcctgacttctgtgacagtaagccaagtgcaaaaatacacttgatgagaatttcctcttttaataatgttatttgaacaccacatattttagatttatcttatttgaaagtattagttccattgtgcctggaaaccacactcctttagattgggggccgagaggcgacaacccaacattgaggagagtttatttttaaacatggctagttgtcagtatgtacgtgagctagtatttttatgagtcgagttttttaaaggcacattctgtatactgcttagtatatgcattttataccatgtaattataaaacactcgagtaagttcagcattagaaatgtttagctttgtatgaactgagtgtgccagaaataaacctggagcaatttttaaataagcaaaataaaggagatttttctatttgttcactttaatttattcacttttgtgtacttttatgtactgcaaatcagatttcagtctaaagcgaaacatcagtaagttaataataaacctatctttcgggaagttgaatattaatctgtacccaaaacgtatttagtaaaatatttgcccccgccaccctgccatgctgacataacaacttttataatgttgaatagatgatatgggaaatactaataacaacaatgtaatttttgcagacagctttaacttatatacattgcttgatttttttcaaaagactaaatatgtcatttatactttgtttattttctaccaaagaaggtttgtaaaaatatgcctgctgcttttccttttgaaggacacaaacctggtcccaacatgtgtggattttaactctgagtggggtgcattaaatcaaaagagagaggcagaagatgaaatgctaaagaagggtcaggcaaacttctgtttcagtataaaattcatcatgcaggcttctgagtgaaatagaatgatttgaaaccactactgtattgcctggatacacacacacacacacacacactttatacaaaaatgttaaaagcaggtttcctggcatgttctaaactgttttttctttaggaataaattacatttatctgcacagatgttgaaaatcctgttaaacccttgtcaaggatttgtttattttacattaaacaaatttattatgatgaacgtgaacaaataaattaaaaaataaaaaaggtacttgcgttttgt

SEQ ID NO: 351388 - DNA, 2014 bp, Homo sapiens
ttacttctaatatttaccgaaaataaaatcccaataccgaagctaaactgcaacagactctctttattttccaccgctcatttgggccaggcttagtcatctattggtatggatttatccaggagctggactgcaaccgggaaaggggcatcctgctcaaagcctgtttccccacgaacattgtcaccttatgccacagcatagcttgaccctgaagatcctggaagagaagctgggaggaaaaggtgaatccggaagcaattttactttcctgcactgtaagatcctggcaacatctgccctgaacttcagctgaactcttgctgcccgtagtcacaccactacctctttagacaaacatatcaagagtttctgttttccttcatcccttgctgatgtgaacagccaagaactacagacacaacccactcattatcagcatttctgtctctgtcaaacaattagtttatagatagtcataatctttctttcttccggatggtttatccttgtatgctgaacaaaagaaaaaatgtgaagactgaaaggtgtgatttttcaattctcctcccagttaccgaatcaccctcttatttttttttccctaagcctccgttcactgtctctccctctccctttctcttcatgtgcactcacagagacccagcattgcattaccatcgtggaataatctagcgcaaacctaggaaagctgaagccacaaagtccaaagccacctttgtactcacctgcagagctccagaagaccttgatggcagcctgcctatgctgtgtgtttgctatattcaatctttacggcttcctgacttctgtgacagtaagccaagtgcaaaaatacacttgatgagaatttcctcttttaataatgttatttgaacaccacatattttagatttatcttatttgaaagtattagttccattgtgcctggaaaccacactcctttagattgggggccgagaggcgacaacccaacattgaggagagtttatttttaaacatggctagttgtcagtatgtacgtgagctagtatttttatgagtcgagttttttaaaggcacattctgtatactgcttagtatatgcattttataccatgtaattataaaacactcgagtaagttcagcattagaaatgtttagctttgtatgaactgagtgtgccagaaataaacctggagcaatttttaaataagcaaaataaaggagatttttctatttgttcactttaatttattcacttttgtgtacttttatgtactgcaaatcagatttcagtctaaagcgaaacatcagtaagttaataataaacctatctttcgggaagttgaatattaatctgtacccaaaacgtatttagtaaaatatttgcccccgccaccctgccatgctgacataacaacttttataatgttgaatagatgatatgggaaatactaataacaacaatgtaatttttgcagacagctttaacttatatacattgcttgatttttttcaaaagactaaatatgtcatttatactttgtttattttctaccaaagaaggtttgtaaaaatatgcctgctgcttttccttttgaaggacacaaacctggtcccaacatgtgtggattttaactctgagtggggtgcattaaatcaaaagagagaggcagaagatgaaatgctaaagaagggtcaggcaaacttctgtttcagtataaaattcatcatgcaggcttctgagtgaaatagaatgatttgaaaccactactgtattgcctggatacacacacacacacacacacactttatacaaaaatgttaaaagcaggtttcctggcatgttctaaactgttttttctttaggaataaattacatttatctgcacagatgttgaaaatcctgttaaacccttgtcaaggatttgtttattttacattaaacaaatttattatgatgaacgtgaacaaataaattaaaaaataaaaaaggtacttgcgttttgt

SEQ ID NO: 351389 - DNA, 2147 bp, Homo sapiens
tgtacagccagtccccgccgcggaggtgccggtggagcctgggaccgggcgagtctccgccccgcttttgcagctaggggtgtgtttcaggggggattggggcaagccaagcaggcgaggacccgggcctgtgccgctttgcctacccctcatccctcggcaccaaggctacttgagccccagggtgttttttccttgttcccgccacctcctggtccctggcccaacatgatactgaccaaagctcagtacgacgagatagcccagtgcctagtgtctgtgccgcctaccaggcagagcctgaggaagctgaagcagaggtttcccagtcaatcgcaggccactctgctgagcatcttctcccaggagtaccagaaacacattaaaagaacacatgccaaacatcatacttcggaagcaattgaaagttattaccagaggtacctgaatggagtggtgaaaaatggagctgccccagtgctcctggacctggccaatgaggtggactatgcgccctcattaatggctcggcttatactggagaggtttctacaggaacacgaggaaactccaccctccaagtctattataaatagtatgctacgggacccttctcagattccagatggagttctagcaaatcaggtctatcagtgcattgtgaacgactgctgttacggaccactagtggactgcatcaagcatgccattggtcatgagcatgaggtcctgctgagagacttgcttctagagaaaaacctgtccttcctagatgaagatcagcttcgtgcaaagggttatgacaaaacaccagacttcattttacaagtaccagttgctgtagaagggcacataattcactggattgaaagcaaagcctcatttggtgatgaatgtagccaccacgcctacctgcatgaccagttctggagctactggaatagatttgggccaggcttagtcatctattggtatggatttatccaggagctggactgcaaccgggaaaggggcatcctgctcaaagcctgtttccccacgaacattgtcaccttatgccacagcatagcttgaccctgaagatcctggaagagaagctgggaggaaaaggtgaatccggaagcaattttactttcctgcactgtaagatcctggcaacatctgccctgaacttcagctgaactcttgctgcccgtagtcacaccactacctctttagacaaacatatcaagagtttctgttttccttcatcccttgctgatgtgaacagccaagaactacagacacaacccactcattatcagcatttctgtctctgtcaaacaattagtttatagatagtcataatctttctttcttccggatggtttatccttgtatgctgaacaaaagaaaaaatgtgaagactgaaaggtgtgatttttcaattctcctcccagttaccgaatcaccctcttatttttttttccctaagcctccgttcactgtctctccctctccctttctcttcatgtgcactcacagagacccagcattgcattaccatcgtggaataatctagcgcaaacctaggaaagctgaagccacaaagtccaaagccacctttgtactcacctgcagagctccagaagaccttgatggcagcctgcctatgctgtgtgtttgctatattcaatctttacggcttcctgacttctgtgacagtaagccaagtgcaaaaatacacttgatgagaatttcctcttttaataatgttatttgaacaccacatattttagatttatcttatttgaaagtattagttccattgtgcctggaaaccacactcctttagattgggggccgagaggcgacaacccaacattgaggagagtttatttttaaacatggctagttgtcagtatgtacgtgagctagtatttttatgagtcgagttttttaaaggcacattctgtatactgcttagtatatgcattttataccatgtaattataaaacactcgagtaagttcagcattagaaatgtttagctttgtatgaactgagtgtgccagaaataaacctggagcaatttttaaataagcaaaatagctgacaagattaaaacaacgccatatacccgcgtcgtcgttgaactgagatacatc

SEQ ID NO: 351390 - DNA, 1683 bp, Homo sapiens
tcattccctggtatttcgagaatatgggagagaaccagtgtgccacacttaccaggtctttatcacctctgtgctgagtccagcaaggagaagcgttgatgcctttattcaacaaattcctatgaggactggagtagataaataagtttgaccccgaacatgatttgggccaggcttagtcatctattggtatggatttatccaggagctggactgcaaccgggaaaggggcatcctgctcaaagcctgtttccccacgaacattgtcaccttatgccacagcatagcttgaccctgaagatcctggaagagaagctgggaggaaaagagacccagcattgcattaccatcgtggaataatctagcgcaaacctaggaaagctgaagccacaaagtccaaagccacctttgtactcacctgcagagctccagaagaccttgatggcagcctgcctatgctgtgtgtttgctatattcaatctttacggcttcctgacttctgtgacagtaagccaagtgcaaaaatacacttgatgagaatttcctcttttaataatgttatttgaacaccacatattttagatttatcttatttgaaagtattagttccattgtgcctggaaaccacactcctttagattgggggccgagaggcgacaacccaacattgaggagagtttatttttaaacatggctagttgtcagtatgtacgtgagctagtatttttatgagtcgagttttttaaaggcacattctgtatactgcttagtatatgcattttataccatgtaattataaaacactcgagtaagttcagcattagaaatgtttagctttgtatgaactgagtgtgccagaaataaacctggagcaatttttaaataagcaaaataaaggagatttttctatttgttcactttaatttattcacttttgtgtacttttatgtactgcaaatcagatttcagtctaaagcgaaacatcagtaagttaataataaacctatctttcgggaagttgaatattaatctgtacccaaaacgtatttagtaaaatatttgcccccgccaccctgccatgctgacataacaacttttataatgttgaatagatgatatgggaaatactaataacaacaatgtaatttttgcagacagctttaacttatatacattgcttgatttttttcaaaagactaaatatgtcatttatactttgtttattttctaccaaagaaggtttgtaaaaatatgcctgctgcttttccttttgaaggacacaaacctggtcccaacatgtgtggattttaactctgagtggggtgcattaaatcaaaagagagaggcagaagatgaaatgctaaagaagggtcaggcaaacttctgtttcagtataaaattcatcatgcaggcttctgagtgaaatagaatgatttgaaaccactactgtattgcctggatacacacacacacacacacacactttatacaaaaatgttaaaagcaggtttcctggcatgttctaaactgttttttctttaggaataaattacatttatctgcacagatgttgaaaatcctgttaaacccttgtcaaggatttgtttattttacattaaacaaatttattatgatgaacgtgaacaaataaattaaaaaataaaaaaggtacttgcgttttgt

SEQ ID NO: 351391 - DNA, 1555 bp, Homo sapiens
tgtacagccagtccccgccgcggaggtgccggtggagcctgggaccgggcgagtctccgccccgcttttgcagctaggggtgtgtttcaggggggattggggcaagccaagcaggcgaggacccgggcctgtgccgctttgcctacccctcatccctcggcaccaaggctacttgagccccagggtgttttttccttgttcccgccacctcctggtccctggcccaacatgatactgaccaaagctcagtacgacgagatagcccagtgcctagtgtctgtgccgcctaccaggcagagcctgaggaagctgaagcagaggtttcccagtcaatcgcaggccactctgctgagcatcttctcccaggagtaccagaaacacattaaaagaacacatgccaaacatcatacttcggaagcaattgaaagttattaccagaggtacctgaatggagtggtgaaaaatggagctgccccagtgctcctggacctggccaatgaggtggactatgcgccctcattaatggctcggcttatactggagaggtttctacaggaacacgaggaaactccaccctccaagtctattataaatagtatgctacgggacccttctcagattccagatggagttctagcaaatcaggtctatcagtgcattgtgaacgactgctgttacggaccactagtggactgcatcaagcatgccattggtcatgagcatgaggtcctgctgagagacttgcttctagagaaaaacctgtccttcctagatgaagatcagcttcgtgcaaagggttatgacaaaacaccagacttcattttacaagtaccagttgctgtagaagggcacataattcactggattgaaagcaaagcctcatttggtgatgaatgtagccaccacgcctacctgcatgaccagttctggagctactggaatagatttgggccaggcttagtcatctattggtatggatttatccaggagctggactgcaaccgggaaaggggcatcctgctcaaagcctgtttccccacgaacattgtcaccttatgccacagcatagcttgaccctgaagatcctggaagagaagctgggaggaaaaggtgaatccggaagcaattttactttcctgcactgtaagatcctggcaacatctgccctgaacttcagctgaactcttgctgcccgtagtcacaccactacctctttagacaaacatatcaagagtttctgttttccttcatcccttgctgatgtgaacagccaagaactacagacacaacccactcattatcagcatttctgtctctgtcaaacaattagtttatagatagtcataatctttctttcttccggatggtttatccttgtatgctgaacaaaagaaaaaatgtgaagactgaaaggtgtgatttttcaattctcctcccagttaccgaatcaccctcttatttttttttccctaagcctccgttcactgtctctccctctccctttctcttcatgtgcactcacagcagccacttaatggggggccgactcgatgag

SEQ ID NO: 351392 - DNA, 1628 bp, Homo sapiens
tgtacagccagtccccgccgcggaggtgccggtggagcctgggaccgggcgagtctccgccccgcttttgcagctaggggtgtgtttcaggggggattggggcaagccaagcaggcgaggacccgggcctgtgccgctttgcctacccctcatccctcggcaccaaggctacttgagccccagggtgttttttccttgttcccgccacctcctggtccctggcccaacatgatactgaccaaagctcagtacgacgagatagcccagtgcctagtgtctgtgccgcctaccaggcagagcctgaggaagctgaagcagaggtttcccagtcaatcgcaggccactctgctgagcatcttctcccaggagtaccagaaacacattaaaagaacacatgccaaacatcatacttcggaagcaattgaaagttattaccagaggtacctgaatggagtggtgaaaaatggagctgccccagtgctcctggacctggccaatgaggtggactatgcgccctcattaatggctcggcttatactggagaggtttctacaggaacacgaggaaactccaccctccaagtctattataaatagtatgctacgggacccttctcagattccagatggagttctagcaaatcaggtctatcagtgcattgtgaacgactgctgttacggaccactagtggactgcatcaagcatgccattggtcatgagcatgaggtcctgctgagagacttgcttctagagaaaaacctgtccttcctagatgaagatcagcttcgtgcaaagggttatgacaaaacaccagacttcattttacaagtaccagttgctgtagaagggcacataattcactggattgaaagcaaagcctcatttggtgatgaatgtagccaccacgcctacctgcatgaccagttctggagctactggaatagatttgggccaggcttagtcatctattggtatggatttatccaggagctggactgcaaccgggaaaggggcatcctgctcaaagcctgtttccccacgaacattgtcaccttttgaccctgaagatcctggaagagaagctgggaggaaaagagacccagcattgcattaccatcgtggaataatctagcgcaaaccacaaagtccaaagccacctttgtactcacctgcagagctccagaagaccttgatggcagcctgcctatgctgtgtgtttgctatattgacttctgtgacagtaagccaagtgcaaaaatacacttgatgagaatttcctcttttaataatgttatttgaacaccacatattttagatttatttccattgtgcctggaaaccacactcctttagattgggggccgagaggcgacaacccaacattgaggagagtttatttttaaacaggggttagcggccttattgagtgcggtgtgttaagggtttgtatgttatactggtaggttcttgcgtcgagatcacttggaataagaaaccactggcaggtgaggcccttgggatgggttacaaaaagacgccggagagaggttcaatagacgaaaggacccgcaatgccggggcccaccacgggtgtgcgcgcagacttttctttcggggaggagcaaccg

SEQ ID NO: 351393 - DNA, 650 bp, Homo sapiens
tgtacagccagtccccgccgcggaggtgccggtggagcctgggaccgggcgagtctccgccccgcttttgcagctaggggtgtgtttcaggggggattggggcaagccaagcaggcgaggacccgggcctgtgccgctttgcctacccctcatccctcggcaccaaggctacttgagccccagggtgttttttccttgttcccgccacctcctggtccctggcccaacatgatactgaccaaagctcagtacgacgagatagcccagtgcctagtgtctgtgccgcctaccaggcagagcctgaggaagctgaagcagaggtttcccagtcaatcgcaggccactctgctgagcatcttctcccaggagtaccagaaacacattaaaagaacacatgccaaacatcatacttcggaagcaattgaaagttattaccagaggtacctgaatggagtggtgaaaaatggagctgccccagtgctcctggacctggccaatgaggtggactatgcgccctcattaatggctcggcttatactggagaggtttctacaggaacacgaggaaactccaccaagaccggagaaatactacttccaaatgcaaaggtgaattccactggtcttcctacaagaaaataaaaaagaaaa

SEQ ID NO: 351394 - DNA, 2281 bp, Homo sapiens
tagggcgggtggtgaatcggcacgaggctggtccctggcccaacatgatactgaccaaagctcagtacgacgagatagcccagtgcctagtgtctgtgccgcctaccaggcagagcctgaggaagctgaagcagaggtttcccagtcaatcgcaggccactctgctgagcatcttctcccaggagtaccagaaacacattaaaagaacacatgccaaacatcatacttcggaagcaattgaaagttattaccagaggtacctgaatggagtggtgaaaaatggagctgccccagtgctcctggacctggccaatgaggtggactatgcgccctcattaatggctcggcttatactggagaggtttctacaggaacacgaggaaactccaccctccaagtctattataaatagtatgctacgggacccttctcagattccagatggagttctagcaaatcaggtctatcagtgcattgtgaacgactgctgttacggaccactagtggactgcatcaagcatgccattggtcatgagcatgaggtcctgctgagagacttgcttctagagaaaaacctgtccttcctagatgaagatcagcttcgtgcaaagggttatgacaaaacaccagacttcattttacaagtaccagttgctgtagaagggcacataattcactggattgaaagcaaagcctcatttggtgatgaatgtagccaccacgcctacctgcatgaccagttctggagctactggaatagatttgggccaggcttagtcatctattggtatggatttatccaggagctggactgcaaccgggaaaggggcatcctgctcaaagcctgtttccccacgaacattgtcaccttatgccacagcatagcttgaccctgaagatcctggaagagaagctgggaggaaaagagacccagcattgcattaccatcgtggaataatctagcgcaaacctaggaaagctgaagccacaaagtccaaagccacctttgtactcacctgcagagctccagaagaccttgatggcagcctgcctatgctgtgtgtttgctatattcaatctttacggcttcctgacttctgtgacagtaagccaagtgcaaaaatacacttgatgagaatttcctcttttaataatgttatttgaacaccacatattttagatttatcttatttgaaagtattagttccattgtgcctggaaaccacactcctttagattgggggccgagaggcgacaacccaacattgaggagagtttatttttaaacatggctagttgtcagtatgtacgtgagctagtatttttatgagtcgagttttttaaaggcacattctgtatactgcttagtatatgcattttataccatgtaattataaaacactcgagtaagttcagcattagaaatgtttagctttgtatgaactgagtgtgccagaaataaacctggagcaatttttaaataagcaaaataaaggagatttttctatttgttcactttaatttattcacttttgtgtacttttatgtactgcaaatcagatttcagtctaaagcgaaacatcagtaagttaataataaacctatctttcgggaagttgaatattaatctgtacccaaaacgtatttagtaaaatatttgcccccgccaccctgccatgctgacataacaacttttataatgttgaatagatgatatgggaaatactaataacaacaatgtaatttttgcagacagctttaacttatatacattgcttgatttttttcaaaagactaaatatgtcatttatactttgtttattttctaccaaagaaggtttgtaaaaatatgcctgctgcttttccttttgaaggacacaaacctggtcccaacatgtgtggattttaactctgagtggggtgcattaaatcaaaagagagaggcagaagatgaaatgctaaagaagggtcaggcaaacttctgtttcagtataaaattcatcatgcaggcttctgagtgaaatagaatgatttgaaaccactactgtattgcctggatacacacacacacacacacacactttatacaaaaatgttaaaagcaggtttcctggcatgttctaaactgttttttctttaggaataaattacatttatctgcacagatgttgaaaatcctgttaaacccttgtcaaggatttgtttattttacattaaacaaatttattatgatgaacgtgaacaaataaattaaaaaataaaaaaggtacttgcgttttgt

SEQ ID NO: 351395 - DNA, 2879 bp, Homo sapiens
tgtacagccagtccccgccgcggaggtgccggtggagcctgggaccgggcgagtctccgccccgcttttgcagctaggggtgtgtttcaggggggattggggcaagccaagcaggcgaggacccgggcctgtgccgctttgcctacccctcatccctcggcaccaaggctacttgagccccagggtgttttttccttgttcccgccacctcctggtccctggcccaacatgatactgaccaaagctcagtacgacgagatagcccagtgcctagtgtctgtgccgcctaccaggcagagcctgaggaagctgaagcagaggtttcccagtcaatcgcaggccactctgctgagcatcttctcccaggagtaccagaaacacattaaaagaacacatgccaaacatcatacttcggaagcaattgaaagttattaccagaggtacctgaatggagtggtgaaaaatggagctgccccagtgctcctggacctggccaatgaggtggactatgcgccctcattaatggctcggcttatactggagaggtttctacaggaacacgaggaaactccaccctccaagtctattataaatagtatgctacgggacccttctcagattccagatggagttctagcaaatcaggtctatcagtgcattgtgaacgactgctgttacggaccactagtggactgcatcaagcatgccattggtcatgagcatgaggtcctgctgagagacttgcttctagagaaaaacctgtccttcctagatgaagatcagcttcgtgcaaagggttatgacaaaacaccagacttcattttacaagtaccagttgctgtagaagggcacataattcactggattgaaagcaaagcctcatttggtgatgaatgtagccaccacgcctacctgcatgaccagttctggagctactggaatagatttgggccaggcttagtcatctattggtatggatttatccaggagctggactgcaaccgggaaaggggcatcctgctcaaagcctgtttccccacgaacattgtcaccttatgccacagcatagcttgaccctgaagatcctggaagagaagctgggaggaaaaggtgaatccggaagcaattttactttcctgcactgtaagatcctggcaacatctgccctgaacttcagctgaactcttgctgcccgtagtcacaccactacctctttagacaaacatatcaagagtttctgttttccttcatcccttgctgatgtgaacagccaagaactacagacacaacccactcattatcagcatttctgtctctgtcaaacaattagtttatagatagtcataatctttctttcttccggatggtttatccttgtatgctgaacaaaagaaaaaatgtgaagactgaaaggtgtgatttttcaattctcctcccagttaccgaatcaccctcttatttttttttccctaagcctccgttcactgtctctccctctccctttctcttcatgtgcactcacagagacccagcattgcattaccatcgtggaataatctagcgcaaacctaggaaagctgaagccacaaagtccaaagccacctttgtactcacctgcagagctccagaagaccttgatggcagcctgcctatgctgtgtgtttgctatattcaatctttacggcttcctgacttctgtgacagtaagccaagtgcaaaaatacacttgatgagaatttcctcttttaataatgttatttgaacaccacatattttagatttatcttatttgaaagtattagttccattgtgcctggaaaccacactcctttagattgggggccgagaggcgacaacccaacattgaggagagtttatttttaaacatggctagttgtcagtatgtacgtgagctagtatttttatgagtcgagttttttaaaggcacattctgtatactgcttagtatatgcattttataccatgtaattataaaacactcgagtaagttcagcattagaaatgtttagctttgtatgaactgagtgtgccagaaataaacctggagcaatttttaaataagcaaaataaaggagatttttctatttgttcactttaatttattcacttttgtgtacttttatgtactgcaaatcagatttcagtctaaagcgaaacatcagtaagttaataataaacctatctttcgggaagttgaatattaatctgtacccaaaacgtatttagtaaaatatttgcccccgccaccctgccatgctgacataacaacttttataatgttgaatagatgatatgggaaatactaataacaacaatgtaatttttgcagacagctttaacttatatacattgcttgatttttttcaaaagactaaatatgtcatttatactttgtttattttctaccaaagaaggtttgtaaaaatatgcctgctgcttttccttttgaaggacacaaacctggtcccaacatgtgtggattttaactctgagtggggtgcattaaatcaaaagagagaggcagaagatgaaatgctaaagaagggtcaggcaaacttctgtttcagtataaaattcatcatgcaggcttctgagtgaaatagaatgatttgaaaccactactgtattgcctggatacacacacacacacacacacactttatacaaaaatgttaaaagcaggtttcctggcatgttctaaactgttttttctttaggaataaattacatttatctgcacagatgttgaaaatcctgttaaacccttgtcaaggatttgtttattttacattaaacaaatttattatgatgaacgtgaacaaataaattaaaaaataaaaaaggtacttgcgttttgt

SEQ ID NO: 351396 - DNA, 2163 bp, Homo sapiens
  misc_feature (2107)..(2107): n is a, c, g, or t
tgtacagccagtccccgccgcggaggtgccggtggagcctgggaccgggcgagtctccgccccgcttttgcagctaggggtgtgtttcaggggggattggggcaagccaagcaggcgaggacccgggcctgtgccgctttgcctacccctcatccctcggcaccaaggctacttgagccccagggtgttttttccttgttcccgccacctcctggtccctggcccaacatgatactgaccaaagctcagtacgacgagatagcccagtgcctagtgtctgtgccgcctaccaggcagagcctgaggaagctgaagcagaggtttcccagtcaatcgcaggccactctgctgagcatcttctcccaggagtaccagaaacacattaaaagaacacatgccaaacatcatacttcggaagcaattgaaagttattaccagaggtacctgaatggagtggtgaaaaatggagctgccccagtgctcctggacctggccaatgaggtggactatgcgccctcattaatggctcggcttatactggagaggtttctacaggaacacgaggaaactccaccctccaagtctattataaatagtatgctacgggacccttctcagattccagatggagttctagcaaatcaggtctatcagtgcattgtgaacgactgctgttacggaccactagtggactgcatcaagcatgccattggtcatgagcatgaggtcctgctgagagacttgcttctagagaaaaacctgtccttcctagatgaagatcagcttcgtgcaaagggttatgacaaaacaccagacttcattttacaagtaccagttgctgtagaagggcacataattcactggattgaaagcaaagcctcatttggtgatgaatgtagccaccacgcctacctgcatgaccagttctggagctactggaatagatttgggccaggcttagtcatctattggtatggatttatccaggagctggactgcaaccgggaaaggggcatcctgctcaaagcctgtttccccacgaacattgtcaccttatgccacagcatagcttgaccctgaagatcctggaagagaagctgggaggaaaaggtgaatccggaagcaattttactttcctgcactgtaagatcctggcaacatctgccctgaacttcagctgaactcttgctgcccgtagtcacaccactacctctttagacaaacatatcaagagtttctgttttccttcatcccttgctgatgtgaacagccaagaactacagacacaacccactcattatcagcatttctgtctctgtcaaacaattagtttatagatagtcataatctttctttcttccggatggtttatccttgtatgctgaacaaaagaaaaaatgtgaagactgaaaggtgtgatttttcaattctcctcccagttaccgaatcaccctcttatttttttttccctaagcctccgttcactgtctctccctctccctttctcttcatgtgcactcacagagacccagcattgcattaccatcgtggaataatctagcgcaaacctaggaaagctgaagccacaaagtccaaagccacctttgtactcacctgcagagctccagaagaccttgatggcagcctgcctatgctgtgtgtttgctatattcaatctttacggcttcctgacttctgtgacagtaagccaagtgcaaaaatacacttgatgagaatttcctcttttaataatgttatttgaacaccacatattttagatttatcttatttgaaagtattagttccattgtgcctggaaaccacactcctttagattgggggccgagaggcgacaacccaacattgaggagagtttatttttaaacatggctagttgtcagtatgtacgtgagctagtatttttatgagtcgagttttttaaaggcacattctgtatactgcttagtatatgcattttataccatgtaattataaaacactcgagtaagttcagcattagaaatgtttagctttgtatgaactgagtgtgccagaaataaacctggagcaatttttaaataagcaaaataccagccagaaaagggangattcgccctgaacctttcctttttttccatatcactcgcgagtataagaacaacc

SEQ ID NO: 351397 - DNA, 2147 bp, Homo sapiens
tgtacagccagtccccgccgcggaggtgccggtggagcctgggaccgggcgagtctccgccccgcttttgcagctaggggtgtgtttcaggggggattggggcaagccaagcaggcgaggacccgggcctgtgccgctttgcctacccctcatccctcggcaccaaggctacttgagccccagggtgttttttccttgttcccgccacctcctggtccctggcccaacatgatactgaccaaagctcagtacgacgagatagcccagtgcctagtgtctgtgccgcctaccaggcagagcctgaggaagctgaagcagaggtttcccagtcaatcgcaggccactctgctgagcatcttctcccaggagtaccagaaacacattaaaagaacacatgccaaacatcatacttcggaagcaattgaaagttattaccagaggtacctgaatggagtggtgaaaaatggagctgccccagtgctcctggacctggccaatgaggtggactatgcgccctcattaatggctcggcttatactggagaggtttctacaggaacacgaggaaactccaccctccaagtctattataaatagtatgctacgggacccttctcagattccagatggagttctagcaaatcaggtctatcagtgcattgtgaacgactgctgttacggaccactagtggactgcatcaagcatgccattggtcatgagcatgaggtcctgctgagagacttgcttctagagaaaaacctgtccttcctagatgaagatcagcttcgtgcaaagggttatgacaaaacaccagacttcattttacaagtaccagttgctgtagaagggcacataattcactggattgaaagcaaagcctcatttggtgatgaatgtagccaccacgcctacctgcatgaccagttctggagctactggaatagatttgggccaggcttagtcatctattggtatggatttatccaggagctggactgcaaccgggaaaggggcatcctgctcaaagcctgtttccccacgaacattgtcaccttatgccacagcatagcttgaccctgaagatcctggaagagaagctgggaggaaaaggtgaatccggaagcaattttactttcctgcactgtaagatcctggcaacatctgccctgaacttcagctgaactcttgctgcccgtagtcacaccactacctctttagacaaacatatcaagagtttctgttttccttcatcccttgctgatgtgaacagccaagaactacagacacaacccactcattatcagcatttctgtctctgtcaaacaattagtttatagatagtcataatctttctttcttccggatggtttatccttgtatgctgaacaaaagaaaaaatgtgaagactgaaaggtgtgatttttcaattctcctcccagttaccgaatcaccctcttatttttttttccctaagcctccgttcactgtctctccctctccctttctcttcatgtgcactcacagagacccagcattgcattaccatcgtggaataatctagcgcaaacctaggaaagctgaagccacaaagtccaaagccacctttgtactcacctgcagagctccagaagaccttgatggcagcctgcctatgctgtgtgtttgctatattcaatctttacggcttcctgacttctgtgacagtaagccaagtgcaaaaatacacttgatgagaatttcctcttttaataatgttatttgaacaccacatattttagatttatcttatttgaaagtattagttccattgtgcctggaaaccacactcctttagattgggggccgagaggcgacaacccaacattgaggagagtttatttttaaacatggctagttgtcagtatgtacgtgagctagtatttttatgagtcgagttttttaaaggcacattctgtatactgcttagtatatgcattttataccatgtaattataaaacactcgagtaagttcagcattagaaatgtttagctttgtatgaactgagtgtgccagaaataaacctggagcaatttttaaataagcaaaatattgtaggcgacaaagccttttttggccttaaacatttaactttcgtcctctcgtgag

SEQ ID NO: 351398 - DNA, 604 bp, Homo sapiens
tgtacagccagtccccgccgcggaggtgccggtggagcctgggaccgggcgagtctccgccccgcttttgcagctaggggtgtgtttcaggggggattggggcaagccaagcaggcgaggacccgggcctgtgccgctttgcctacccctcatccctcggcaccaaggctacttgagccccagggtgttttttccttgttcccgccacctcctggtccctggcccaacatgatactgaccaaagctcagtacgacgagatagcccagtgcctagtgtctgtgccgcctaccaggcagagcctgaggaagctgaagcagaggtttcccagaaacacattaaaagaacacatgccaaacatcatacttcggaagcaattgaaagttattaccagaggtacctgaatggagtggtgaaaaatggagctgccccagtgctcctggacctggccaatgaggtggactatgcgccctcattaatggctcggcttatactggagaggtttctacaggaacacgaggaaactccaccaagaccggagaaatactacttccaaatgcaaaggtgaattccactggtcttcctacaagaaaataaaaaagaaaa

SEQ ID NO: 351399 - DNA, 502 bp, Homo sapiens
tagggcgggtggtgaatcggcacgaggctggtccctggcccaacatgatactgaccaaagctcagtacgacgagatagcccagtgcctagtgtctgtgccgcctaccaggcagagcctgaggaagctgaagcagaggtttcccagtcaatcgcaggccactctgctgagcatcttctcccaggagtaccagaaacacattaaaagaacacatgccaaacatcatacttcggaagcaattgaaagttattaccagagggacaggccatgttgttacctttcagatggattgacctcagtagccttttgttggaaatgtgcaggtcaaatgttcctgtctgtgctaagagacaggtttcaccgtgcttgccaggatggtctcgatctcctgaccttgtgatccgcctgcctcggcctcccaaagtgctgggattataggtgtgaaccactgcacctggcctccaatgttctattattgtaaataaaactgtgataaacatcttg

SEQ ID NO: 351400 - DNA, 525 bp, Homo sapiens
ttttttttttgtcttcctctaccctcaaagcaaggccatttaacctcaagaaaaggaacactggatttaagtaaaatgtaggttgatttaatatattaacccttcctaaatttagtgtaaatctaaatacaaaataactttttattattattcaaggtttgaagatgtgtaggtgctgcaaattacgttagggctatgaaaacacccttataaaatttttatagaaatattgtggtgcctaaatagagaatcgtgaaatttttaaaaatcatgtataagaattaaattgagacaatgacccagagattctatttacttgaaaacttaagatagtgaagaaaacagatgggttgagatgtttcctatctgatccattaatttatttgggtgcgtcagtatgacctatgtataggatgatgtactctctgcttccacaaaaacacatgagctttcggtttccatggaaaccgttgtgagtagggctgtccaattccgggattagtcggccctcgtactacggcaggg

SEQ ID NO: 351401 - DNA, 102 bp, Homo sapiens
ctatgggaggattgttgttattattgcttgatttacatgctctcattttatacaaagtgtacagcacaatttctcaaagagtaattatgatgccaagaaaat

SEQ ID NO: 351402 - DNA, 568 bp, Homo sapiens
tctccggatgccaaaggatttgacagtgtatctagctttggaaacacagggggtctgccctgtgagctgctccaacaccttggctgctcgcgtcagtctgtctccactctccccaacacagatgttgagacagagtttgcggatgcgaagttcccgcatggggttcctcgtgccgctcgtgccgaatcggcacgagccgacattgccggcgtcttggcgattcggcccgacgagctccgctttcgctacagcatggtggcctactggagacaggctggactcagctacatccgatactcccagatctgtgcaaaagcagtgagagatgcactgaagacagaattcaaagcaaatgctgagaagacttctggcagcaacgtaaaaattgtgaaagtaaagaaggaataatctaccctgactaaagcttgaaatgctacatttccaaggtgaagatgtgtgggcacatgttatggcagattgaaaaggatctcattccatgggaaaaaaaaaaatcctgtcttgttcataaattgacaatgtcaataaattgaaatatggttcactgtta

SEQ ID NO: 351403 - DNA, 426 bp, Homo sapiens
  misc_feature (14)..(14): n is a, c, g, or t
taggtacgaggctnggtgttcgatcttcctgcggctgaaccgcccggctgagccgacattgccggcgtcttggcgattcggcccgacgagctccgctttcgctacagcatggtggcctactggagacaggctggactcagctacatccgatactcccagatctgtgcaaaagcagtgagagatgcactgaagacagaattcaaagcaaatgctgagaagacttctggcagcaacgtaaaaattgtgaaagtaaagaaggaataatctaccctgactaaagcttgaaatgctacatttccaaggtgaagatgtgtgggcacatgttatggcagattgaaaaggatctcattccatgggaaaaaaaaaaatcctgtcttgttcataaattggacaatgtcaataaattgaaatatggttcactggtta

SEQ ID NO: 351404 - DNA, 582 bp, Homo sapiens
  misc_feature (429)..(430): n is a, c, g, or t
  misc_feature (435)..(435): n is a, c, g, or t
  misc_feature (442)..(442): n is a, c, g, or t
gcggccgcctactactactaaattcgcggccgcgtcgaccgcccggctgagccgacattgccggcgtcttggcgattcggcccgacgagctccgctttcgctacagcatggtggcctactggagacaggctggactcagctacatccgatactcccagatctgtgcaaaagcagtgagagatgcactgaagacagaattcaaagcaaatgctgagaagacttctggcagcaacgtaaaaattgtgaaagtaaagaaggaataatctaccctgactaaagcttgaaatgctacatttccaaggtgaagatgtgtgggcacatgttatggcagattgaaaaggatctcattccatgggaaaaaaaaaaatcctgtcttgttcataaattgtcaataaattgaaatatggttcactgttaaaaaaaaaaaannatatnaaaaaanaaacattgtcgccggctcggcccagtcgactttagaattcggcaaggctatgcatggcgcccgaaatctgggtcacttggcaatttgccctaagggaggcgaatacaaatcactggccggcgtttacaaagttggaatgg

SEQ ID NO: 351405 - DNA, 465 bp, Homo sapiens
  misc_feature (16)..(16): n is a, c, g, or t
  misc_feature (33)..(33): n is a, c, g, or t
agtaaggtccccttcngccccaatgttggggantgaagtttactcaactgagatcaagacgacagaggtgctgatggagaacttccgcagggcccattgggctgcgaataaaggagaccaaggaagtttatgaaggtgaagtcacagagctaactccgtgtgagacaggctggactcagctacatccgatactcccagatctgtgcaaaagcagtgagagatgcactgaagacagaattcaaagcaaatgctgagaagacttctggcagcaacgtaaaaattgtgaaagtaaagaaggaataatctaccctgactaaagcttgaaatgctacatttccaaggtgaagatgtgtgggcacatgttatggcagattgaaaaggatctcattccatgggaaaaaaaaaaatcctgtcttgttcataaattggacaatgtcaataaattgaaatatggttcactggtta

SEQ ID NO: 351406 - DNA, 348 bp, Homo sapiens
ccttgcttctctttacttttccactctaggccacgatgccgcagtaccagacctggactcagctacatccgatactcccagatctgtgcaaaagcagtgagagatgcactgaagacagaattcaaagcaaatgctgagaagacttctggcagcaacgtaaaaattgtgaaagtaaagaaggaataatctaccctgactaaagcttgaaatgctacatttccaaggtgaagatgtgtgggcacatgttatggcagattgaaaaggatctcattccatgggaaaaaaaaaaatcctgtcttgttcataaattggacaatgtcaataaattgaaatatggttcactggtta

SEQ ID NO: 351407 - DNA, 649 bp, Homo sapiens
cttcgacatctagctccaggtccccattcttctatgaagacttccttgatcatgccaatataataatctcttccctttgggttcatggcctgtatcaaatgattctataaatcacagatcctagtctcttttttttttcttttttttagagtctgagtctcactctgttatccaggctgaagtacgatggcatgatctcagctcactgtaaccttcgcctcctgggctcttccgcttctgtggtctgatcttcctgcggctgaaccgcccggctgagccgacattgccggcgtcttggcgattcggcccgacgagctccgctttcgctacagcatggtggcctactggagacaggctggactcagctacatccgatactcccagatctgtgcaaaagcagtgagagatgcactgaagacagaattcaaagcaaatgctgagaagacttctggcagcaacgtaaaaattgtgaaagtaaagaaggaataatctaccctgactaaagcttgaaatgctacatttccaaggtgaagatgtgtgggcacatgttatggcagattgaaaaggatctcattccatgggaaaaaaaaaaatcctgtcttgttcataaattgacaatgtcaataaattgaaatatggttcactgtta

SEQ ID NO: 351408 - DNA, 424 bp, Homo sapiens
  misc_feature (14)..(14): n is a, c, g, or t
taggtacgaggctnggtgttcgatcttcctgcggctgaaccgcccggctgagccgacattgccggcgtcttggcgattcggcccgacgagctccgctttcgctacagcatggtggcctactggagacaggctggactcagctacatccgatactcccagatctgtgcaaaagcagtgagagatgcactgaagacagaattcaaagcaaatgctgagaagacttctggcagcaacgtaaaaattgtgaaagtaaagaaggaataatctaccctgactaaagcttgaaatgctacatttccaaggtgaagatgtgtgggcacatgttatggcagattgaaaaggatctcattccatgggaaaaaaaaaaatcctgtcttgttcataaattgacaatgtcaataaattgaaatatggttcactgtta

SEQ ID NO: 351409 - DNA, 442 bp, Homo sapiens
tgcagaccctgtttaagttgcgatcctcggcactgtggctactggatcttctgcgtgaaccgcttttgagccgacattgccggcgtcttggcgattcggcccgacgagctccgctttcgctacagcatggtggcctactggagacaggctggactcagctacatccgatactcccagatctgtgcaaaagcagtgagagatgcactgaagacagaattcaaagcaaatgctgagaagacttctggcagcaacgtaaaaattgtgaaagtaaagaaggaataatctaccctgactaaagcttgaaatgctacatttccaaggtgaagatgtgtgggcacatgttatggcagattgaaaaggatctcattccatgggaaaaaaaaaaatcctgtcttgttcataaattgacaatgtcaataaattgaaatatggttcactgtta

SEQ ID NO: 351410 - DNA, 423 bp, Homo sapiens
gcggccgcctactactactaaattcgcggccgcgtcgaccgcccggctgagccgacattgccggcgtcttggcgattcggcccgacgagctccgctttcgctacagcatggtggcctactggagacaggctggactcagctacatccgatactcccagatctgtgcaaaagcagtgagagatgcactgaagacagaattcaaagcaaatgctgagaagacttctggcagcaacgtaaaaattgtgaaagtaaagaaggaataatctaccctgactaaagcttgaaatgctacatttccaaggtgaagatgtgtgggcacatgttatggcagattgaaaaggatctcattccatgggaaaaaaaaaaatcctgtcttgttcataaattgacaatgtcaataaattgaaatatggttcactgtta

SEQ ID NO: 351411 - DNA, 872 bp, Homo sapiens
cttcgacatctagctccaggtccccattcttctatgaagacttccttgatcatgccaatataataatctcttccctttgggttcatggcctgtatcaaatgattctataaatcacagatcctagtctcttttttttttcttttttttagagtctgagtctcactctgttatccaggctgaagtacgatggcatgatctcagctcactgtaaccttcgcctcctgggctcttccgcttctgtggtctgatcttcctgcggctgaaccgcccggctgagccgacattgccggcgtcttggcgattcggcccgacgagctccgctttcgctacagcatggtggcctactggagacaggctggactcagctacatccgatactcccagatctgtgcaaaagcagtgagagatgcactgaagacagaattcaaagcaaatgctgagaagacttctggcagcaacgtaaaaattgtgaaagtaaagaaggaataatctaccctgactaaagcttgaaatgctacatttccaaggtgaagatgtgtgggcacatgttatggcagattgaaaaggatctcattccatgggaaaaaaaaaaatcctgtcttgttcataaattgacaatgtcaataaattgaaatatggttcactgttaaaaaaaaaaaaaaaaaaaaaaaaaaaaaaaaaaaaaaaaaaccaaaaaaaaaaaaaaaacattggcgccccttttcgccacacctctttttaacctgggcaatttttcaatcggcgcgcaaattgcgcccctttgcgccaatccccctaaagggggcggtattaccaataacacggcccggtttccggcgggcttggcccccgggggcccccacctatttccc

SEQ ID NO: 351412 - DNA, 1619 bp, Homo sapiens
cttcgacatctagctccaggtccccattcttctatgaagacttccttgatcatgccaatataataatctcttccctttgggttcatggcctgtatcaaatgattctataaatcacagatcctagtctcttttttttttcttttttttagagtctgagtctcactctgttatccaggctgaagtacgatggcatgatctcagctcactgtaaccttcgcctcctgggctcttccgcttctgtggtctgatcttcctgcggctgaaccgcccggctgagccgacattgccggcgtcttggcgattcggcccgacgagctccgctttcgctacagcatggtggcctactggagacaggctggactcagctacatccgatactcccagatctgtgcaaaagcagtgagagatgcactgaagacagaattcaaagcaaatgctgagaagacttctggcagcaacgtaaaaattgtgaaagtaaagaaggaataatctaccctgactaaagcttgaaatgctacatttccaaggtgaagatgtgtgggcacatgttatggcagattgaaaaggatctcattccatgggaaaaaaaaaaatcctgtcttgttcataaattgacaatgtcaataaattgaaatatggttcactgttaaaaaaaaaaaaaaaaaaaaaaaaaaaaaaaaaaaaaaggggggggccccccaaagatatatccccccgggagggcgcccccaagttcttggcgccgttccccgagttttttctggttcaccaggaggggcccccattagtaagggaggcgagggcttattataaagagcttagaggccagggggcgcgcgggtttttaataacaacggctcggcggatcgggggacaacacgtgtgcgtacacctggtggggggaacctcgtgcggagaaagagaggaacccctcttatctccgcggggggggggggggaaccaattattgggggcggacacaacttatcccctcacacaggagagattttttaaagaggtctctccagggggggacaaattttctaaaaccattttcaacgcggggtgctcacaaagcgtcggtggtctccaaccaccatcacacagtgtgcgcaaaatatatacactgtgtgacccgccgtccctctgacaacaaatttgttggcggccacacaccgcggggaaacttatagagactatctctgtcgggaaaccaccatctttttttttatcacgcgccgggagtacctttcgtggcctatgccacaaacaaaacccgggcgacaaccacacgaacccacggagaacaaagaacaaggcacgcgagaccgccacaggccagaacggcgaaacagcagacaaccaaaccgacccagagaaaccgagcgagagagcgcagggctgagagtccaaccggagcgtgggcgcccaccagaacaagcaagaacagacagcacaaggcagagaacgcgcctgacatacgggcaggaagagagtagcacacgagcaggcgtagccgacaccacaggaggcgacgaccagaggtacacagcacaacacaaaacaaaccaagaacacacaccaccgagctaagacacaacaaaaccaacaaccaaccc

SEQ ID NO: 351413 - DNA, 969 bp, Homo sapiens
  misc_feature (740)..(740): n is a, c, g, or t
cttcgacatctagctccaggtccccattcttctatgaagacttccttgatcatgccaatataataatctcttccctttgggttcatggcctgtatcaaatgattctataaatcacagatcctagtctcttttttttttcttttttttagagtctgagtctcactctgttatccaggctgaagtacgatggcatgatctcagctcactgtaaccttcgcctcctgggctcttccgcttctgtggtctgatcttcctgcggctgaaccgcccggctgagccgacattgccggcgtcttggcgattcggcccgacgagctccgctttcgctacagcatggtggcctactggagacaggctggactcagctacatccgatactcccagatctgtgcaaaagcagtgagagatgcactgaagacagaattcaaagcaaatgctgagaagacttctggcagcaacgtaaaaattgtgaaagtaaagaaggaataatctaccctgactaaagcttgaaatgctacatttccaaggtgaagatgtgtgggcacatgttatggcagattgaaaaggatctcattccatgggaaaaaaaaaaatcctgtcttgttcataaattgacaatgtcaataaattgaaatatggttcactgttaaaaaaaaaaaaaaaaaaaaaaaaaaaaaaaaaaaaaaaaaaaaaaaaaaaaaaaaataaaaaaaaaaaaaaaaaaaaaaaaaaaaaaaaancccttgtggcccccttggcccaattgatttttaaattggaccaagttaatccttgcggccgaatttggggctaattggccaatttccccttatggggagcggtttaaacattaatgggccggggtttacaccgctgggacgggaaaaccctggggtcccaattaaacgcctggaaaaatccccttttgcagagtgggtattacgaaaagcccgaccatcgctttccatt

SEQ ID NO: 351414 - DNA, 2512 bp, Homo sapiens
cttcgacatctagctccaggtccccattcttctatgaagacttccttgatcatgccaatataataatctcttccctttgggttcatggcctgtatcaaatgattctataaatcacagatcctagtctcttttttttttcttttttttagagtctgagtctcactctgttatccaggctgaagtacgatggcatgatctcagctcactgtaaccttcgcctcctgggctcttccgcttctgtggtctgatcttcctgcggctgaaccgcccggctgagccgacattgccggcgtcttggcgattcggcccgacgagctccgctttcgctacagcatggtggcctactggagacaggctggactcagctacatccgatactcccagatctgtgcaaaagcagtgagagatgcactgaagacagaattcaaagcaaatgctgagaagacttctggcagcaacgtaaaaattgtgaaagtaaagaaggaataatctaccctgactaaagcttgaaatgctacatttccaaggtgaagatgtgtgggcacatgttatggcagattgaaaaggatctcattccatgggaaaaaaaaaaatcctgtcttgttcataaattgacaatgtcaataaattgaaatatggttcactgttactcttgattttagtttggtgagactttttcattttctttaaaggaactgtctgcacaggtgcatgattatgggccatgtgaaccagggtttcttaaaagcaggggaagccagatttaatatttagtgaccaaagggatacagaaagcattttgaaaatgtctcaaaatagttgtttcatgacattaattggtgatcaaaattatctgctgtcattgaggcttcgtagtcccttatttttgaattgttgtcatgtcagaataatgacatggttatcagtaacaaatggaaataattattaaatactaaaagtgtagattagaagaagaaatactaaattgtacttgttttgtattgtgcacttaaagcctatagataagaacggttacagaatttaagcacaaagtgtttttcacattgttttgtaaatgaatctttatactctggtagcatttctcataggaaatgaggcaaagctattgaataacttgctcattgagttgatggccaaactgaaattaaaacctaggagttttgactgcaagtctgggacacggtgaccacaacagcagtttcgtggtatttccatagtgattcattcattcattatttagggatgaaaaattgttgcaagttatgtttttatctttctttgaaacttgaaagggcttgggcaagtaaaacaccattgcaaagttaactgcctgattttaactgtttttggagactggagaaataaatttgaactggaaattttgaaacaccattctaggatcagttctcacatggtacttaagctcacaatgatttatcagggccactgtcagcaatgccgaggataagccgaaaagaacatctttgttctcggcttctgggaatgacttattgtcccgacacttgacctgtaggttttactgaattctcagcacagagcgagcagggaggcagagccgattgagtggaagagggtgcctctggaaaacagcaggttaggagcccttggagtcctccgcctcggagctgtcatcctgctgttggcaagttagggcacctcagttcagtgctgtggcccccaagattaaggtactaggaagtatcctccattacagggaacaggaataaatgaatcaaaaagctatcgggcctttttgacatgggacgaataaagtaactaataggcaaaggggctaaatgatttccagtcaagtaattagagataagtcatttattaaggaggcagatggggtattattggtatatagatggcatagtagattgctagtatattggtagattattggtatatagatggtatgttaaggaggcagatggggtattactggtatatagatggtatggtagattggtagtatattggcagattattggtatatggtatgttgaggcagatggggtattactggtatatagatggcatagtagattggtagtatattggtagattattggtatagagatggtatattattaaggaggcagatggggtaattagaggtgagacttagggacagggcttgtgatatggaaaggagtgaagtcactgagtaaaagacaagtttactgtcagcagagattcttagaggctcttttctccgtgattaaaaaaaaatcctaaaccagtagtataataaacttcctgcctccagcagtgctgggtagctggcaggatgactgtgcccagtgatgaggtgaccccagtcagaccaacttaatgagtatcccactaattagttggatgatgtttgaagctgtcagttaatctcttagttcacatcgttcttgtgagcaaagtgaaggaatcggataagctctaaatttcggtgatgctgctgctctgagagacc

SEQ ID NO: 351415 - DNA, 1148 bp, Homo sapiens
cttcgacatctagctccaggtccccattcttctatgaagacttccttgatcatgccaatataataatctcttccctttgggttcatggcctgtatcaaatgattctataaatcacagatcctagtctcttttttttttcttttttttagagtctgagtctcactctgttatccaggctgaagtacgatggcatgatctcagctcactgtaaccttcgcctcctgggctcttccgcttctgtggtctgatcttcctgcggctgaaccgcccggctgagccgacattgccggcgtcttggcgattcggcccgacgagctccgctttcgctacagcatggtggcctactggagacaggctggactcagctacatccgatactcccagatctgtgcaaaagcagtgagagatgcactgaagacagaattcaaagcaaatgctgagaagacttctggcagcaacgtaaaaattgtgaaagtaaagaaggaataatctaccctgactaaagcttgaaatgctacatttccaaggtgaagatgtgtgggcacatgttatggcagattgaaaaggatctcattccatgggaaaaaaaaaaatcctgtcttgttcataaattgacaatgtcaataaattgaaatatggttcactgttactcttgattttagtttggtgagactttttcattttctttaaaggaactgtctgcacaggtgcatgattatgggccatgtgaaccagggtttcttaaaagcaggggaagccagatttaatatttagtgaccaaagggatacagaaagcattttgaaaatgtctcaaaatagttgtttcatgacattaattggtgatcaaaattatctgctgtcattgaggcttcgtagtccttatttgactgctgtcatgtgggatatgacggtatagtacatggattagtttacatattaagtggcatgcaggagaatactactggcggtggtggggctagcatggaagaagtaggattaggcaggtttcatgtggaagacttaacgggattatgagggcagatgaatgtctgtgtggagatacgagcttcacgtaggcaaagggttcctggatctaggagaggggtttggagggaagaaaaacgcttggtggtttgtgatctctgttt

SEQ ID NO: 351416 - DNA, 875 bp, Homo sapiens
  misc_feature (675)..(675): n is a, c, g, or t
  misc_feature (759)..(759): n is a, c, g, or t
  misc_feature (772)..(773): n is a, c, g, or t
  misc_feature (783)..(783): n is a, c, g, or t
  misc_feature (787)..(787): n is a, c, g, or t
  misc_feature (814)..(814): n is a, c, g, or t
  misc_feature (816)..(816): n is a, c, g, or t
  misc_feature (838)..(838): n is a, c, g, or t
  misc_feature (843)..(843): n is a, c, g, or t
cttcgacatctagctccaggtccccattcttctatgaagacttccttgatcatgccaatataataatctcttccctttgggttcatggcctgtatcaaatgattctataaatcacagatcctagtctcttttttttttcttttttttagagtctgagtctcactctgttatccaggctgaagtacgatggcatgatctcagctcactgtaaccttcgcctcctgggctcttccgcttctgtggtctgatcttcctgcggctgaaccgcccggctgagccgacattgccggcgtcttggcgattcggcccgacgagctccgctttcgctacagcatggtggcctactggagacaggctggactcagctacatccgatactcccagatctgtgcaaaagcagtgagagatgcactgaagacagaattcaaagcaaatgctgagaagacttctggcagcaacgtaaaaattgtgaaagtaaagaaggaataatctaccctgactaaagcttgaaatgctacatttccaaggtgaagatgtgtgggcacatgttatggcagattgaaaaggatctcattccatgggaaaaaaaaaaatcctgtcttgttcataaattgtcaataaattgaaatatggttcactgttactcttgaaaaaaaaaaaaaaaaaaaatccggnggcatcaatgcgggggggggaaaaagggggtattgagaatggcgcacactggggccaaaagcggtggttcccgggacccacagntttctctgggtgnnaaaggggggnaaantcgggcggggtcccccaaatagggagngncggaataaattccggaaaaccnagggntaacccggggatataaaaaatccggcaaaaga

SEQ ID NO: 351417 - DNA, 929 bp, Homo sapiens
  misc_feature (687)..(687): n is a, c, g, or t
  misc_feature (692)..(693): n is a, c, g, or t
  misc_feature (699)..(699): n is a, c, g, or t
cttcgacatctagctccaggtccccattcttctatgaagacttccttgatcatgccaatataataatctcttccctttgggttcatggcctgtatcaaatgattctataaatcacagatcctagtctcttttttttttcttttttttagagtctgagtctcactctgttatccaggctgaagtacgatggcatgatctcagctcactgtaaccttcgcctcctgggctcttccgcttctgtggtctgatcttcctgcggctgaaccgcccggctgagccgacattgccggcgtcttggcgattcggcccgacgagctccgctttcgctacagcatggtggcctactggagacaggctggactcagctacatccgatactcccagatctgtgcaaaagcagtgagagatgcactgaagacagaattcaaagcaaatgctgagaagacttctggcagcaacgtaaaaattgtgaaagtaaagaaggaataatctaccctgactaaagcttgaaatgctacatttccaaggtgaagatgtgtgggcacatgttatggcagattgaaaaggatctcattccatgggaaaaaaaaaaatcctgtcttgttcataaattgtcaataaattgaaatatggttcactgttaaaaaaaaaaaaaaaaaaaagaagaaaaaaaaaaaaaaaaacagnggggnntttttngggggggggagaaaaagagagagaaagagaagaagaggagcgcatagggcgcaaaaaggcggagtgacacatgagcacccacaagttctctcagtggtgcacaccaggggggagaaaaacacacggagaggtcctcctctatgaagggagcgcggtaactaataatgcagaaagacgcgcaggggataaacccggggctatacagtagaacccgccggggacaaccttgt

SEQ ID NO: 351418 - DNA, 896 bp, Homo sapiens
cttcgacatctagctccaggtccccattcttctatgaagacttccttgatcatgccaatataataatctcttccctttgggttcatggcctgtatcaaatgattctataaatcacagatcctagtctcttttttttttcttttttttagagtctgagtctcactctgttatccaggctgaagtacgatggcatgatctcagctcactgtaaccttcgcctcctgggctcttccgcttctgtggtctgatcttcctgcggctgaaccgcccggctgagccgacattgccggcgtcttggcgattcggcccgacgagctccgctttcgctacagcatggtggcctactggagacaggctggactcagctacatccgatactcccagatctgtgcaaaagcagtgagagatgcactgaagacagaattcaaagcaaatgctgagaagacttctggcagcaacgtaaaaattgtgaaagtaaagaaggaataatctaccctgactaaagcttgaaatgctacatttccaaggtgaagatgtgtgggcacatgttatggcagattgaaaaggatctcattccatgggaaaaaaaaaaatcctgtcttgttcataaattggacaatgtcaataaattgaaatatggttcactggttacaaagaacaagaagagatatacaatagacatacaaggaactacagactccatagataagcaaaaatgaggaaaacacatagcggccatctcttcccgggaggatgggaaacaagaagagacactaggcagagtggccacaggcgaggtgagagccaccgaactgctcagaacaggggctataatacctcgtccccagaaaagggaaggtaaggggcacacagaatgcacatgaggttcggaaaca

SEQ ID NO: 351419 - DNA, 1100 bp, Homo sapiens
cttcgacatctagctccaggtccccattcttctatgaagacttccttgatcatgccaatataataatctcttccctttgggttcatggcctgtatcaaatgattctataaatcacagatcctagtctcttttttttttcttttttttagagtctgagtctcactctgttatccaggctgaagtacgatggcatgatctcagctcactgtaaccttcgcctcctgggctcttccgcttctgtggtctgatcttcctgcggctgaaccgcccggctgagccgacattgccggcgtcttggcgattcggcccgacgagctccgctttcgctacagcatggtggcctactggagacaggctggactcagctacatccgatactcccagatctgtgcaaaagcagtgagagatgcactgaagacagaattcaaagcaaatgctgagaagacttctggcagcaacgtaaaaattgtgaaagtaaagaaggaataatctaccctgactaaagcttgaaatgctacatttccaaggtgaagatgtgtgggcacatgttatggcagattgaaaaggatctcattccatgggaaaaaaaaaaatcctgtcttgttcataaattgtcaataaattgaaatatggttcactgttaaaaaaaaaaaaacaaaaaaaaaaaataaaaaaaaaaaaaagagggggggcgcgccccaaaaaatttcccccggggggccccaatttccgcgctccccgtttttttgtaaaagggggcccccaataggggggcccccttttataagagcgagagggcggggggcgccggcgtttttaaacacacagcgcttgctggggcgggggaacaagccgtggtccacgctcggggctccctggtgggggagaggaacccttaacttctgcgggggggggggaccctctggttgggcgaacaaccatccccctcacgagggattttacgcccccgaggggcgacaatttctcaccctttacggggtggtcttctggggtgttaccccgcgctgtatatcctggcggctggagagtttgggccccgcgactttgtttcggacttttttcccggctgtggttaaagg

SEQ ID NO: 351420 - DNA, 647 bp, Homo sapiens
cttcgacatctagctccaggtccccattcttctatgaagacttccttgatcatgccaatataataatctcttccctttgggttcatggcctgtatcaaatgattctataaatcacagatcctagtctcttttttttttcttttttttagagtctgagtctcactctgttatccaggctgaagtacgatggcatgatctcagctcactgtaaccttcgcctcctgggctcttccgcttctgtggtctgatcttcctgcggctgaaccgcccggctgagccgacattgccggcgtcttggcgattcggcccgacgagctccgctttcgctacagcatggtggcctactggagacaggctggactcagctacatccgatactcccagatctgtgcaaaagcagtgagagatgcactgaagacagaattcaaagcaaatgctgagaagacttctggcagcaacgtaaaaattgtgaaagtaaagaaggaataatctaccctgactaaagcttgaaatgctacatttccaaggtgaagatgtgtgggcacatgttatggcagattgaaaaggatctcattccatgggaaaaaaaaaaatcctgtcttgttcataaattgacaatgtcaataaattgaaatatggttcactgt

SEQ ID NO: 351421 - DNA, 895 bp, Homo sapiens
cttcgacatctagctccaggtccccattcttctatgaagacttccttgatcatgccaatataataatctcttccctttgggttcatggcctgtatcaaatgattctataaatcacagatcctagtctcttttttttttcttttttttagagtctgagtctcactctgttatccaggctgaagtacgatggcatgatctcagctcactgtaaccttcgcctcctgggctcttccgcttctgtggtctgatcttcctgcggctgaaccgcccggctgagccgacattgccggcgtcttggcgattcggcccgacgagctccgctttcgctacagcatggtggcctactggagacaggctggactcagctacatccgatactcccagatctgtgcaaaagcagtgagagatgcactgaagacagaattcaaagcaaatgctgagaagacttctggcagcaacgtaaaaattgtgaaagtaaagaaggaataatctaccctgactaaagcttgaaatgctacatttccaaggtgaagatgtgtgggcacatgttatggcagattgaaaaggatctcattccaaaaaataaaaaaaaattaaacatataaaaataaatggcgataataaaaaaaaaaaaaaatcaaacaaaaaaaaaaccttgcccggccgcttgggccaagtagattttagattggggcaggtttatgcatgcgccccaatttggagctaatttggccatttcgccctatagggggccgtataacaatcaactggccgccggttaacaacgagcggccttggaaaaaaccctggggttaccaaactaaacggctctgaagaaaatcccctttttgccgggtgcggtaatagggaagaggcccccaccagtcgcctttcc

SEQ ID NO: 351422 - DNA, 1883 bp, Homo sapiens
  misc_feature (14)..(14): n is a, c, g, or t
taggtacgaggctnggtgttcgatcttcctgcggctgaaccgcccggctgagccgacattgccggcgtcttggcgattcggcccgacgagctccgctttcgctacagcatggtggcctactggagacaggctggactcagctacatccgatactcccagatctgtgcaaaagcagtgagagatgcactgaagacagaattcaaagcaaatgctgagaagacttctggcagcaacgtaaaaattgtgaaagtaaagaaggaataatctgtaagttatggatttatttagaagaacagttgcatcttaagtttttggagcaccataaagatcaaaataattttagttttgggttctattcattttttagtcagtgtatttggaagttagttattgggatggtataatttaaagcatgcaggttatagaagtcccctggcctaataaaaagaaagtcttcttgggccctgacaagcagaagtaattggcacattgattttcagttcatttagcaatgcttaggtagagagccatcgtatttgaattaaacctgtttcatttgtctgcacaaatcaaataatttggaggatgaactccccacttgtataattgcaattggagttacataacagtccaagagcatgaaaaactacagttctttacatttttatttcccccacaaccactaatgttctcacaaatcactacttcccgaacataataactacaggcacaggcaagggtcctgctgttgtatcaagcaataaaatctgcaagaccccgcagcgaatactgttttgctaatttattatgctttcagagggtttggttcattttacttttccaaagatgttggtgatgtaaagttaaattctcgtgaaataaaaaggtctgtacagttgataagtgtagacttttgtgttccacattataaaagtggtttgatctctaaagtactttcttgacattgttatttcaaaagtaggcaaggcaaattatcagagagatgtttttcagatttaatttttcttgttttgcttttaaaaagcttcagacccataatagcacagaaatgtgataaatattaatcctttggcagcttatggttatgagcaattttacttattggaactgtctcccctaagcacttttcattttcattttgaattagtaaatattttattacaagtctggagatgcagtgttttgaatttagccctttttctaggggctctctgtctaatctcataattctgagtaatgagacctggttttatgttgggttgttttgttttaacagtaagctaacagaaaatcatttagcctcactcggctcagagctgccagactgcatctaatgctgagattttgcaaagtcctgggggtcaggaagtagtgtccgatccccttaaacaaagcattagcccctctctgttatgcccttcagggttacagaccccacctcattagcacaaggagatgttagtgtcttttaaaggcaaagtagtttctttattctgggagagtgtttacttttactcagcaggaaaatgcctgcttgactaagcctgtgtacttgaaccagcactttttacatctgagccacggcaatgtgaatgatagccacagttatacagttcactataaggaagttatttcttatattcatgttgagtttttaagaaaacacagagaactagccagcaacttgcattttctttttcctcctagaccctgactaaagcttgaaatgctacatttccaaggtgaagatgtgtgggcacatgttatggcagattgaaaaggatctcattccatgggaaaaaaaaaaatcctgtcttgttcataaattgacaatgtcaataaattgaaatatggttcactgt

SEQ ID NO: 351423 - DNA, 958 bp, Homo sapiens
cttcgacatctagctccaggtccccattcttctatgaagacttccttgatcatgccaatataataatctcttccctttgggttcatggcctgtatcaaatgattctataaatcacagatcctagtctcttttttttttcttttttttagagtctgagtctcactctgttatccaggctgaagtacgatggcatgatctcagctcactgtaaccttcgcctcctgggctcttccgcttctgtggtctgatcttcctgcggctgaaccgcccggctgagccgacattgccggcgtcttggcgattcggcccgacgagctccgctttcgctacagcatggtggcctactggagacaggctggactcagctacatccgatactcccagatctgtgcaaaagcagtgagagatgcactgaagacagaattcaaagcaaatgctgagaagacttctggcagcaacgtaaaaattgtgaaagtaaagaaggaataatctaccctgactaaagcttgaaatgctacatttccaaggttgggaagtaaagcaccagaggaagcatgtgtaaatccttgtataatcgcaggctgtaagtctttagcatctcaggaagttactaacttcaaactaagtatataggtagagtttcttactaaatctagtgcttcttgaaccacaagtagaaagcatttaaaacatgaatgttgttttgtgttttttgaagtttgtaaatagaagacttgttgatgatccgatggcaaggtatttttctcttggtatgtattttagttatttcctcgtgatgcataagtgaaaagagtgaagtttctcagaatgagcaactgtcatccatctacctgctatttgtattattgctgattacaaaagcaaatcaagagatgagaacccagttgcctgcaagtaaatatttactgcttgacgggtcggagcattttcccattac

SEQ ID NO: 351424 - DNA, 770 bp, Homo sapiens
  misc_feature (14)..(14): n is a, c, g, or t
taggtacgaggctnggtgttcgatcttcctgcggctgaaccgcccggctgagccgacattgccggcgtcttggcgattcggcccgacgagctccgctttcgctacagcatggtggcctactggagacaggctggactcagctacatccgatactcccagatctgtgcaaaagcagtgagagatgcactgaagacagaattcaaagcaaatgctgagaagacttctggcagcaacgtaaaaattgtgaaagtaaagaaggaataatcttgggaagtaaagcaccagaggaagcatgtgtaaatccttgtataatcgcaggctgtaagtctttagcatctcaggaagttactaacttcaaactaagtatataggtagagtttcttactaaatctagtgcttcttgaaccacaagtagaaagcatttaaaacatgaaaaaaaaaaaaaaacaaaaaaaaaaaaaatttttggggcgcccctggcccccgggaaaaagagttttttaacacccatttcgtttgggcgccgcgcgccccgtttggtgttgtctagacacattgtcatatagcgtgttctccccaaggggagactccgcgggcatatggaatatggtgtgtttggggttctctcccccaagtaaaaaaaagcgcccgggggggaacccgaggtgtgttttgacaaatccccagatggggtctccggggcactcactggctcttctaaccggggtcccaggaagcctttgaataccgccgcagccacgtgtggaggt

SEQ ID NO: 351425 - DNA, 696 bp, Homo sapiens
  misc_feature (14)..(14): n is a, c, g, or t
taggtacgaggctnggtgttcgatcttcctgcggctgaaccgcccggctgagccgacattgccggcgtcttggcgattcggcccgacgagctccgctttcgctacagcatggtggcctactggagacaggctggactcagctacatccgatactcccagatctgtgcaaaagcagtgagagatgcactgaagacagaattcaaagcaaatgctgagaagacttctggcagcaacgtaaaaattgtgaaagtaaagaaggaataatcttgggaagtaaagcaccagaggaagcatgtgtaaatccttgtataatcgcaggctgtaagtctttagcatctcaggaagttactaacttcaaactaagtatataggtagagtttcttactaaatctagtgcttcttgaaccacaagtagaaagcatttaaaacatgaatgttgttttgtgttttttgaagtttgtaaatagaagacttgttgatgatccgatggcaaggtatttttctcttggtatgtattttagttatttcctcgtgatgcataagtgaaaagagtgaagtttctcagaatgagcaactgtcatccatctacctgctatttgtattattgctgattacaaaagcaaatcaagagatgagaacccagttgcctgcaagtaaatatttactgcttgacgggtcggagcattttcccattac

SEQ ID NO: 351426 - DNA, 668 bp, Homo sapiens
  misc_feature (468)..(468): n is a, c, g, or t
  misc_feature (552)..(552): n is a, c, g, or t
  misc_feature (565)..(566): n is a, c, g, or t
  misc_feature (576)..(576): n is a, c, g, or t
  misc_feature (580)..(580): n is a, c, g, or t
  misc_feature (607)..(607): n is a, c, g, or t
  misc_feature (609)..(609): n is a, c, g, or t
  misc_feature (631)..(631): n is a, c, g, or t
  misc_feature (636)..(636): n is a, c, g, or t
tgcagaccctgtttaagttgcgatcctcggcactgtggctactggatcttctgcgtgaaccgcttttgagccgacattgccggcgtcttggcgattcggcccgacgagctccgctttcgctacagcatggtggcctactggagacaggctggactcagctacatccgatactcccagatctgtgcaaaagcagtgagagatgcactgaagacagaattcaaagcaaatgctgagaagacttctggcagcaacgtaaaaattgtgaaagtaaagaaggaataatctaccctgactaaagcttgaaatgctacatttccaaggtgaagatgtgtgggcacatgttatggcagattgaaaaggatctcattccatgggaaaaaaaaaaatcctgtcttgttcataaattgtcaataaattgaaatatggttcactgttactcttgaaaaaaaaaaaaaaaaaaaatccggnggcatcaatgcgggggggggaaaaagggggtattgagaatggcgcacactggggccaaaagcggtggttcccgggacccacagntttctctgggtgnnaaaggggggnaaantcgggcggggtcccccaaatagggagngncggaataaattccggaaaaccnagggntaacccggggatataaaaaatccggcaaaaga

SEQ ID NO: 351427 - DNA, 565 bp, Homo sapiens
cagagtccaaacagtgcccagagtccaaacagtgcccagagtccaaacagtgctcagagtccaaacagtgcccagatccaaacagtgcccagagtccaaacagtgctcagagtccaaacagtgcccagagtccaaacagtgcccagagtccaaacagtgcccagagtccaaacagtgcccagagtccaaagagccgacattgccggcgtcttggcgattcggcccgacgagctccgctttcgctacagcatggtggcctactggagacaggctggactcagctacatccgatactcccagatctgtgcaaaagcagtgagagatgcactgaagacagaattcaaagcaaatgctgagaagacttctggcagcaacgtaaaaattgtgaaagtaaagaaggaataatctaccctgactaaagcttgaaatgctacatttccaaggtgaagatgtgtgggcacatgttatggcagattgaaaaggatctcattccatgggaaaaaaaaaaatcctgtcttgttcataaattgacaatgtcaataaattgaaatatggttcactgtta

SEQ ID NO: 351428 - DNA, 791 bp, Homo sapiens
tctccggatgccaaaggatttgacagtgtatctagctttggaaacacagggggtctgccctgtgagctgctccaacaccttggctgctcgcgtcagtctgtctccactctccccaacacagatgttgagacagagtttgcggatgcgaagttcccgcatggggttcctcgtgccgctcgtgccgaatcggcacgagccgacattgccggcgtcttggcgattcggcccgacgagctccgctttcgctacagcatggtggcctactggagacaggctggactcagctacatccgatactcccagatctgtgcaaaagcagtgagagatgcactgaagacagaattcaaagcaaatgctgagaagacttctggcagcaacgtaaaaattgtgaaagtaaagaaggaataatctaccctgactaaagcttgaaatgctacatttccaaggtgaagatgtgtgggcacatgttatggcagattgaaaaggatctcattccatgggaaaaaaaaaaatcctgtcttgttcataaattgacaatgtcaataaattgaaatatggttcactgttaaaaaaaaaaaaaaaaaaaaaaaaaaaaaaaaaaaaaaaaaaccaaaaaaaaaaaaaaaacattggcgccccttttcgccacacctctttttaacctgggcaatttttcaatcggcgcgcaaattgcgcccctttgcgccaatccccctaaagggggcggtattaccaataacacggcccggtttccggcgggcttggcccccgggggcccccacctatttccc

SEQ ID NO: 351429 - DNA, 721 bp, Homo sapiens
  misc_feature (674)..(674): n is a, c, g, or t
  misc_feature (718)..(718): n is a, c, g, or t
  misc_feature (721)..(721): n is a, c, g, or t
cttcgacatctagctccaggtccccattcttctatgaagacttccttgatcatgccaatataataatctcttccctttgggttcatggcctgtatcaaatgattctataaatcacagatcctagtctcttttttttttcttttttttagagtctgagtctcactctgttatccaggctgaagtacgatggcatgatctcagctcactgtaaccttcgcctcctgggctcttccgcttctgtggtctgatcttcctgcggctgaaccgcccggctgagccgacattgccggcgtcttggcgattcggcccgacgagctccgctttcgctacagcatggtggcctactggagacaggctggactcagctacatccgatactcccagatctgtgcaaaagcagtgagagatgcactgaagacagaattcaaagcaaatgctgagaagacttctggcagcaacgtaaaaattgtgaaagtaaagaaggaataatctaccctgactaaagcttgaaatgctacatttccaaggtgaagatgtgtgggcacatgttatggcagattgaaaaggatctcattccatgggaaaaaaaaaaatcctgtcttgttcataaattggacaatgtcaataaattgaaatatggttcactggttattactccttaaacaaaaaaaccnaaaacaaacacacccccacccccctcaccccaaaaaaacaaaanaan

SEQ ID NO: 351430 - DNA, 1019 bp, Homo sapiens
  misc_feature (750)..(750): n is a, c, g, or t
  misc_feature (752)..(752): n is a, c, g, or t
  misc_feature (754)..(754): n is a, c, g, or t
cttcgacatctagctccaggtccccattcttctatgaagacttccttgatcatgccaatataataatctcttccctttgggttcatggcctgtatcaaatgattctataaatcacagatcctagtctcttttttttttcttttttttagagtctgagtctcactctgttatccaggctgaagtacgatggcatgatctcagctcactgtaaccttcgcctcctgggctcttccgcttctgtggtctgatcttcctgcggctgaaccgcccggctgagccgacattgccggcgtcttggcgattcggcccgacgagctccgctttcgctacagcatggtggcctactggagacaggctggactcagctacatccgatactcccagatctgtgcaaaagcagtgagagatgcactgaagacagaattcaaagcaaatgctgagaagacttctggcagcaacgtaaaaattgtgaaagtaaagaaggaataatctaccctgactaaagcttgaaatgctacatttccaaggtgaagatgtgtgggcacatgttatggcagattgaaaaggatctcattccatgggaaaaaaaaaaatcctgtcttgttcataaattggacaatgtcaataaattgaaatatggttcactggttaaaaaaaaaaaaaaaaaaaaaaaaaaaaaaaaaaaaaaaaaaaaaaaaaaaaaaaaaaaaaaaaaaaaaaaaaaaaaaaaaaaaaaaaaaaaaaaaaaananangggggggggaggaggacgaaaaggccgaggggggagagaaaccaggacagggacacaccagaagaagacagacgacagacgggaggaaaaagaagcgagagggagagaaaaaagagagagggaggagaaaaggagagggaggaagaagagcgagagggagatgggggtgggaaagtgaggaggaaggggaaaaatgaggaacgaagaggaaaacgagagggataggggacaagatgaaaagaggggaaagacgcgcgaaggagac

SEQ ID NO: 351431 - DNA, 238 bp, Homo sapiens
gcgtggtaccactgcagggtgggtaagggagatggaggtctctccaggagatgggtgaggaaactgtctcctaaccacttcctccggcaccacctgcccataaagtgcatgcccccggcagcaccttcccataaatcacatttgcggccacctttcaaagcactgactcggaggccaacgccaacaaaagcttttgtagcataaaatgattgggacaaatcatagccaaactaaaaac

SEQ ID NO: 351432 - DNA, 1266 bp, Homo sapiens
tagtcggagcgaggtggcgagtcgctgagcccgccgcggccccgagagcggctgcagccgccgccgccgggaaggagagggcgaggcgcgcccgagccgccgccgccgccgccaccgccgccgccgccaccaccgccaccggagtcgcgggccagccgggcagcctccgcgggccccggccggggcggggggcgcgggccacaggcccctgctccggccgccgcttgcagaccgcgggcgccgatgtcgcccgcgccccgctaggctgagcctcgggtcgggcgaggagccgccgcagccgccgccgcccgagccgcgggcaggagcctcgggagccgccgccgccgccgccgccgcccggccgggccccgccgccgcccgcgcgcccccgggcccccgacacacatgagattcttcaggctcactttcaagtgcttcgtggactgcttctgactgcgccgcccgcgccccgcaccccgccgcccgcccgccgccccgtcccccggcccggccgccccccggcccccggccggcccgcgccctcggggccctccccggtgccgccggtgccccccgcctgaccgccgccccccgtgaggcgccgcgaccccggcccggccgtgcggcccgccggggccatggcgaagaagagcgccgagaacggcatctatagcgtgtccggcgacgagaagaagggccccctcatcgcgcccgggcccgacggggccccggccaagggcgacggccccgtgggcctggggacacccggcggccgcctggccgtgccgccgcgcgagacctggacgcgccagatggacttcatcatgtcgtgcgtgggcttcgccgtgggcttgggcaacgtgtggcgcttcccctacctgtgctacaagaacggcggaggtgtgttccttattccctacgtcctgatcgccctggttggaggaatccccattttcttcttagagatctcgctgggccagttcatgaaggccggcagcatcaatgtctggaacatctgtcccctgttcaaaggtgagcagcccttggccagcctcagggactgcccccttctcccagctggctcccacttgagaaatcttttcctgtcgtgagcaccaggcctggggccacgtgatggcgtcccagtctcgaggggggagcctggaggagatgttcaggacgctggggcacagacaggtggagcgacgtactgaggttgcccactgcaggggcgactgtctccaacactacctcaggcgactagaa

SEQ ID NO: 351433 - DNA, 3164 bp, Homo sapiens
gggcacgcgtgtgtcctgtgactacaaaacagcactggggttgctggaagccgaagtgacccggtgatgggtgggaaacagaggtccagagcaaaggcctttgcccaaggtcaggagaaggatgctgggacctggagtcaggtgtgttccttattccctacgtcctgatcgccctggttggaggaatccccattttcttcttagagatctcgctgggccagttcatgaaggccggcagcatcaatgtctggaacatctgtcccctgttcaaaggcctgggctacgcctccatggtgatcgtcttctactgcaacacctactacatcatggtgctggcctggggcttctattacctggtcaagtcctttaccaccacgctgccctgggccacatgtggccacacctggaacactcccgactgcgtggagatcttccgccatgaagactgtgccaatgccagcctggccaacctcacctgtgaccagcttgctgaccgccggtcccctgtcatcgagttctgggagaacaaagtcttgaggctgtctgggggactggaggtgccaggggccctcaactgggaggtgaccctttgtctgctggcctgctgggtgctggtctacttctgtgtctggaagggggtcaaatccacgggaaagatcgtgtacttcactgctacattcccctacgtggtcctggtcgtgctgctggtgcgtggagtgctgctgcctggcgccctggatggcatcatttactatctcaagcctgactggtcaaagctggggtcccctcaggtgtggatagatgcggggacccagattttcttttcttacgccattggcctgggggccctcacagccctgggcagctacaaccgcttcaacaacaactgctacaaggacgccatcatcctggctctcatcaacagtgggaccagcttctttgctggcttcgtggtcttctccatcctgggcttcatggctgcagagcagggcgtgcacatctccaaggtggcagagtcagggccgggcctggccttcatcgcctacccgcgggctgtcacgctgatgccagtggccccactctgggctgccctgttcttcttcatgctgttgctgcttggtctcgacagccagtttgtaggtgtggagggcttcatcaccggcctcctcgacctcctcccggcctcctactacttccgtttccaaagggagatctctgtggccctctgttgtgccctctgctttgtcatcgatctctccatggtgactgatggcgggatgtacgtcttccagctgtttgactactactcggccagcggcaccaccctgctctggcaggccttttgggagtgcgtggtggtggcctgggtgtacggagctgaccgcttcatggacgacattgcctgtatgatcgggtaccgaccttgcccctggatgaaatggtgctggtccttcttcaccccgctggtctgcatgggcatcttcatcttcaacgttgtgtactacgagccgctggtctacaacaacacctacgtgtacccgtggtggggtgaggccatgggctgggccttcgccctgtcctccatgctgtgcgtgccgctgcacctcctgggctgcctcctcagggccaagggcaccatggctgagcgctggcagcacctgacccagcccatctggggcctccaccacttggagtaccgagctcaggacgcagatgtcaggggcctgaccaccctgaccccagtgtccgagagcagcaaggtcgtcgtggtggagagtgtcatgtgacaactcagctcacatcaccagctcacctctggtagccatagcagcccctgcttcagccccaccgcacccctccagggggcctgcctttccctgacacttttggggtctgcctgggggaggaggggagaaagcaccatgagtgctcactaaaacaactttttccatttttaataaaacgccaaaaatatcacaacccaccaaaaatagatgcctctccccctccagccctagccgagctggtcctaggccccgcctagtgccccacccccacccacagtgctgcactcctcctgcccctgccacgcccaccccctgcccacctctccaggctctgctctgcagcacacccgtgggtgacccctcaccccagaagcagcagtggcagcttgggaaatgtgaggaagggaaggagggagagacgggagggaggagagagaggagaagggaggcaggggaggggcagcagaaccaaggcaaatatttcagctgggctatacccctctccccatccctgttatagaagcttagagagccagccagcaatggaaccttctggttcctgcgccaatcgccaccagtatcaattgtgtgagcttgggtgcgagtgcacgcgtgcgtgagtacggagagtatatatagatctctatctcttagcaaaggtgaatgccagatgtaaatggcgcctctgggcaaaggaggcttgtattttgcacattttataaaaacttgagagaatgagatttctgcttgtatatttctaaaaagaggaaggagcccaaaccatcctctccttaccactcccatccctgtgagccctaccttacccctctgcccctagccaaggagtgtgaatttatagatctaactttcataggcaaaacaaaagcttcgagctgttgcgtgtgtgagtctgttgtgtggatgtgcgtgtgtggtccccagccccagactggattggaaaagtgcatggtgggggcctcggggctgtccccacgctgtccctttgccacaagtctgtggggcaagaggctgcaatattccgtcctgggtgtctgggctgctaacctggcctgctcaggcttcccaccctgtgcggggcacacccccaggaagggaccctggacacggctcccacgtccaggcttaaggtggatgcacttcccgcacctccagtcttctgtgtagcagctttaacccacgtttgtctgtcacgtccagtcccgagacggctgagtgaccccaagaaaggcttccccgacacccagacagaggctgcagggctggggctgggtgagggtggcgggcctgcggggacattctactgtgctaaaaagccactgcagacatagcaataaaaacatgtcattttccaagcag

SEQ ID NO: 351434 - DNA, 3573 bp, Homo sapiens
tagtcggagcgaggtggcgagtcgctgagcccgccgcggccccgagagcggctgcagccgccgccgccgggaaggagagggcgaggcgcgcccgagccgccgccgccgccgccaccgccgccgccgccaccaccgccaccggagtcgcgggccagccgggcagcctccgcgggccccggccggggcggggggcgcgggccacaggcccctgctccggccgccgcttgcagaccgcgggcgccgatgtcgcccgcgccccgctaggctgagcctcgggtcgggcgaggagccgccgcagccgccgccgcccgagccgcgggcaggagcctcgggagccgccgccgccgccgccgccgcccggccgggccccgccgccgcccgcgcgcccccgggcccccgacacacatgagattcttcaggctcactttcaagtgcttcgtggactgcttctgactgcgccgcccgcgccccgcaccccgccgcccgcccgccgccccgtcccccggcccggccgccccccggcccccggccggcccgcgccctcggggccctccccggtgccgccggtgccccccgcctgaccgccgccccccgtgaggcgccgcgaccccggcccggccgtgcggcccgccggggccatggcgaagaagagcgccgagaacggcatctatagcgtgtccggcgacgagaagaagggccccctcatcgcgcccgggcccgacggggccccggccaagggcgacggccccgtgggcctggggacacccggcggccgcctggccgtgccgccgcgcgagacctggacgcgccagatggacttcatcatgtcgtgcgtgggcttcgccgtgggcttgggcaacgtgtggcgcttcccctacctgtgctacaagaacggcggaggtgtgttccttattccctacgtcctgatcgccctggttggaggaatccccattttcttcttagagatctcgctgggccagttcatgaaggccggcagcatcaatgtctggaacatctgtcccctgttcaaaggcctgggctacgcctccatggtgatcgtcttctactgcaacacctactacatcatggtgctggcctggggcttctattacctggtcaagtcctttaccaccacgctgccctgggccacatgtggccacacctggaacactcccgactgcgtggagatcttccgccatgaagactgtgccaatgccagcctggccaacctcacctgtgaccagcttgctgaccgccggtcccctgtcatcgagttctgggagaacaaagtcttgaggctgtctgggggactggaggtgccaggggccctcaactgggaggtgaccctttgtctgctggcctgctgggtgctggtctacttctgtgtctggaagggggtcaaatccacgggaaagatcgtgtacttcactgctacattcccctacgtggtcctggtcgtgctgctggtgcgtggagtgctgctgcctggcgccctggatggcatcatttactatctcaagcctgactggtcaaagctggggtcccctcaggtgtggatagatgcggggacccagattttcttttcttacgccattggcctgggggccctcacagccctgggcagctacaaccgcttcaacaacaactgctacaaggacgccatcatcctggctctcatcaacagtgggaccagcttctttgctggcttcgtggtcttctccatcctgggcttcatggctgcagagcagggcgtgcacatctccaaggtggcagagtcagggccgggcctggccttcatcgcctacccgcgggctgtcacgctgatgccagtggccccactctgggctgccctgttcttcttcatgctgttgctgcttggtctcgacagccagtttgtaggtgtggagggcttcatcaccggcctcctcgacctcctcccggcctcctactacttccgtttccaaagggagatctctgtggccctctgttgtgccctctgctttgtcatcgatctctccatggtgactgatggcgggatgtacgtcttccagctgtttgactactactcggccagcggcaccaccctgctctggcaggccttttgggagtgcgtggtggtggcctgggtgtacggagctgaccgcttcatggacgacattgcctgtatgatcgggtaccgaccttgcccctggatgaaatggtgctggtccttcttcaccccgctggtctgcatgggcatcttcatcttcaacgttgtgtactacgagccgctggtctacaacaacacctacgtgtacccgtggtggggtgaggccatgggctgggccttcgccctgtcctccatgctgtgcgtgccgctgcacctcctgggctgcctcctcagggccaagggcaccatggctgagcgctggcagcacctgacccagcccatctggggcctccaccacttggagtaccgagctcaggacgcagatgtcaggggcctgaccaccctgaccccagtgtccgagagcagcaaggtcgtcgtggtggagagtgtcatgtgacaactcagctcacatcaccagctcacctctggcagcttgggaaatgtgaggaagggaaggagggagagacgggagggaggagagagaggagaagggaggcaggggaggggcagcagaaccaaggcaaatatttcagctgggctatacccctctccccatccctgttatagaagcttagagagccagccagcaatggaaccttctggttcctgcgccaatcgccaccagtatcaattgtgtgagcttgggtgcgagtgcacgcgtgcgtgagtacggagagtatatatagatctctatctcttagcaaaggtgaatgccagatgtaaatggcgcctctgggcaaaggaggcttgtattttgcacattttataaaaacttgagagaatgagatttctgcttgtatatttctaaaaagaggaaggagcccaaaccatcctctccttaccactcccatccctgtgagccctaccttacccctctgcccctagccaaggagtgtgaatttatagatctaactttcataggcaaaacaaaagcttcgagctgttgcgtgtgtgagtctgttgtgtggatgtgcgtgtgtggtccccagccccagactggattggaaaagtgcatggtgggggcctcggggctgtccccacgctgtccctttgccacaagtctgtggggcaagaggctgcaatattccgtcctgggtgtctgggctgctaacctggcctgctcaggcttcccaccctgtgcggggcacacccccaggaagggaccctggacacggctcccacgtccaggcttaaggtggatgcacttcccgcacctccagtcttctgtgtagcagctttaacccacgtttgtctgtcacgtccagtcccgagacggctgagtgaccccaagaaaggcttccccgacacccagacagaggctgcagggctggggctgggtgagggtggcgggcctgcggggacattctactgtgctaaaaagccactgcagacatagcaataaaaacatgtcattttccaagcag

SEQ ID NO: 351435 - DNA, 2859 bp, Homo sapiens
tcggaactgaggccatgattaagagggctggcctggggcttctattacctggtcaagtcctttaccaccacgctgccctgggccacatgtggccacacctggaacactcccgactgcgtggagatcttccgccatgaagactgtgccaatgccagcctggccaacctcacctgtgaccagcttgctgaccgccggtcccctgtcatcgagttctgggagaacaaagtcttgaggctgtctgggggactggaggtgccaggggccctcaactgggaggtgaccctttgtctgctggcctgctgggtgctggtctacttctgtgtctggaagggggtcaaatccacgggaaagatcgtgtacttcactgctacattcccctacgtggtcctggtcgtgctgctggtgcgtggagtgctgctgcctggcgccctggatggcatcatttactatctcaagcctgactggtcaaagctggggtcccctcaggtgtggatagatgcggggacccagattttcttttcttacgccattggcctgggggccctcacagccctgggcagctacaaccgcttcaacaacaactgctacaaggacgccatcatcctggctctcatcaacagtgggaccagcttctttgctggcttcgtggtcttctccatcctgggcttcatggctgcagagcagggcgtgcacatctccaaggtggcagagtcagggccgggcctggccttcatcgcctacccgcgggctgtcacgctgatgccagtggccccactctgggctgccctgttcttcttcatgctgttgctgcttggtctcgacagccagtttgtaggtgtggagggcttcatcaccggcctcctcgacctcctcccggcctcctactacttccgtttccaaagggagatctctgtggccctctgttgtgccctctgctttgtcatcgatctctccatggtgactgatggcgggatgtacgtcttccagctgtttgactactactcggccagcggcaccaccctgctctggcaggccttttgggagtgcgtggtggtggcctgggtgtacggagctgaccgcttcatggacgacattgcctgtatgatcgggtaccgaccttgcccctggatgaaatggtgctggtccttcttcaccccgctggtctgcatgggcatcttcatcttcaacgttgtgtactacgagccgctggtctacaacaacacctacgtgtacccgtggtggggtgaggccatgggctgggccttcgccctgtcctccatgctgtgcgtgccgctgcacctcctgggctgcctcctcagggccaagggcaccatggctgagcgctggcagcacctgacccagcccatctggggcctccaccacttggagtaccgagctcaggacgcagatgtcaggggcctgaccaccctgaccccagtgtccgagagcagcaaggtcgtcgtggtggagagtgtcatgtgacaactcagctcacatcaccagctcacctctggtagccatagcagcccctgcttcagccccaccgcacccctccagggggcctgcctttccctgacacttttggggtctgcctgggggaggaggggagaaagcaccatgagtgctcactaaaacaactttttccatttttaataaaacgccaaaaatatcacaacccaccaaaaatagatgcctctccccctccagccctagccgagctggtcctaggccccgcctagtgccccacccccacccacagtgctgcactcctcctgcccctgccacgcccaccccctgcccacctctccaggctctgctctgcagcacacccgtgggtgacccctcaccccagaagcagcagtggcagcttgggaaatgtgaggaagggaaggagggagagacgggagggaggagagagaggagaagggaggcaggggaggggcagcagaaccaaggcaaatatttcagctgggctatacccctctccccatccctgttatagaagcttagagagccagccagcaatggaaccttctggttcctgcgccaatcgccaccagtatcaattgtgtgagcttgggtgcgagtgcacgcgtgcgtgagtacggagagtatatatagatctctatctcttagcaaaggtgaatgccagatgtaaatggcgcctctgggcaaaggaggcttgtattttgcacattttataaaaacttgagagaatgagatttctgcttgtatatttctaaaaagaggaaggagcccaaaccatcctctccttaccactcccatccctgtgagccctaccttacccctctgcccctagccaaggagtgtgaatttatagatctaactttcataggcaaaacaaaagcttcgagctgttgcgtgtgtgagtctgttgtgtggatgtgcgtgtgtggtccccagccccagactggattggaaaagtgcatggtgggggcctcggggctgtccccacgctgtccctttgccacaagtctgtggggcaagaggctgcaatattccgtcctgggtgtctgggctgctaacctggcctgctcaggcttcccaccctgtgcggggcacacccccaggaagggaccctggacacggctcccacgtccaggcttaaggtggatgcacttcccgcacctccagtcttctgtgtagcagctttaacccacgtttgtctgtcacgtccagtcccgagacggctgagtgaccccaagaaaggcttccccgacacccagacagaggctgcagggctggggctgggtgagggtggcgggcctgcggggacattctactgtgctaaaaagccactgcagacatagcaataaaaacatgtcattttccaagcag

SEQ ID NO: 351436 - DNA, 3361 bp, Homo sapiens
ggaggtgaccagacagagtctagccctaaggaagggggaggtactgaaagccaagcaatgctccccaccctgcaaatccagggcccagcagcctttgctcctggggatagaggccctggcaggcactgtcccttccctgtgcccatcacccccactggtgccctcctgccagtctctgactcttgtgacagtctggtggacctggtctggccatctgttacctatcttgccttggggacccagagcagagtctggccacatcccttgggggctcctggtcaggctggggagtcacctgaacaaagaagacagtgtctagagctgtgggacatggccagctccctgggggacaaggtccccagagcagcatgtgggaagagggggcagacagtgtggcagctgcatctcgcctgcctctgcctggcccagttccactctccacctgctcaacccccacctctctccagaagaggagggggacccgacccggatccaatatcccgctccctgcctgggcctcccacacctgcactgcccacacactcatacagctctcactccccacgtgctccacgcctcctgtccccactgaggagagctcccagaggctcgcctgctccccaccgacacgcgtccctgcagacaaacgaggcgcccagggagcttccccactgcacttggccagggctgccggggcgcagccttgcccctagcttcctctggcgggagccatggctcggaggacaatggggacctctgaacatacctgcccgcaagggggaccggaggcgctgggagtgggggtgtgagggaggtggtgccacagcctccgctgagcagcctggccccccagatcgtgtacttcactgctacattcccctacgtggtcctggtcgtgctgctggtgcgtggagtgctgctgcctggcgccctggatggcatcatttactatctcaagcctgactggtcaaagctggggtcccctcaggtgtggatagatgcggggacccagattttcttttcttacgccattggcctgggggccctcacagccctgggcagctacaaccgcttcaacaacaactgctacaaggacgccatcatcctggctctcatcaacagtgggaccagcttctttgctggcttcgtggtcttctccatcctgggcttcatggctgcagagcagggcgtgcacatctccaaggtggcagagtcagggccgggcctggccttcatcgcctacccgcgggctgtcacgctgatgccagtggccccactctgggctgccctgttcttcttcatgctgttgctgcttggtctcgacagccagtttgtaggtgtggagggcttcatcaccggcctcctcgacctcctcccggcctcctactacttccgtttccaaagggagatctctgtggccctctgttgtgccctctgctttgtcatcgatctctccatggtgactgatggcgggatgtacgtcttccagctgtttgactactactcggccagcggcaccaccctgctctggcaggccttttgggagtgcgtggtggtggcctgggtgtacggagctgaccgcttcatggacgacattgcctgtatgatcgggtaccgaccttgcccctggatgaaatggtgctggtccttcttcaccccgctggtctgcatgggcatcttcatcttcaacgttgtgtactacgagccgctggtctacaacaacacctacgtgtacccgtggtggggtgaggccatgggctgggccttcgccctgtcctccatgctgtgcgtgccgctgcacctcctgggctgcctcctcagggccaagggcaccatggctgagcgctggcagcacctgacccagcccatctggggcctccaccacttggagtaccgagctcaggacgcagatgtcaggggcctgaccaccctgaccccagtgtccgagagcagcaaggtcgtcgtggtggagagtgtcatgtgacaactcagctcacatcaccagctcacctctggtagccatagcagcccctgcttcagccccaccgcacccctccagggggcctgcctttccctgacacttttggggtctgcctgggggaggaggggagaaagcaccatgagtgctcactaaaacaactttttccatttttaataaaacgccaaaaatatcacaacccaccaaaaatagatgcctctccccctccagccctagccgagctggtcctaggccccgcctagtgccccacccccacccacagtgctgcactcctcctgcccctgccacgcccaccccctgcccacctctccaggctctgctctgcagcacacccgtgggtgacccctcaccccagaagcagcagtggcagcttgggaaatgtgaggaagggaaggagggagagacgggagggaggagagagaggagaagggaggcaggggaggggcagcagaaccaaggcaaatatttcagctgggctatacccctctccccatccctgttatagaagcttagagagccagccagcaatggaaccttctggttcctgcgccaatcgccaccagtatcaattgtgtgagcttgggtgcgagtgcacgcgtgcgtgagtacggagagtatatatagatctctatctcttagcaaaggtgaatgccagatgtaaatggcgcctctgggcaaaggaggcttgtattttgcacattttataaaaacttgagagaatgagatttctgcttgtatatttctaaaaagaggaaggagcccaaaccatcctctccttaccactcccatccctgtgagccctaccttacccctctgcccctagccaaggagtgtgaatttatagatctaactttcataggcaaaacaaaagcttcgagctgttgcgtgtgtgagtctgttgtgtggatgtgcgtgtgtggtccccagccccagactggattggaaaagtgcatggtgggggcctcggggctgtccccacgctgtccctttgccacaagtctgtggggcaagaggctgcaatattccgtcctgggtgtctgggctgctaacctggcctgctcaggcttcccaccctgtgcggggcacacccccaggaagggaccctggacacggctcccacgtccaggcttaaggtggatgcacttcccgcacctccagtcttctgtgtagcagctttaacccacgtttgtctgtcacgtccagtcccgagacggctgagtgaccccaagaaaggcttccccgacacccagacagaggctgcagggctggggctgggtgagggtggcgggcctgcggggacattctactgtgctaaaaagccactgcagacatagcaataaaaacatgtcattttccaagcag

SEQ ID NO: 351437 - DNA, 3483 bp, Homo sapiens
tagtcggagcgaggtggcgagtcgctgagcccgccgcggccccgagagcggctgcagccgccgccgccgggaaggagagggcgaggcgcgcccgagccgccgccgccgccgccaccgccgccgccgccaccaccgccaccggagtcgcgggccagccgggcagcctccgcgggccccggccggggcggggggcgcgggccacaggcccctgctccggccgccgcttgcagaccgcgggcgccgatgtcgcccgcgccccgctaggctgagcctcgggtcgggcgaggagccgccgcagccgccgccgcccgagccgcgggcaggagcctcgggagccgccgccgccgccgccgccgcccggccgggccccgccgccgcccgcgcgcccccgggcccccgacacacatgagattcttcaggctcactttcaagtgcttcgtggactgcttctgactgcgccgcccgcgccccgcaccccgccgcccgcccgccgccccgtcccccggcccggccgccccccggcccccggccggcccgcgccctcggggccctccccggtgccgccggtgccccccgcctgaccgccgccccccgtgaggcgccgcgaccccggcccggccgtgcggcccgccggggccatggcgaagaagagcgccgagaacggcatctatagcgtgtccggcgacgagaagaagggccccctcatcgcgcccgggcccgacggggccccggccaagggcgacggccccgtgggcctggggacacccggcggccgcctggccgtgccgccgcgcgagacctggacgcgccagatggacttcatcatgtcgtgcgtgggcttcgccgtgggcttgggcaacgtgtggcgcttcccctacctgtgctacaagaacggcggaggtgtgttccttattccctacgtcctgatcgccctggttggaggaatccccattttcttcttagagatctcgctgggccagttcatgaaggccggcagcatcaatgtctggaacatctgtcccctgttcaaaggcctgggctacgcctccatggtgatcgtcttctactgcaacacctactacatcatggtgctggcctggggcttctattacctggtcaagtcctttaccaccacgctgccctgggccacatgtggccacacctggaacactcccgactgcgtggagatcttccgccatgaagactgtgccaatgccagcctggccaacctcacctgtgaccagcttgctgaccgccggtcccctgtcatcgagttctgggagaacaaagtcttgaggctgtctgggggactggaggtgccaggggccctcaactgggaggtgaccctttgtctgctggcctgctgggtgctggtctacttctgtgtctggaagggggtcaaatccacgggaaagatcgtgtacttcactgctacattcccctacgtggtcctggtcgtgctgctggtgcgtggagtgctgctgcctggcgccctggatggcatcatttactatctcaagcctgactggtcaaagctggggtcccctcaggtgtggatagatgcggggacccagattttcttttcttacgccattggcctgggggccctcacagccctgggcagctacaaccgcttcaacaacaactgctacaaggacgccatcatcctggctctcatcaacagtgggaccagcttctttgctggcttcgtggtcttctccatcctgggcttcatggctgcagagcagggcgtgcacatctccaaggtggcagagtcagggccgggcctggccttcatcgcctacccgcgggctgtcacgctgatgccagtggccccactctgggctgccctgttcttcttcatgctgttgctgcttggtctcgacagccagtttgtaggtgtggagggcttcatcaccggcctcctcgacctcctcccggcctcctactacttccgtttccaaagggagatctctgtggccctctgttgtgccctctgctttgtcatcgatctctccatggtgactgatggcgggatgtacgtcttccagctgtttgactactactcggccagcggcaccaccctgctctggcaggccttttgggagtgcgtggtggtggcctgggtgtacggagctgaccgcttcatggacgacattgcctgtatgatcgggtaccgaccttgcccctggatgaaatggtgctggtccttcttcaccccgctggtctgcatgggcatcttcatcttcaacgttgtgtactacgagccgctggtctacaacaacacctacgtgtacccgtggtggggtgaggccatgggctgggccttcgccctgtcctccatgctgtgcgtgccgctgcacctcctgggctgcctcctcagggccaagggcaccatggctgagcgctggcagcacctgacccagcccatctggggcctccaccacttggagtaccgagctcaggacgcagatgtcaggggcctgaccaccctgaccccagtgtccgagagcagcaaggtcgtcgtggtggagagtgtcatgtgacaactcagctcacatcaccagctcacctctggtagccatagcagcccctgcttcagccccaccgcacccctccagggggcctgcctttccctgacacttttggggtctgcctgggggaggaggggagaaagcaccatgagtgctcactaaaacaactttttccatttttaataaaaaaaaaaacaaaaaaaacaacaaaaaaaaaccatttggggggggcgtgggcccttggggaaaaaagtttttaagaccccattcggtttggggggggggggcccacagaagtgttaggcgaacccatggcgccacaagacgcgtggtccccaaaaagaagaaacccggggtcacagaccaagaggtggttggggagtttctcacagccaaaattaaaaaaaagaggcgccggggggagacacacgacgaacgcggtcgtggaacacacaccccaacaaagagcaggagttccgagagcggccatacacgggcgtctctatccacaccaggggaggtcacaggcggagcgctgaggattaattaaaattaaccacggcccaggcggagtgggagacgaccaggtccgccgtggacgagtagcgaacacaagacgagtaaagaacgagcgcaagcagcgacaggacgaggaaacagaggagactcgcgccgcgcgggcagagaggagaaagcaacacgcgacatcgggcgagcgaacgagcccacgagggaacgacgagaggacgcagcgccaagagagacgtgagcaaacgaaagcacgaccgacggaaggcggagagagcaacactcagcacgcgagcagagagaagaaggagcaaaagccgggcggaacccacgacggaacgtaagcagagccacaagcaagagaaagcgacagacgaagaaacggacagttgacgagcaggcgatagagcgcgaagagccc

SEQ ID NO: 351438 - DNA, 2734 bp, Homo sapiens
tagtcggagcgaggtggcgagtcgctgagcccgccgcggccccgagagcggctgcagccgccgccgccgggaaggagagggcgaggcgcgcccgagccgccgccgccgccgccaccgccgccgccgccaccaccgccaccggagtcgcgggccagccgggcagcctccgcgggccccggccggggcggggggcgcgggccacaggcccctgctccggccgccgcttgcagaccgcgggcgccgatgtcgcccgcgccccgctaggctgagcctcgggtcgggcgaggagccgccgcagccgccgccgcccgagccgcgggcaggagcctcgggagccgccgccgccgccgccgccgcccggccgggccccgccgccgcccgcgcgcccccgggcccccgacacacatgagattcttcaggctcactttcaagtgcttcgtggactgcttctgactgcgccgcccgcgccccgcaccccgccgcccgcccgccgccccgtcccccggcccggccgccccccggcccccggccggcccgcgccctcggggccctccccggtgccgccggtgccccccgcctgaccgccgccccccgtgaggcgccgcgaccccggcccggccgtgcggcccgccggggccatggcgaagaagagcgccgagaacggcatctatagcgtgtccggcgacgagaagaagggccccctcatcgcgcccgggcccgacggggccccggccaagggcgacggccccgtgggcctggggacacccggcggccgcctggccgtgccgccgcgcgagacctggacgcgccagatggacttcatcatgtcgtgcgtgggcttcgccgtgggcttgggcaacgtgtggcgcttcccctacctgtgctacaagaacggcggaggtgtgttccttattccctacgtcctgatcgccctggttggaggaatccccattttcttcttagagatctcgctgggccagttcatgaaggccggcagcatcaatgtctggaacatctgtcccctgttcaaaggcctgggctacgcctccatggtgatcgtcttctactgcaacacctactacatcatggtgctggcctggggcttctattacctggtcaagtcctttaccaccacgctgccctgggccacatgtggccacacctggaacactcccgactgcgtggagatcttccgccatgaagactgtgccaatgccagcctggccaacctcacctgtgaccagcttgctgaccgccggtcccctgtcatcgagttctgggagaacaaagtcttgaggctgtctgggggactggaggtgccaggggccctcaactgggaggtgaccctttgtctgctggcctgctgggtgctggtctacttctgtgtctggaagggggtcaaatccacgggaaagatcgtgtacttcactgctacattcccctacgtggtcctggtcgtgctgctggtgcgtggagtgctgctgcctggcgccctggatggcatcatttactatctcaagcctgactggtcaaagctggggtcccctcaggtgtggatagatgcggggacccagattttcttttcttacgccattggcctgggggccctcacagccctgggcagctacaaccgcttcaacaacaactgctacaaggacgccatcatcctggctctcatcaacagtgggaccagcttctttgctggcttcgtggtcttctccatcctgggcttcatggctgcagagcagggcgtgcacatctccaaggtggcagagtcagggccgggcctggccttcatcgcctacccgcgggctgtcacgctgatgccagtggccccactctgggctgccctgttcttcttcatgctgttgctgcttggtctcgacagccagtttgtaggtgtggagggcttcatcaccggcctcctcgacctcctcccggcctcctactacttccgtttccaaagggagatctctgtggccctctgttgtgccctctgctttgtcatcgatctctccatggtgactgatggcgggatgtacgtcttccagctgtttgactactactcggccagcggcaccaccctgctctggcaggccttttgggagtgcgtggtggtggcctgggtgtacggagctgaccgcttcatggacgacattgcctgtatgatcgggtaccgaccttgcccctggatgaaatggtgctggtccttcttcaccccgctggtctgcatgggcatcttcatcttcaacgttgtgtactacgagccgctggtctacaacaacacctacgtgtacccgtggtggggtgaggccatgggctgggccttcgccctgtcctccatgctgtgcgtgccgctgcacctcctgggctgcctcctcagggccaagggcaccatggctgagcgctggcagcacctgacccagcccatctggggcctccaccacttggagtaccgagctcaggacgcagatgtcaggggcctgaccaccctgaccccagtgtccgagagcagcaaggtcgtcgtggtggagagtgtcatgtgacaactcagctcacatcaccagctcacctctcccgagacggctgagtgaccccaagaaaggcttccccgacacccagacagaggctgcagggctggggctgggtgagggtggcgggcctgcggggacattctactgtgctaaaaagccactgcagacatagcaataaaaacatgtcattttccaagcag

SEQ ID NO: 351439 - DNA, 773 bp, Homo sapiens
tggacagcgacagcacagaggaggtggacagcacagaggaggtggacagcacagagggttggacagcacagaggaggtggacagcgcaaaggaggcttgtattttgcacattttataaaaacttgagagaatgagatttctgcttgtatatttctaaaaagaggaaggagcccaaaccatcctctccttaccactcccatccctgtgagccctaccttacccctctgcccctagccaaggagtgtgaatttatagatctaactttcataggcaaaacaaaagcttcgagctgttgcgtgtgtgagtctgttgtgtggatgtgcgtgtgtggtccccagccccagactggattggaaaagtgcatggtgggggcctcggggctgtccccacgctgtccctttgccacaagtctgtggggcaagaggctgcaatattccgtcctgggtgtctgggctgctaacctggcctgctcaggcttcccaccctgtgcggggcacacccccaggaagggaccctggacacggctcccacgtccaggcttaaggtggatgcacttcccgcacctccagtcttctgtgtagcagctttaacccacgtttgtctgtcacgtccagtcccgagacggctgagtgaccccaagaaaggcttccccgacacccagacagaggctgcagggctggggctgggtgagggtggcgggcctgcggggacattctactgtgctaaaaagccactgcagacatagcaataaaaacatgtcattttccaagcag

SEQ ID NO: 351440 - DNA, 357 bp, Homo sapiens
ggtgaccctgggggcttcagcatgtcctcctctcctgcagcgctggcagcacctgacccagcccatctggggcctccaccacttggagtaccgagctcaggacgcagatgtcaggggcctgaccaccctgaccccagtgtccgagagcagcaaggtcgtcgtggtggagagtgtcatgtgacaactcagctcacatcaccagctcacctctggtagccatagcagcccctgcttcagccccaccgcacccctccagggggcctgcctttccctgacacttttggggtctgcctgggggaggaggggagaaagcaccatgagtgctcactaaaacaactttttccatttttaataaaa

SEQ ID NO: 351441 - DNA, 3923 bp, Homo sapiens
tagtcggagcgaggtggcgagtcgctgagcccgccgcggccccgagagcggctgcagccgccgccgccgggaaggagagggcgaggcgcgcccgagccgccgccgccgccgccaccgccgccgccgccaccaccgccaccggagtcgcgggccagccgggcagcctccgcgggccccggccggggcggggggcgcgggccacaggcccctgctccggccgccgcttgcagaccgcgggcgccgatgtcgcccgcgccccgctaggctgagcctcgggtcgggcgaggagccgccgcagccgccgccgcccgagccgcgggcaggagcctcgggagccgccgccgccgccgccgccgcccggccgggccccgccgccgcccgcgcgcccccgggcccccgacacacatgagattcttcaggctcactttcaagtgcttcgtggactgcttctgactgcgccgcccgcgccccgcaccccgccgcccgcccgccgccccgtcccccggcccggccgccccccggcccccggccggcccgcgccctcggggccctccccggtgccgccggtgccccccgcctgaccgccgccccccgtgaggcgccgcgaccccggcccggccgtgcggcccgccggggccatggcgaagaagagcgccgagaacggcatctatagcgtgtccggcgacgagaagaagggccccctcatcgcgcccgggcccgacggggccccggccaagggcgacggccccgtgggcctggggacacccggcggccgcctggccgtgccgccgcgcgagacctggacgcgccagatggacttcatcatgtcgtgcgtgggcttcgccgtgggcttgggcaacgtgtggcgcttcccctacctgtgctacaagaacggcggaggtgtgttccttattccctacgtcctgatcgccctggttggaggaatccccattttcttcttagagatctcgctgggccagttcatgaaggccggcagcatcaatgtctggaacatctgtcccctgttcaaaggcctgggctacgcctccatggtgatcgtcttctactgcaacacctactacatcatggtgctggcctggggcttctattacctggtcaagtcctttaccaccacgctgccctgggccacatgtggccacacctggaacactcccgactgcgtggagatcttccgccatgaagactgtgccaatgccagcctggccaacctcacctgtgaccagcttgctgaccgccggtcccctgtcatcgagttctgggagaacaaagtcttgaggctgtctgggggactggaggtgccaggggccctcaactgggaggtgaccctttgtctgctggcctgctgggtgctggtctacttctgtgtctggaagggggtcaaatccacgggaaagatcgtgtacttcactgctacattcccctacgtggtcctggtcgtgctgctggtgcgtggagtgctgctgcctggcgccctggatggcatcatttactatctcaagcctgactggtcaaagctggggtcccctcaggtgtggatagatgcggggacccagattttcttttcttacgccattggcctgggggccctcacagccctgggcagctacaaccgcttcaacaacaactgctacaaggacgccatcatcctggctctcatcaacagtgggaccagcttctttgctggcttcgtggtcttctccatcctgggcttcatggctgcagagcagggcgtgcacatctccaaggtggcagagtcagggccgggcctggccttcatcgcctacccgcgggctgtcacgctgatgccagtggccccactctgggctgccctgttcttcttcatgctgttgctgcttggtctcgacagccagtttgtaggtgtggagggcttcatcaccggcctcctcgacctcctcccggcctcctactacttccgtttccaaagggagatctctgtggccctctgttgtgccctctgctttgtcatcgatctctccatggtgactgatggcgggatgtacgtcttccagctgtttgactactactcggccagcggcaccaccctgctctggcaggccttttgggagtgcgtggtggtggcctgggtgtacggagctgaccgcttcatggacgacattgcctgtatgatcgggtaccgaccttgcccctggatgaaatggtgctggtccttcttcaccccgctggtctgcatgggcatcttcatcttcaacgttgtgtactacgagccgctggtctacaacaacacctacgtgtacccgtggtggggtgaggccatgggctgggccttcgccctgtcctccatgctgtgcgtgccgctgcacctcctgggctgcctcctcagggccaagggcaccatggctgagcgctggcagcacctgacccagcccatctggggcctccaccacttggagtaccgagctcaggacgcagatgtcaggggcctgaccaccctgaccccagtgtccgagagcagcaaggtcgtcgtggtggagagtgtcatgtgacaactcagctcacatcaccagctcacctctggtagccatagcagcccctgcttcagccccaccgcacccctccagggggcctgcctttccctgacacttttggggtctgcctgggggaggaggggagaaagcaccatgagtgctcactaaaacaactttttccatttttaataaaacgccaaaaatatcacaacccaccaaaaatagatgcctctccccctccagccctagccgagctggtcctaggccccgcctagtgccccacccccacccacagtgctgcactcctcctgcccctgccacgcccaccccctgcccacctctccaggctctgctctgcagcacacccgtgggtgacccctcaccccagaagcagcagtggcagcttgggaaatgtgaggaagggaaggagggagagacgggagggaggagagagaggagaagggaggcaggggaggggcagcagaaccaaggcaaatatttcagctgggctatacccctctccccatccctgttatagaagcttagagagccagccagcaatggaaccttctggttcctgcgccaatcgccaccagtatcaattgtgtgagcttgggtgcgagtgcacgcgtgcgtgagtacggagagtatatatagatctctatctcttagcaaaggtgaatgccagatgtaaatggcgcctctgggcaaaggaggcttgtattttgcacattttataaaaacttgagagaatgagatttctgcttgtatatttctaaaaagaggaaggagcccaaaccatcctctccttaccactcccatccctgtgagccctaccttacccctctgcccctagccaaggagtgtgaatttatagatctaactttcataggcaaaacaaaagcttcgagctgttgcgtgtgtgagtctgttgtgtggatgtgcgtgtgtggtccccagccccagactggattggaaaagtgcatggtgggggcctcggggctgtccccacgctgtccctttgccacaagtctgtggggcaagaggctgcaatattccgtcctgggtgtctgggctgctaacctggcctgctcaggcttcccaccctgtgcggggcacacccccaggaagggaccctggacacggctcccacgtccaggcttaaggtggatgcacttcccgcacctccagtcttctgtgtagcagctttaacccacgtttgtctgtcacgtccagtcccgagacggctgagtgaccccaagaaaggcttccccgacacccagacagaggctgcagggctggggctgggtgagggtggcgggcctgcggggacattctactgtgctaaaaagccactgcagacatagcaataaaaacatgtcattttccaagcag

SEQ ID NO: 351442 - DNA, 2722 bp, Homo sapiens
tagtcggagcgaggtggcgagtcgctgagcccgccgcggccccgagagcggctgcagccgccgccgccgggaaggagagggcgaggcgcgcccgagccgccgccgccgccgccaccgccgccgccgccaccaccgccaccggagtcgcgggccagccgggcagcctccgcgggccccggccggggcggggggcgcgggccacaggcccctgctccggccgccgcttgcagaccgcgggcgccgatgtcgcccgcgccccgctaggctgagcctcgggtcgggcgaggagccgccgcagccgccgccgcccgagccgcgggcaggagcctcgggagccgccgccgccgccgccgccgcccggccgggccccgccgccgcccgcgcgcccccgggcccccgacacacatgagattcttcaggctcactttcaagtgcttcgtggactgcttctgactgcgccgcccgcgccccgcaccccgccgcccgcccgccgccccgtcccccggcccggccgccccccggcccccggccggcccgcgccctcggggccctccccggtgccgccggtgccccccgcctgaccgccgccccccgtgaggcgccgcgaccccggcccggccgtgcggcccgccggggccatggcgaagaagagcgccgagaacggcatctatagcgtgtccggcgacgagaagaagggccccctcatcgcgcccgggcccgacggggccccggccaagggcgacggccccgtgggcctggggacacccggcggccgcctggccgtgccgccgcgcgagacctggacgcgccagatggacttcatcatgtcgtgcgtgggcttcgccgtgggcttgggcaacgtgtggcgcttcccctacctgtgctacaagaacggcggaggtgtgttccttattccctacgtcctgatcgccctggttggaggaatccccattttcttcttagagatctcgctgggccagttcatgaaggccggcagcatcaatgtctggaacatctgtcccctgttcaaaggcctgggctacgcctccatggtgatcgtcttctactgcaacacctactacatcatggtgctggcctggggcttctattacctggtcaagtcctttaccaccacgctgccctgggccacatgtggccacacctggaacactcccgactgcgtggagatcttccgccatgaagactgtgccaatgccagcctggccaacctcacctgtgaccagcttgctgaccgccggtcccctgtcatcgagttctgggagaacaaagtcttgaggctgtctgggggactggaggtgccaggggccctcaactgggaggtgaccctttgtctgctggcctgctgggtgctggtctacttctgtgtctggaagggggtcaaatccacgggaaagatcgtgtacttcactgctacattcccctacgtggtcctggtcgtgctgctggtgcgtggagtgctgctgcctggcgccctggatggcatcatttactatctcaagcctgactggtcaaagctggggtcccctcaggtgtggatagatgcggggacccagattttcttttcttacgccattggcctgggggccctcacagccctgggcagctacaaccgcttcaacaacaactgctacaaggacgccatcatcctggctctcatcaacagtgggaccagcttctttgctggcttcgtggtcttctccatcctgggcttcatggctgcagagcagggcgtgcacatctccaaggtggcagagtcagggccgggcctggccttcatcgcctacccgcgggctgtcacgctgatgccagtggccccactctgggctgccctgttcttcttcatgctgttgctgcttggtctcgacagccagtttgtaggtgtggagggcttcatcaccggcctcctcgacctcctcccggcctcctactacttccgtttccaaagggagatctctgtggccctctgttgtgccctctgctttgtcatcgatctctccatggtgactgatggcgggatgtacgtcttccagctgtttgactactactcggccagcggcaccaccctgctctggcaggccttttgggagtgcgtggtggtggcctgggtgtacggagctgaccgcttcatggacgacattgcctgtatgatcgggtaccgaccttgcccctggatgaaatggtgctggtccttcttcaccccgctggtctgcatgggcatcttcatcttcaacgttgtgtactacgagccgctggtctacaacaacacctacgtgtacccgtggtggggtgaggccatgggctgggccttcgccctgtcctccatgctgtgcgtgccgctgcacctcctgggctgcctcctcagggccaagggcaccatggctgagcgctggcagcacctgacccagcccatctggggcctccaccacttggagtaccgagctcaggacgcagatgtcaggggcctgaccaccctgaccccagtgtccgagagcagcaaggtcgtcgtggtggagagtgtcatgtgacaactcagctcacatcaccagctcacctctggtagccatagcagcccctgcttcagccccaccgcacccctccagggggcctgcctttccctgacacttttggggtctgcctgggggaggaggggagaaagcaccatgagtgctcactaaaacaactttttccatttttaataaaa

SEQ ID NO: 351443 - DNA, 3963 bp, Homo sapiens
tagtcggagcgaggtggcgagtcgctgagcccgccgcggccccgagagcggctgcagccgccgccgccgggaaggagagggcgaggcgcgcccgagccgccgccgccgccgccaccgccgccgccgccaccaccgccaccggagtcgcgggccagccgggcagcctccgcgggccccggccggggcggggggcgcgggccacaggcccctgctccggccgccgcttgcagaccgcgggcgccgatgtcgcccgcgccccgctaggctgagcctcgggtcgggcgaggagccgccgcagccgccgccgcccgagccgcgggcaggagcctcgggagccgccgccgccgccgccgccgcccggccgggccccgccgccgcccgcgcgcccccgggcccccgacacacatgagattcttcaggctcactttcaagtgcttcgtggactgcttctgactgcgccgcccgcgccccgcaccccgccgcccgcccgccgccccgtcccccggcccggccgccccccggcccccggccggcccgcgccctcggggccctccccggtgccgccggtgccccccgcctgaccgccgccccccgtgaggcgccgcgaccccggcccggccgtgcggcccgccggggccatggcgaagaagagcgccgagaacggcatctatagcgtgtccggcgacgagaagaagggccccctcatcgcgcccgggcccgacggggccccggccaagggcgacggccccgtgggcctggggacacccggcggccgcctggccgtgccgccgcgcgagacctggacgcgccagatggacttcatcatgtcgtgcgtgggcttcgccgtgggcttgggcaacgtgtggcgcttcccctacctgtgctacaagaacggcggaggtgtgttccttattccctacgtcctgatcgccctggttggaggaatccccattttcttcttagagatctcgctgggccagttcatgaaggccggcagcatcaatgtctggaacatctgtcccctgttcaaaggcctgggctacgcctccatggtgatcgtcttctactgcaacacctactacatcatggtgctggcctggggcttctattacctggtcaagtcctttaccaccacgctgccctgggccacatgtggccacacctggaacactcccgactgcgtggagatcttccgccatgaagactgtgccaatgccagcctggccaacctcacctgtgaccagcttgctgaccgccggtcccctgtcatcgagttctgggagaacaaagtcttgaggctgtctgggggactggaggtgccaggggccctcaactgggaggtgaccctttgtctgctggcctgctgggtgctggtctacttctgtgtctggaagggggtcaaatccacgggaaagatcgtgtacttcactgctacattcccctacgtggtcctggtcgtgctgctggtgcgtggagtgctgctgcctggcgccctggatggcatcatttactatctcaagcctgactggtcaaagctggggtcccctcaggtgtggatagatgcggggacccagattttcttttcttacgccattggcctgggggccctcacagccctgggcagctacaaccgcttcaacaacaactgctacaaggacgccatcatcctggctctcatcaacagtgggaccagcttctttgctggcttcgtggtcttctccatcctgggcttcatggctgcagagcagggcgtgcacatctccaaggtggcagagtcagggccgggcctggccttcatcgcctacccgcgggctgtcacgctgatgccagtggccccactctgggctgccctgttcttcttcatgctgttgctgcttggtctcgacagccagtttgtaggtgtggagggcttcatcaccggcctcctcgacctcctcccggcctcctactacttccgtttccaaagggagatctctgtggccctctgttgtgccctctgctttgtcatcgatctctccatggtgactgatggcgggatgtacgtcttccagctgtttgactactactcggccagcggcaccaccctgctctggcaggccttttgggagtgcgtggtggtggcctgggtgtacggagctgaccgcttcatggacgacattgcctgtatgatcgggtaccgaccttgcccctggatgaaatggtgctggtccttcttcaccccgctggtctgcatgggcatcttcatcttcaacgttgtgtactacgagccgctggtctacaacaacacctacgtgtacccgtggtggggtgaggccatgggctgggccttcgccctgtcctccatgctgtgcgtgccgctgcacctcctgggctgcctcctcagggccaagggcaccatggctgagcgctggcagcacctgacccagcccatctggggcctccaccacttggagtaccgagctcaggacgcagatgtcaggggcctgaccaccctgaccccagtgtccgagagcagcaaggtcgtcgtggtggagagtgtcatgtgacaactcagctcacatcaccagctcacctctggtagccatagcagcccctgcttcagccccaccgcacccctccagggggcctgcctttccctgacacttttggggtctgcctgggggaggaggggagaaagcaccatgagtgctcactaaaacaactttttccatttttaataaaacgccaaaaatatcacaacccaccaaaaatagatgcctctccccctccagccctagccgagctggtcctaggccccgcctagtgccccacccccacccacagtgctgcactcctcctgcccctgccacgcccaccccctgcccacctctccaggctctgctctgcagcacacccgtgggtgacccctcaccccagaagcagcagtggcagcttgggaaatgtgaggaagggaaggagggagagacgggagggaggagagagaggagaagggaggcaggggaggggcagcagaaccaaggcaaatatttcagctgggctatacccctctccccatccctgttatagaagcttagagagccagccagcaatggaaccttctggttcctgcgccaatcgccaccagtatcaattgtgtgagcttgggtgcgagtgcacgcgtgcgtgagtacggagagtatatatagatctctatctcttagcaaaggtgaatgccagatgtaaatggcgcctctgggcaaaggaggcttgtattttgcacattttataaaaacttgagagaatgagatttctgcttgtatatttctaaaaagaggaaggagcccaaaccatcctctccttaccactcccatccctgtgagccctaccttacccctctgcccctagccaaggagtgtgaatttatagatctaactttcataggcaaaacaaaagcttcgagctgttgcgtgtgtgagtctgttgtgtggatgtgcgtgtgtggtccccagccccagactggattggaaaagtgcatggtgggggcctcggggctgtccccacgctgtccctttgccacaagtctgtggggcaagaggctgcaatattccgtcctgggtgtctgggctgctaacctggcctgctcaggcttcccaccctgtgcggggcacacccccaggaagggaccctggacacggctcccacgtccaggcttaaggtggatgcacttcccgcacctccagtcttctgtgtagcagctttaacccacgtttgtctgtcacgtccagtcccgagacggctgagtgaccccaagaaaggcttccccgacacccagacagaggctgcagggctggggctgggtgagggtggcgggcctgcggggacattctactgtgctaaaaagccactgcagacatagcaataaaaacatgtcattttccaagcagaaaaaaaaaaacaacaacaatacaagcgcaacacacaaca

SEQ ID NO: 351444 - DNA, 3331 bp, Homo sapiens
gtatgcagtgggcgtctgtacaccgtctgtgctgggcaacctgtgagacatgttccagcagcctttgctcctggggatagaggccctggcaggcactgtcccttccctgtgcccatcacccccactggtgccctcctgccagtctctgactcttgtgacagtctggtggacctggtctggccatctgttacctatcttgccttggggacccagagcagagtctggccacatcccttgggggctcctggtcaggctggggagtcacctgaacaaagaagacagtgtctagagctgtgggacatggccagctccctgggggacaaggtccccagagcagcatgtgggaagagggggcagacagtgtggcagctgcatctcgcctgcctctgcctggcccagttccactctccacctgctcaacccccacctctctccagaagaggagggggacccgacccggatccaatatcccgctccctgcctgggcctcccacacctgcactgcccacacactcatacagctctcactccccacgtgctccacgcctcctgtccccactgaggagagctcccagaggctcgcctgctccccaccgacacgcgtccctgcagacaaacgaggcgcccagggagcttccccactgcacttggccagggctgccggggcgcagccttgcccctagcttcctctggcgggagccatggctcggaggacaatggggacctctgaacatacctgcccgcaagggggaccggaggcgctgggagtgggggtgtgagggaggtggtgccacagcctccgctgagcagcctggccccccagatcgtgtacttcactgctacattcccctacgtggtcctggtcgtgctgctggtgcgtggagtgctgctgcctggcgccctggatggcatcatttactatctcaagcctgactggtcaaagctggggtcccctcaggtgtggatagatgcggggacccagattttcttttcttacgccattggcctgggggccctcacagccctgggcagctacaaccgcttcaacaacaactgctacaaggacgccatcatcctggctctcatcaacagtgggaccagcttctttgctggcttcgtggtcttctccatcctgggcttcatggctgcagagcagggcgtgcacatctccaaggtggcagagtcagggccgggcctggccttcatcgcctacccgcgggctgtcacgctgatgccagtggccccactctgggctgccctgttcttcttcatgctgttgctgcttggtctcgacagccagtttgtaggtgtggagggcttcatcaccggcctcctcgacctcctcccggcctcctactacttccgtttccaaagggagatctctgtggccctctgttgtgccctctgctttgtcatcgatctctccatggtgactgatggcgggatgtacgtcttccagctgtttgactactactcggccagcggcaccaccctgctctggcaggccttttgggagtgcgtggtggtggcctgggtgtacggagctgaccgcttcatggacgacattgcctgtatgatcgggtaccgaccttgcccctggatgaaatggtgctggtccttcttcaccccgctggtctgcatgggcatcttcatcttcaacgttgtgtactacgagccgctggtctacaacaacacctacgtgtacccgtggtggggtgaggccatgggctgggccttcgccctgtcctccatgctgtgcgtgccgctgcacctcctgggctgcctcctcagggccaagggcaccatggctgagcgctggcagcacctgacccagcccatctggggcctccaccacttggagtaccgagctcaggacgcagatgtcaggggcctgaccaccctgaccccagtgtccgagagcagcaaggtcgtcgtggtggagagtgtcatgtgacaactcagctcacatcaccagctcacctctggtagccatagcagcccctgcttcagccccaccgcacccctccagggggcctgcctttccctgacacttttggggtctgcctgggggaggaggggagaaagcaccatgagtgctcactaaaacaactttttccatttttaataaaacgccaaaaatatcacaacccaccaaaaatagatgcctctccccctccagccctagccgagctggtcctaggccccgcctagtgccccacccccacccacagtgctgcactcctcctgcccctgccacgcccaccccctgcccacctctccaggctctgctctgcagcacacccgtgggtgacccctcaccccagaagcagcagtggcagcttgggaaatgtgaggaagggaaggagggagagacgggagggaggagagagaggagaagggaggcaggggaggggcagcagaaccaaggcaaatatttcagctgggctatacccctctccccatccctgttatagaagcttagagagccagccagcaatggaaccttctggttcctgcgccaatcgccaccagtatcaattgtgtgagcttgggtgcgagtgcacgcgtgcgtgagtacggagagtatatatagatctctatctcttagcaaaggtgaatgccagatgtaaatggcgcctctgggcaaaggaggcttgtattttgcacattttataaaaacttgagagaatgagatttctgcttgtatatttctaaaaagaggaaggagcccaaaccatcctctccttaccactcccatccctgtgagccctaccttacccctctgcccctagccaaggagtgtgaatttatagatctaactttcataggcaaaacaaaagcttcgagctgttgcgtgtgtgagtctgttgtgtggatgtgcgtgtgtggtccccagccccagactggattggaaaagtgcatggtgggggcctcggggctgtccccacgctgtccctttgccacaagtctgtggggcaagaggctgcaatattccgtcctgggtgtctgggctgctaacctggcctgctcaggcttcccaccctgtgcggggcacacccccaggaagggaccctggacacggctcccacgtccaggcttaaggtggatgcacttcccgcacctccagtcttctgtgtagcagctttaacccacgtttgtctgtcacgtccagtcccgagacggctgagtgaccccaagaaaggcttccccgacacccagacagaggctgcagggctggggctgggtgagggtggcgggcctgcggggacattctactgtgctaaaaagccactgcagacatagcaataaaaacatgtcattttccaagcag

SEQ ID NO: 351445 - DNA, 3633 bp, Homo sapiens
  misc_feature (1406)..(1406): n is a, c, g, or t
  misc_feature (1416)..(1416): n is a, c, g, or t
ggaggtgaccagacagagtctagccctaaggaagggggaggtactgaaagccaagcaatgctccccaccctgcaaatccagggcccagcagcctttgctcctggggatagaggccctggcaggcactgtcccttccctgtgcccatcacccccactggtgccctcctgccagtctctgactcttgtgacagtctggtggacctggtctggccatctgttacctatcttgccttggggacccagagcagagtctggccacatcccttgggggctcctggtcaggctggggagtcacctgaacaaagaagacagtgtctagagctgtgggacatggccagctccctgggggacaaggtccccagagcagcatgtgggaagagggggcagacagtgtggcagctgcatctcgcctgcctctgcctggcccagttccactctccacctgctcaacccccacctctctccagaagaggagggggacccgacccggatccaatatcccgctccctgcctgggcctcccacacctgcactgcccacacactcatacagctctcactccccacgtgctccacgcctcctgtccccactgaggagagctcccagaggctcgcctgctccccaccgacacgcgtccctgcagacaaacgaggcgcccagggagcttccccactgcacttggccagggctgccggggcgcagccttgcccctagcttcctctggcgggagccatggctcggaggacaatggggacctctgaacatacctgcccgcaagggggaccggaggcgctgggagtgggggtgtgagggaggtggtgccacagcctccgctgagcagcctggccccccagatcgtgtacttcactgctacattcccctacgtggtcctggtcgtgctgctggtgcgtggagtgctgctgcctggcgccctggatggcatcatttactatctcaagcctgactggtcaaagctggggtcccctcaggtgtggatagatgcggggacccagattttcttttcttacgccattggcctgggggccctcacagccctgggcagctacaaccgcttcaacaacaactgctacaaggacgccatcatcctggctctcatcaacagtgggaccagcttctttgctggcttcgtggtcttctccatcctgggcttcatggctgcagagcagggcgtgcacatctccaaggtggcagagtcagggccgggcctggccttcatcgcctacccgcgggctgtcacgctgatgccagtggccccactctgggctgccctgttcttcttcatgctgttgctgcttggtctcgacagccaggtttgcatggggctctgggacagggagccaggaggggggcggagggagggctgcaggcaaggaaaggggtggaggnggtgcggggntcggcctgagctgccctggccacagtttgtaggtgtggagggcttcatcaccggcctcctcgacctcctcccggcctcctactacttccgtttccaaagggagatctctgtggccctctgttgtgccctctgctttgtcatcgatctctccatggtgactgatgtgagtggggtggggggtctgcctgtgacctctggtggccgtctgccatcctccctgactgggctctgtccccagggcgggatgtacgtcttccagctgtttgactactactcggccagcggcaccaccctgctctggcaggccttttgggagtgcgtggtggtggcctgggtgtacggtaggtcatggctgagggctgggctgggggatggtggcggggaaggcaggtctccagcttggccctcccgcctcacctcgccgcaggagctgaccgcttcatggacgacattgcctgtatgatcgggtaccgaccttgcccctggatgaaatggtgctggtccttcttcaccccgctggtctgcatgggcatcttcatcttcaacgttgtgtactacgagccgctggtctacaacaacacctacgtgtacccgtggtggggtgaggccatgggctgggccttcgccctgtcctccatgctgtgcgtgccgctgcacctcctgggctgcctcctcagggccaagggcaccatggctgagcgctggcagcacctgacccagcccatctggggcctccaccacttggagtaccgagctcaggacgcagatgtcaggggcctgaccaccctgaccccagtgtccgagagcagcaaggtcgtcgtggtggagagtgtcatgtgacaactcagctcacatcaccagctcacctctggtagccatagcagcccctgcttcagccccaccgcacccctccagggggcctgcctttccctgacacttttggggtctgcctgggggaggaggggagaaagcaccatgagtgctcactaaaacaactttttccatttttaataaaacgccaaaaatatcacaacccaccaaaaatagatgcctctccccctccagccctagccgagctggtcctaggccccgcctagtgccccacccccacccacagtgctgcactcctcctgcccctgccacgcccaccccctgcccacctctccaggctctgctctgcagcacacccgtgggtgacccctcaccccagaagcagcagtggcagcttgggaaatgtgaggaagggaaggagggagagacgggagggaggagagagaggagaagggaggcaggggaggggcagcagaaccaaggcaaatatttcagctgggctatacccctctccccatccctgttatagaagcttagagagccagccagcaatggaaccttctggttcctgcgccaatcgccaccagtatcaattgtgtgagcttgggtgcgagtgcacgcgtgcgtgagtacggagagtatatatagatctctatctcttagcaaaggtgaatgccagatgtaaatggcgcctctgggcaaaggaggcttgtattttgcacattttataaaaacttgagagaatgagatttctgcttgtatatttctaaaaagaggaaggagcccaaaccatcctctccttaccactcccatccctgtgagccctaccttacccctctgcccctagccaaggagtgtgaatttatagatctaactttcataggcaaaacaaaagcttcgagctgttgcgtgtgtgagtctgttgtgtggatgtgcgtgtgtggtccccagccccagactggattggaaaagtgcatggtgggggcctcggggctgtccccacgctgtccctttgccacaagtctgtggggcaagaggctgcaatattccgtcctgggtgtctgggctgctaacctggcctgctcaggcttcccaccctgtgcggggcacacccccaggaagggaccctggacacggctcccacgtccaggcttaaggtggatgcacttcccgcacctccagtcttctgtgtagcagctttaacccacgtttgtctgtcacgtccagtcccgagacggctgagtgaccccaagaaaggcttccccgacacccagacagaggctgcagggctggggctgggtgagggtggcgggcctgcggggacattctactgtgctaaaaagccactgcagacatagcaataaaaacatgtcattttccaagcag

SEQ ID NO: 351446 - DNA, 2482 bp, Homo sapiens
  misc_feature (2267)..(2267): n is a, c, g, or t
tagtcggagcgaggtggcgagtcgctgagcccgccgcggccccgagagcggctgcagccgccgccgccgggaaggagagggcgaggcgcgcccgagccgccgccgccgccgccaccgccgccgccgccaccaccgccaccggagtcgcgggccagccgggcagcctccgcgggccccggccggggcggggggcgcgggccacaggcccctgctccggccgccgcttgcagaccgcgggcgccgatgtcgcccgcgccccgctaggctgagcctcgggtcgggcgaggagccgccgcagccgccgccgcccgagccgcgggcaggagcctcgggagccgccgccgccgccgccgccgcccggccgggccccgccgccgcccgcgcgcccccgggcccccgacacacatgagattcttcaggctcactttcaagtgcttcgtggactgcttctgactgcgccgcccgcgccccgcaccccgccgcccgcccgccgccccgtcccccggcccggccgccccccggcccccggccggcccgcgccctcggggccctccccggtgccgccggtgccccccgcctgaccgccgccccccgtgaggcgccgcgaccccggcccggccgtgcggcccgccggggccatggcgaagaagagcgccgagaacggcatctatagcgtgtccggcgacgagaagaagggccccctcatcgcgcccgggcccgacggggccccggccaagggcgacggccccgtgggcctggggacacccggcggccgcctggccgtgccgccgcgcgagacctggacgcgccagatggacttcatcatgtcgtgcgtgggcttcgccgtgggcttgggcaacgtgtggcgcttcccctacctgtgctacaagaacggcggaggtgtgttccttattccctacgtcctgatcgccctggttggaggaatccccattttcttcttagagatctcgctgggccagttcatgaaggccggcagcatcaatgtctggaacatctgtcccctgttcaaaggcctgggctacgcctccatggtgatcgtcttctactgcaacacctactacatcatggtgctggcctggggcttctattacctggtcaagtcctttaccaccacgctgccctgggccacatgtggccacacctggaacactcccgactgcgtggagatcttccgccatgaagactgtgccaatgccagcctggccaacctcacctgtgaccagcttgctgaccgccggtcccctgtcatcgagttctgggagaacaaagtcttgaggctgtctgggggactggaggtgccaggggccctcaactgggaggtgaccctttgtctgctggcctgctgggtgctggtctacttctgtgtctggaagggggtcaaatccacgggaaagatcgtgtacttcactgctacattcccctacgtggtcctggtcgtgctgctggtgcgtggagtgctgctgcctggcgccctggatggcatcatttactatctcaagcctgactggtcaaagctggggtcccctcaggtgtggatagatgcggggacccagattttcttttcttacgccattggcctgggggccctcacagccctgggcagctacaaccgcttcaacaacaactgctacaaggacgccatcatcctggctctcatcaacagtgggaccagcttctttgctggcttcgtggtcttctccatcctgggcttcatggctgcagagcagggcgtgcacatctccaaggtggcagagtcagggccgggcctggccttcatcgcctacccgcgggctgtcacgctgatgccagtggccccactctgggctgccctgttcttcttcatgctgttgctgcttggtctcgacagccagtttgtaggtgtggagggcttcatcaccggcctcctcgacctcctcccggcctcctactacttccgtttccaaagggagatctctgtggccctctgttgtgccctctgctttgtcatcgatctctccatggtgactgatggcgggatgtacgtcttccagctgtttgactactactcggccagcggcaccaccctgctctggcaggccttttgggagtgcgtggtggtggcctgggtgtacggagctgaccgcttcatggacgacattgcctgtatgatcgggtaccgaccttgcccctggatgaaatggtgctggtccttcttcaccccgctggtctgcatgggcatcttcatcttcaagcgcttgtgtactacngagccgctggtcctacagagcaagcagccttaccggttggtagcccccgctgtgcctggcggctggagccggcccactggcgccctgtgcgccccctctcggcccctgtggttccctgtcccagtggccctgtttgccgcatggcccgggtccttgccgaacccgttccgccctgggcggtccttgccaccgttcccactcccaggcggtcccca

SEQ ID NO: 351447 - DNA, 273 bp, Homo sapiens
cccagggcctggcacatgagacagaagtgggggtgcacagagggccggaaggatgctgggacccctgtcagctctgcttctcttccccttctgccccttcagcccctccttgtcactgcagtgtaacctgtggtcccctgcaagaccaccagacacttagctgaggcccccacttcttattgacaggcaaagcagcaccagggcctgttctttcccatggagcagctctgtagcccatgccccctcctctccaggggccccctcccagccctg

SEQ ID NO: 351448 - DNA, 780 bp, Homo sapiens
ccgagtacctgggattacaggcatgtgccaccatgcctggctaattttgtatttttagtagagatggggtttctccatgttggtcaggctggtttcgaactcctgatctcaggtgatccgccagcctcagcctcccaaagtgtcaggattataggtgtgagccactgtgcctggcctggggttaatttttgaaagcaagttataaaatggaaagcactataattttactctttgaaaatacatcgagaaaatactggaattatgtgcatcaaaatggatggtgagagtatagctgtttttaaattttctttgtacttgtatttctcaacttttatagtaataatagctaacatttactgagaactaagcacttacatatggtattttattcgaaaactctttgaggtaaatattactattattttcattatggagtttcagaaactagaaccagaagggtaactcatccatggtcacacagccactaagtgctggaatcaagtgttgaattcaggtcggtggctaaagtctatgcatctctgtcactactgtctaccatctccctgcacatgtattattattattttaattataaggaataagtagaaaaggaaagggaaaatgtttcatgctttagtaagaactgtgcctggcctggggttaatttttgaaagcaagttataaaatggaaagcactataattttactctttgaaaatacatcgagaaaatactggaattatgtgcatcaaaatggatggtgagagtatagctgttttta

SEQ ID NO: 351449 - DNA, 1314 bp, Homo sapiens
ctctcgcacgcggggactgagcacggcccgaaaagccgaggacagccggactcaccctgtagttatagtagtgcgtctgcacaagatgccggtggcgcgacttgtggttgccgaagttggatttctcgcaaaccaagatggggtcttgctgtgttgcccagactggtctcaaactcctgagctcaagtgatccacccaccgtggcctcccaaagtgctgagattaaaggctacccatggggacctcaacagctttgccattgcacactatctttgcagacaagatcttaatcacatccaactttctgcagttgcacagggtacctcagacccacatcccagatgacattcctcagaagctcgcagctggagatgacatcaccttagacaacatcaccctagcccaagacatcgctattagagatacatcacctggacactaaagcctccaccccagtgacactctcaaggtgctgacaaaatggacatggacatttgttgcttttcttctttttgaattaggaactctattgtgtttcctgaatttactgtctgcttggcccatgatcctggtatgttccttgctctctgccaaaacatgcaccgtcccctccacacctaaaggaaaacctggtagaagctactactctcaatgccattctaaaattgacgaagagtattattttccccaagaggcagctgctgcaggccagtgaatcctctggaccctggggagagggtcatacactccctagtgacttctactctatgctccagctttccaccaggacctcctgccctgtccccaactgtaacgaccacaaccaccccatccccttggttacacacaaatatcaccagtctttacatgtactttactgacttctcagataataccctccaacaagataactgcaggacttgccaccatgacctgagaaatacaccaagatattattgtccaatttttttgagatatatatatatttctcatacttttaacatactctgcaatccaccaagatattggtagaaaccctggaaatttcaaatctatttcgtctgctaatgccatgtgaatgggaaacttagatacaggctggcctacaaggactccttatacttcaatttttgttcctcctttcaactctcataaaaaatattttctatactatttagggcaaatgatggccttctttctaagtctcatccatcattgctgcaaaggtgccttagtttgatgttaaagtgtcacagggccaatgtattgaccatgtttctggcgtctataaagtcgatgttttaatatctgtcc

SEQ ID NO: 351450 - DNA, 1316 bp, Homo sapiens
aggaatagagtgtgccaacagcttagatatagagtgtgagagagaagagtggaggctggttctcaggctccagaagcataagcctgcatggagcatagcgtcactgagcaagacaggtgtggaggatgagaagcgggccacaggatgggaagggaatctgtgtggaggcggtgccctaaacatgctgccttgaggagggacctctacatggggtggccgggcacagccaggctacccatggggacctcaacagctttgccattgcacactatctttgcagacaagatcttaatcacatccaactttctgcagttgcacagggtacctcagacccacatcccagatgacattcctcagaagctcgcagctggagatgacatcaccttagacaacatcaccctagcccaagacatcgctattagagatacatcacctggacactaaagcctccaccccagtgacactctcaaggtgctgacaaaatggacatggacatttgttgcttttcttctttttgaattaggaactctattgtgtttcctgaatttactgtctgcttggcccatgatcctggtatgttccttgctctctgccaaaacatgcaccgtcccctccacacctaaaggaaaacctggtagaagctactactctcaatgccattctaaaattgacgaagagtattattttccccaagaggcagctgctgcaggccagtgaatcctctggaccctggggagagggtcatacactccctagtgacttctactctatgctccagctttccaccaggacctcctgccctgtccccaactgtaacgaccacaaccaccccatccccttggttacacacaaatatcaccagtctttacatgtactttactgacttctcagataataccctccaacaagataactgcaggacttgccaccatgacctgagaaatacaccaagatattattgtccaatttttttgagatatatatatatttctcatacttttaacatactctgcaatccaccaagatattggtagaaaccctggaaatttcaaatctatttcgtctgctaatgccatgtgaatgggaaacttagatacaggctggcctacaaggactccttatacttcaatttttgttcctcctttcaactctcataaaaaatattttctatactatttagggcaaatgatggccttctttctaagtctcatccatcattgctgcaaaggtgccttagtttgatgttaaagtgtcacagggccaatgtattgaccatgtttctggcgtctataaagtcgatgttttaatatctgtcc

SEQ ID NO: 351451 - DNA, 1234 bp, Homo sapiens
aggaatagagtgtgccaacagcttagatatagagtgtgagagagaagagtggaggctggttctcaggctccagaagcataagcctgcatggagcatagcgtcactgagcaagacaggtgtggaggatgagaagcgggccacaggatgggaagggaatctgtgtggaggcggtgccctaaacatgctgccttgaggagggacctctacatggggtggccgggcacagccagttgcacagggtacctcagacccacatcccagatgacattcctcagaagctcgcagctggagatgacatcaccttagacaacatcaccctagcccaagacatcgctattagagatacatcacctggacactaaagcctccaccccagtgacactctcaaggtgctgacaaaatggacatggacatttgttgcttttcttctttttgaattaggaactctattgtgtttcctgaatttactgtctgcttggcccatgatcctggtatgttccttgctctctgccaaaacatgcaccgtcccctccacacctaaaggaaaacctggtagaagctactactctcaatgccattctaaaattgacgaagagtattattttccccaagaggcagctgctgcaggccagtgaatcctctggaccctggggagagggtcatacactccctagtgacttctactctatgctccagctttccaccaggacctcctgccctgtccccaactgtaacgaccacaaccaccccatccccttggttacacacaaatatcaccagtctttacatgtactttactgacttctcagataataccctccaacaagataactgcaggacttgccaccatgacctgagaaatacaccaagatattattgtccaatttttttgagatatatatatatttctcatacttttaacatactctgcaatccaccaagatattggtagaaaccctggaaatttcaaatctatttcgtctgctaatgccatgtgaatgggaaacttagatacaggctggcctacaaggactccttatacttcaatttttgttcctcctttcaactctcataaaaaatattttctatactatttagggcaaatgatggccttctttctaagtctcatccatcattgctgcaaaggtgccttagtttgatgttaaagtgtcacagggccaatgtattgaccatgtttctggcgtctataaagtcgatgttttaatatctgtcc

SEQ ID NO: 351452 - DNA, 1232 bp, Homo sapiens
ctctcgcacgcggggactgagcacggcccgaaaagccgaggacagccggactcaccctgtagttatagtagtgcgtctgcacaagatgccggtggcgcgacttgtggttgccgaagttggatttctcgcaaaccaagatggggtcttgctgtgttgcccagactggtctcaaactcctgagctcaagtgatccacccaccgtggcctcccaaagtgctgagattaaagttgcacagggtacctcagacccacatcccagatgacattcctcagaagctcgcagctggagatgacatcaccttagacaacatcaccctagcccaagacatcgctattagagatacatcacctggacactaaagcctccaccccagtgacactctcaaggtgctgacaaaatggacatggacatttgttgcttttcttctttttgaattaggaactctattgtgtttcctgaatttactgtctgcttggcccatgatcctggtatgttccttgctctctgccaaaacatgcaccgtcccctccacacctaaaggaaaacctggtagaagctactactctcaatgccattctaaaattgacgaagagtattattttccccaagaggcagctgctgcaggccagtgaatcctctggaccctggggagagggtcatacactccctagtgacttctactctatgctccagctttccaccaggacctcctgccctgtccccaactgtaacgaccacaaccaccccatccccttggttacacacaaatatcaccagtctttacatgtactttactgacttctcagataataccctccaacaagataactgcaggacttgccaccatgacctgagaaatacaccaagatattattgtccaatttttttgagatatatatatatttctcatacttttaacatactctgcaatccaccaagatattggtagaaaccctggaaatttcaaatctatttcgtctgctaatgccatgtgaatgggaaacttagatacaggctggcctacaaggactccttatacttcaatttttgttcctcctttcaactctcataaaaaatattttctatactatttagggcaaatgatggccttctttctaagtctcatccatcattgctgcaaaggtgccttagtttgatgttaaagtgtcacagggccaatgtattgaccatgtttctggcgtctataaagtcgatgttttaatatctgtcc

SEQ ID NO: 351453 - DNA, 553 bp, Homo sapiens
aggaatagagtgtgccaacagcttagatatagagtgtgagagagaagagtggaggctggttctcaggctccagaagcataagcctgcatggagcatagcgtcactgagcaagacaggtgtggaggatgagaagcgggccacaggatgggaagggaatctgtgtggaggcggtgccctaaacatgctgccttgaggagggacctctacatggggtggccgggcacagccagatgtccctggagacagcgccatctggtggaacttcctgtaacgatcgagatgttccgtctgtgccgtccaacatgggagccatgcaggacacatggtgactgagcactgggactgtgtgccgcgtgaccaagagcagctcagctctaaagtctcctccagctttatgatgtcacttcctgtatcttctctacacattctttccttcagcctgttgtttgtaagtttttatgtaggaaagtagaaaattcagaatatgtttcatcaggtttttgtttggcaaagtgtcaacatgtttataacagagttaaagataaaggaaacc

SEQ ID NO: 351454 - DNA, 759 bp, Homo sapiens
gcggccaggcagatctgggcacggacgggtgccgcgctctgcaggcaaccttccgccgccccgccgccagcacctctctgggtaagagctgggttccgacagcagctcagcttaaccctctgccctgctaacgagggaaactgcggcggctccgcgcccagcacgcccggtaggccggagagagcggcgaggccttcggtgagcgaagagttaaccgcggcggagcgacagatcgcggagctgcacgctgccgcctgcgcggctggccagctaaactatgtggatccagctactggctatgtggtgctcacacagattgcccacttgcaaagaggtgaatgttgtggctctgcgtgcagacattgtccatatggtcaagtcaatgttaaagatccatctaaaaagaagcaattcaattcatatttttatgtttgacaagaatttcatctctgttccctaactgtgcttgtattttttaaaaaataaagccccaattcagaattgctggattattagtacttgaacactagtttaatcctaaatacatatattaaaagaacatcaataaaatgaaaaagctaacaaaaaaaaaaaaaaaaaaaaacacaacaaaaaatcagacaacaaacacaaacaacaataaaacacaaaagaaagagggggggggagcccataaataccaccccggggggggcacccattccaggcaccccgcggtttttcgaacagggggcccccaccataggggcgcactatacg

SEQ ID NO: 351455 - DNA, 483 bp, Homo sapiens
ggtctactggagtttgctggaggtccacgccagaccgtttgcccggatatcaccagcggaagctacagaacagcaaagattgttgcctgtcccttcctctggaagttttgccccagagggtcacccaccagatgccagccagagctctcctgtatgaggctggccagctaaactatgtggatccagctactggctatgtggtgctcacacagattgcccacttgcaaagaggtgaatgttgtggctctgcgtgcagacattgtccatatggtcaagtcaatgttaaagatccatctaaaaagaagcaattcaattcatatttttatgtttgacaagaatttcatctctgttccctaactgtgcttgtattttttaaaaaataaagccccaattcagaattgctggattattagtacttgaacactagtttaatcctaaatacatatattaaaagaacatcaataaaatgaaaaagctaacaaa

SEQ ID NO: 351456 - DNA, 586 bp, Homo sapiens
gcggccaggcagatctgggcacggacgggtgccgcgctctgcaggcaaccttccgccgccccgccgccagcacctctctgggtaagagctgggttccgacagcagctcagcttaaccctctgccctgctaacgagggaaactgcggcggctccgcgcccagcacgcccggtaggccggagagagcggcgaggccttcggtgagcgaagagttaaccgcggcggagcgacagatcgcggagctgcacgctgccgcctgcgcggctggccagctaaactatgtggatccagctactggctatgtggtgctcacacagattgcccacttgcaaagaggtgaatgttgtggctctgcgtgcagacattgtccatatggtcaagtcaatgttaaagatccatctaaaaagaagcaattcaattcatatttttatgtttgacaagaatttcatctctgttccctaactgtgcttgtattttttaaaaaataaagccccaattcagaattgctggattattagtacttgaacactagtttaatcctaaatacatatattaaaagaacatcaataaaatgaaaaagctaacaaa

SEQ ID NO: 351457 - DNA, 523 bp, Homo sapiens
gcggccaggcagatctgggcacggacgggtgccgcgctctgcaggcaaccttccgccgccccgccgccagcacctctctgggtaagagctgggttccgacagcagctcagcttaaccctctgccctgctaacgagggaaactgcggcggctccgcgcccagcacgcccggtaggccggagagagcggcgaggccttcggctggccagctaaactatgtggatccagctactggctatgtggtgctcacacagattgcccacttgcaaagaggtgaatgttgtggctctgcgtgcagacattgtccatatggtcaagtcaatgttaaagatccatctaaaaagaagcaattcaattcatatttttatgtttgacaagaatttcatctctgttccctaactgtgcttgtattttttaaaaaataaagccccaattcagaattgctggattattagtacttgaacactagtttaatcctaaatacatatattaaaagaacatcaataaaatgaaaaagctaacaaa

SEQ ID NO: 351458 - DNA, 3067 bp, Homo sapiens
agcggggcgccaccacgtgtgtccctgcgcccggtggccaccgactcagtccctcgccgaccagtctgggcagcggaggagggtggttggcagtggctggaagcttcgctatgggaagttgttcctttgctctctcgcgcccagtcctcctccctggttctcctcagccgctgtcggaggagagcacccggagacgcgggctgcagtcgcggcggcttctccccgcctgggcggccgcgccgctgggcaggtgctgagcgcccctagagcctcccttgccgcctccctcctctgcccggccgcagcagtgcacatggggtgttggaggtagatgggctcccggcccgggaggcggcggtggatgcggcgctgggcagaagcagccgccgattccagctgccccgcgcgccccgggcgcccctgcgagtccccggttcagccatggggacctctccgagcagcagcaccgccctcgcctcctgcagccgcatcgcccgccgagccacagccacgatgatcgcgggctcccttctcctgcttggattccttagcaccaccacagctcagccagaacagaaggcctcgaatctcattggcacataccgccatgttgaccgtgccaccggccaggtgctaacctgtgacaagtgtccagcaggaacctatgtctctgagcattgtaccaacacaagcctgcgcgtctgcagcagttgccctgtggggacctttaccaggcatgagaatggcatagagaaatgccatgactgtagtcagccatgcccatggccaatgattgagaaattaccttgtgctgccttgactgaccgagaatgcacttgcccacctggcatgttccagtctaacgctacctgtgccccccatacggtgtgtcctgtgggttggggtgtgcggaagaaagggacagagactgaggatgtgcggtgtaagcagtgtgctcggggtaccttctcagatgtgccttctagtgtgatgaaatgcaaagcatacacagactgtctgagtcagaacctggtggtgatcaagccggggaccaaggagacagacaacgtctgtggcacactcccgtccttctccagctccacctcaccttcccctggcacagccatctttccacgccctgagcacatggaaacccatgaagtcccttcctccacttatgttcccaaaggcatgaactcaacagaatccaactcttctgcctctgttagaccaaaggtactgagtagcatccaggaagggacagtccctgacaacacaagctcagcaagggggaaggaagacgtgaacaagaccctcccaaaccttcaggtagtcaaccaccagcaaggcccccaccacagacacatcctgaagctgctgccgtccatggaggccactgggggcgagaagtccagcacgcccatcaagggccccaagaggggacatcctagacagaacctacacaagcattttgacatcaatgagcatttgccctggatgattgtgcttttcctgctgctggtgcttgtggtgattgtggtgtgcagtatccggaaaagctcgaggactctgaaaaaggggccccggcaggatcccagtgccattgtggaaaaggcagggctgaagaaatccatgactccaacccagaaccgggagaaatggatctactactgcaatggccatggtatcgatatcctgaagcttgtagcagcccaagtgggaagccagtggaaagatatctatcagtttctttgcaatgccagtgagagggaggttgctgctttctccaatgggtacacagccgaccacgagcgggcctacgcagctctgcagcactggaccatccggggccccgaggccagcctcgcccagctaattagcgccctgcgccagcaccggagaaacgatgttgtggagaagattcgtgggctgatggaagacaccacccagctggaaactgacaaactagctctcccgatgagccccagcccgcttagcccgagccccatccccagccccaacgcgaaacttgagaattccgctctcctgacggtggagccttccccacaggacaagaacaagggcttcttcgtggatgagtcggagccccttctccgctgtgactctacatccagcggctcctccgcgctgagcaggaacggttcctttattaccaaagaaaagaaggacacagtgttgcggcaggtacgcctggacccctgtgacttgcagcctatctttgatgacatgctccactttctaaatcctgaggagctgcgggtgattgaagagattccccaggctgaggacaaactagaccggctattcgaaattattggagtcaagagccaggaagccagccagaccctcctggactctgtttatagccatcttcctgacctgctgtagaacatagggatactgcattctggaaattactcaatttagtggcagggtggttttttaattttcttctgtttctgatttttgttgtccggggtgtgtgtgtgtgtttgtgtgtgtgtgtgtgtgtgtgtgtgtgtgtgtttaacagagaatatggccagtgcttgagttctttctccttctctctctctcttttttttttaaataactcttctgggaagttggtttataagcctttgccaggtgtaactgttgtgaaatacccaccactaaagttttttaagtcccatattttctccattgggccttcttatgtatttcaagattattctgtgcactttaaatttacttaacttaccataaatgcagtgtgacttttcccacacagtggattgtgaggctcttaacttcttaaaagtataggggcatcttgtgaatcctataagcagtctttatgtctcttaacattcacacctatttttaaaaacaaatattattactatttttattattggttgtcctttataaattttcttaaagattaagaaaatttaagaccccattgagttactgtaatgcaattcaactttgagttatcttttaaatatgtcttgtatagttcatattcatggctgaaacttgaccacactattgctgattg

SEQ ID NO: 351459 - DNA, 648 bp, Homo sapiens
tacagagtgaatgttattatatctagagaggcagtttgatttccattttatgctgatttgttatataaataattatataaatttattttcattcaaaccagttcactaaaatgtgtgtgtgtgtgtgtttaacagagaatatggccagtgcttgagttctttctccttctctctctctcttttttttttaaataactcttctgggaagttggtttataagcctttgccaggtgtaactgttgtgaaatacccaccactaaagttttttaagtcccatattttctccattgggccttcttatgtatttcaagattattctgtgcactttaaatttacttaacttaccataaatgcagtgtgacttttcccacacagtggattgtgaggctcttaacttcttaaaagtataggggcatcttgtgaatcctataagcagtctttatgtctcttaacattcacacctatttttaaaaacaaatattattactatttttattattggttgtcctttataaattttcttaaagattaagaaaatttaagaccccattgagttactgtaatgcaattcaactttgagttatcttttaaatatgtcttgtatagttcatattcatggctgaaacttgaccacactattgctgattg

SEQ ID NO: 351460 - DNA, 664 bp, Homo sapiens
cccttcaggacgtaagtatctcagtgcctggtacagggctcaactacagtatgggtgctctgactaatctattaaataaattgtctgtgttgaattatctcaaccttaaaggcaatactaagaagaatgtgtgtgtgtgtgtgtttaacagagaatatggccagtgcttgagttctttctccttctctctctctcttttttttttaaataactcttctgggaagttggtttataagcctttgccaggtgtaactgttgtgaaatacccaccactaaagttttttaagtcccatattttctccattgggccttcttatgtatttcaagattattctgtgcactttaaatttacttaacttaccataaatgcagtgtgacttttcccacacagtggattgtgaggctcttaacttcttaaaagtataggggcatcttgtgaatcctataagcagtctttatgtctcttaacattcacacctatttttaaaaacaaatattattactatttttattattggttgtcctttataaattttcttaaagattaagaaaatttaagaccccattgagttactgtaatgcaattcaactttgagttatcttttaaatatgtcttgtatagttcatattcatggctgaaacttgaccacactattgctgattg

SEQ ID NO: 351461 - DNA, 3046 bp, Homo sapiens
aaaagatgtgactacgtgcgtccgggtgtattagtgaggggacagtctggcttagatgatggtggttggcagtggctggaagcttcgctatgggaagttgttcctttgctctctcgcgcccagtcctcctccctggttctcctcagccgctgtcggaggagagcacccggagacgcgggctgcagtcgcggcggcttctccccgcctgggcggccgcgccgctgggcaggtgctgagcgcccctagagcctcccttgccgcctccctcctctgcccggccgcagcagtgcacatggggtgttggaggtagatgggctcccggcccgggaggcggcggtggatgcggcgctgggcagaagcagccgccgattccagctgccccgcgcgccccgggcgcccctgcgagtccccggttcagccatggggacctctccgagcagcagcaccgccctcgcctcctgcagccgcatcgcccgccgagccacagccacgatgatcgcgggctcccttctcctgcttggattccttagcaccaccacagctcagccagaacagaaggcctcgaatctcattggcacataccgccatgttgaccgtgccaccggccaggtgctaacctgtgacaagtgtccagcaggaacctatgtctctgagcattgtaccaacacaagcctgcgcgtctgcagcagttgccctgtggggacctttaccaggcatgagaatggcatagagaaatgccatgactgtagtcagccatgcccatggccaatgattgagaaattaccttgtgctgccttgactgaccgagaatgcacttgcccacctggcatgttccagtctaacgctacctgtgccccccatacggtgtgtcctgtgggttggggtgtgcggaagaaagggacagagactgaggatgtgcggtgtaagcagtgtgctcggggtaccttctcagatgtgccttctagtgtgatgaaatgcaaagcatacacagactgtctgagtcagaacctggtggtgatcaagccggggaccaaggagacagacaacgtctgtggcacactcccgtccttctccagctccacctcaccttcccctggcacagccatctttccacgccctgagcacatggaaacccatgaagtcccttcctccacttatgttcccaaaggcatgaactcaacagaatccaactcttctgcctctgttagaccaaaggtactgagtagcatccaggaagggacagtccctgacaacacaagctcagcaagggggaaggaagacgtgaacaagaccctcccaaaccttcaggtagtcaaccaccagcaaggcccccaccacagacacatcctgaagctgctgccgtccatggaggccactgggggcgagaagtccagcacgcccatcaagggccccaagaggggacatcctagacagaacctacacaagcattttgacatcaatgagcatttgccctggatgattgtgcttttcctgctgctggtgcttgtggtgattgtggtgtgcagtatccggaaaagctcgaggactctgaaaaaggggccccggcaggatcccagtgccattgtggaaaaggcagggctgaagaaatccatgactccaacccagaaccgggagaaatggatctactactgcaatggccatggtatcgatatcctgaagcttgtagcagcccaagtgggaagccagtggaaagatatctatcagtttctttgcaatgccagtgagagggaggttgctgctttctccaatgggtacacagccgaccacgagcgggcctacgcagctctgcagcactggaccatccggggccccgaggccagcctcgcccagctaattagcgccctgcgccagcaccggagaaacgatgttgtggagaagattcgtgggctgatggaagacaccacccagctggaaactgacaaactagctctcccgatgagccccagcccgcttagcccgagccccatccccagccccaacgcgaaacttgagaattccgctctcctgacggtggagccttccccacaggacaagaacaagggcttcttcgtggatgagtcggagccccttctccgctgtgactctacatccagcggctcctccgcgctgagcaggaacggttcctttattaccaaagaaaagaaggacacagtgttgcggcaggtacgcctggacccctgtgacttgcagcctatctttgatgacatgctccactttctaaatcctgaggagctgcgggtgattgaagagattccccaggctgaggacaaactagaccggctattcgaaattattggagtcaagagccaggaagccagccagaccctcctggactctgtttatagccatcttcctgacctgctgtagaacatagggatactgcattctggaaattactcaatttagtggcagggtggttttttaattttcttctgtttctgatttttgttgtccggggtgtgtgtgtgtgtttgtgtgtgtgtgtgtgtgtgtgtgtgtgtgtgtttaacagagaatatggccagtgcttgagttctttctccttctctctctctcttttttttttaaataactcttctgggaagttggtttataagcctttgccaggtgtaactgttgtgaaatacccaccactaaagttttttaagtcccatattttctccattgggccttcttatgtatttcaagattattctgtgcactttaaatttacttaacttaccataaatgcagtgtgacttttcccacacagtggattgtgaggctcttaacttcttaaaagtataggggcatcttgtgaatcctataagcagtctttatgtctcttaacattcacacctatttttaaaaacaaatattattactatttttattattggttgtcctttataaattttcttaaagattaagaaaatttaagaccccattgagttactgtaatgcaattcaactttgagttatcttttaaatatgtcttgtatagttcatattcatggctgaaacttgaccacactattgctgattg

SEQ ID NO: 351462 - DNA, 3036 bp, Homo sapiens
agcggggcgccaccacgtgtgtccctgcgcccggtggccaccgactcagtccctcgccgaccagtctgggcagcggaggagggtggttggcagtggctggaagcttcgctatgggaagttgttcctttgctctctcgcgcccagtcctcctccctggttctcctcagccgctgtcggaggagagcacccggagacgcgggctgcagtcgcggcggcttctccccgcctgggcggccgcgccgctgggcaggtgctgagcgcccctagagcctcccttgccgcctccctcctctgcccggccgcagcagtgcacatggggtgttggaggtagatgggctcccggcccgggaggcggcggtggatgcggcgctgggcagaagcagccgccgattccagctgccccgcgcgccccgggcgcccctgcgagtccccggttcagccatggggacctctccgagcagcagcaccgccctcgcctcctgcagccgcatcgcccgccgagccacagccacgatgatcgcgggctcccttctcctgcttggattccttagcaccaccacagctcagccagaacagaaggcctcgaatctcattggcacataccgccatgttgaccgtgccaccggccaggtgctaacctgtgacaagtgtccagcaggaacctatgtctctgagcattgtaccaacacaagcctgcgcgtctgcagcagttgccctgtggggacctttaccaggcatgagaatggcatagagaaatgccatgactgtagtcagccatgcccatggccaatgattgagaaattaccttgtgctgccttgactgaccgagaatgcacttgcccacctggcatgttccagtctaacgctacctgtgccccccatacggtgtgtcctgtgggttggggtgtgcggaagaaagggacagagactgaggatgtgcggtgtaagcagtgtgctcggggtaccttctcagatgtgccttctagtgtgatgaaatgcaaagcatacacagactgtctgagtcagaacctggtggtgatcaagccggggaccaaggagacagacaacgtctgtggcacactcccgtccttctccagctccacctcaccttcccctggcacagccatctttccacgccctgagcacatggaaacccatgaagtcccttcctccacttatgttcccaaaggcatgaactcaacagaatccaactcttctgcctctgttagaccaaaggtactgagtagcatccaggaagggacagtccctgacaacacaagctcagcaagggggaaggaagacgtgaacaagaccctcccaaaccttcaggtagtcaaccaccagcaaggcccccaccacagacacatcctgaagctgctgccgtccatggaggccactgggggcgagaagtccagcacgcccatcaagggccccaagaggggacatcctagacagaacctacacaagcattttgacatcaatgagcatttgccctggatgattgtgcttttcctgctgctggtgcttgtggtgattgtggtgtgcagtatccggaaaagctcgaggactctgaaaaaggggccccggcaggatcccagtgccattgtggaaaaggcagggctgaagaaatccatgactccaacccagaaccgggagaaatggatctactactgcaatggccatggtatcgatatcctgaagcttgtagcagcccaagtgggaagccagtggaaagatatctatcagtttctttgcaatgccagtgagagggaggttgctgctttctccaatgggtacacagccgaccacgagcgggcctacgcagctctgcagcactggaccatccggggccccgaggccagcctcgcccagctaattagcgccctgcgccagcaccggagaaacgatgttgtggagaagattcgtgggctgatggaagacaccacccagctggaaactgacaaactagctctcccgatgagccccagcccgcttagcccgagccccatccccagccccaacgcgaaacttgagaattccgctctcctgacggtggagccttccccacaggacaagaacaagggcttcttcgtggatgagtcggagccccttctccgctgtgactctacatccagcggctcctccgcgctgagcaggaacggttcctttattaccaaagaaaagaaggacacagtgttgcggcaggtacgcctggacccctgtgacttgcagcctatctttgatgacatgctccactttctaaatcctgaggagctgcgggtgattgaagagattccccaggctgaggacaaactagaccggctattcgaaattattggagtcaagagccaggaagccagccagaccctcctggactctgtttatagccatcttcctgacctgctgtagaacatagggatactgcattctggaaattactcaatttagtggcagggtggttttttaattttcttctgtttctgatttttgttgtccgggtgtgtgtgtgtgtgtgtttaacagagaatatggccagtgcttgagttctttctccttctctctctctcttttttttttaaataactcttctgggaagttggtttataagcctttgccaggtgtaactgttgtgaaatacccaccactaaagttttttaagtcccatattttctccattgggccttcttatgtatttcaagattattctgtgcactttaaatttacttaacttaccataaatgcagtgtgacttttcccacacagtggattgtgaggctcttaacttcttaaaagtataggggcatcttgtgaatcctataagcagtctttatgtctcttaacattcacacctatttttaaaaacaaatattattactatttttattattggttgtcctttataaattttcttaaagattaagaaaatttaagaccccattgagttactgtaatgcaattcaactttgagttatcttttaaatatgtcttgtatagttcatattcatggctgaaacttgaccacactattgctgattg

SEQ ID NO: 351463 - DNA, 2340 bp, Homo sapiens
agcggggcgccaccacgtgtgtccctgcgcccggtggccaccgactcagtccctcgccgaccagtctgggcagcggaggagggtggttggcagtggctggaagcttcgctatgggaagttgttcctttgctctctcgcgcccagtcctcctccctggttctcctcagccgctgtcggaggagagcacccggagacgcgggctgcagtcgcggcggcttctccccgcctgggcggccgcgccgctgggcaggtgctgagcgcccctagagcctcccttgccgcctccctcctctgcccggccgcagcagtgcacatggggtgttggaggtagatgggctcccggcccgggaggcggcggtggatgcggcgctgggcagaagcagccgccgattccagctgccccgcgcgccccgggcgcccctgcgagtccccggttcagccatggggacctctccgagcagcagcaccgccctcgcctcctgcagccgcatcgcccgccgagccacagccacgatgatcgcgggctcccttctcctgtccctgacaacacaagctcagcaagggggaaggaagacgtgaacaagaccctcccaaaccttcaggtagtcaaccaccagcaaggcccccaccacagacacatcctgaagctgctgccgtccatggaggccactgggggcgagaagtccagcacgcccatcaagggccccaagaggggacatcctagacagaacctacacaagcattttgacatcaatgagcatttgccctggatgattgtgcttttcctgctgctggtgcttgtggtgattgtggtgtgcagtatccggaaaagctcgaggactctgaaaaaggggccccggcaggatcccagtgccattgtggaaaaggcagggctgaagaaatccatgactccaacccagaaccgggagaaatggatctactactgcaatggccatggtatcgatatcctgaagcttgtagcagcccaagtgggaagccagtggaaagatatctatcagtttctttgcaatgccagtgagagggaggttgctgctttctccaatgggtacacagccgaccacgagcgggcctacgcagctctgcagcactggaccatccggggccccgaggccagcctcgcccagctaattagcgccctgcgccagcaccggagaaacgatgttgtggagaagattcgtgggctgatggaagacaccacccagctggaaactgacaaactagctctcccgatgagccccagcccgcttagcccgagccccatccccagccccaacgcgaaacttgagaattccgctctcctgacggtggagccttccccacaggacaagaacaagggcttcttcgtggatgagtcggagccccttctccgctgtgactctacatccagcggctcctccgcgctgagcaggaacggttcctttattaccaaagaaaagaaggacacagtgttgcggcaggtacgcctggacccctgtgacttgcagcctatctttgatgacatgctccactttctaaatcctgaggagctgcgggtgattgaagagattccccaggctgaggacaaactagaccggctattcgaaattattggagtcaagagccaggaagccagccagaccctcctggactctgtttatagccatcttcctgacctgctgtagaacatagggatactgcattctggaaattactcaatttagtggcagggtggttttttaattttcttctgtttctgatttttgttgtccggggtgtgtgtgtgtgtttgtgtgtgtgtgtgtgtgtgtgtgtgtgtgtgtttaacagagaatatggccagtgcttgagttctttctccttctctctctctcttttttttttaaataactcttctgggaagttggtttataagcctttgccaggtgtaactgttgtgaaatacccaccactaaagttttttaagtcccatattttctccattgggccttcttatgtatttcaagattattctgtgcactttaaatttacttaacttaccataaatgcagtgtgacttttcccacacagtggattgtgaggctcttaacttcttaaaagtataggggcatcttgtgaatcctataagcagtctttatgtctcttaacattcacacctatttttaaaaacaaatattattactatttttattattggttgtcctttataaattttcttaaagattaagaaaatttaagaccccattgagttactgtaatgcaattcaactttgagttatcttttaaatatgtcttgtatagttcatattcatggctgaaacttgaccacactattgctgattg

SEQ ID NO: 351464 - DNA, 883 bp, Homo sapiens
gctttgcttaggccaagtcctgtctcttgggactcaaaattcccatctctcatacttcttaatgaaaattacttatggaggcttctctgagagaagtctgctaagctgccagcccaaatcttgtttaatcttttgataacagatgctcttatttgctgacctgtcctaccaagtctttcaccagtcaaatttgcatttgaattcttttttttatcttagtcatattctcagttttaccactgcatcataaaatagtcaaaaggtgggagaaggaggatggacaaaataattaaatttgaactggttctctgaaaactcaaaataagaattgattagatctctgcacatatatgtgcctgctcaatatgtgaagtacaggagaagctgctgtcaagctcagctgttggatccttaaggttgcccttggttttggtgtaagaatgtgagtttagtggttcagttccatttttgccttccacatgaaggtgccattagggtctttatgaaaatgtgcaacacaatttattcttaagccccaagggtcatcttatctttgattatctggcctagcttggagatgaccagggaaaggagggaatgtatagatccccaaatatggaaaagctcttcccccctccttactcttttttctaggcatgaactcaacagaatccaactcttctgcctctgttagaccaaaggtactgagtagcatccaggaagggacagtccctgacaacacaagctcagcaagggggaaggaagacgtgaacaagaccctcccaaaccttcaggtagtcaaccaccagcaaggcccccaccacagacacatcctgaagctgctgccgtccatggaggccactgggggcgagaagtccagcac

SEQ ID NO: 351465 - DNA, 2065 bp, Homo sapiens
  misc_feature (279)..(279): n is a, c, g, or t
  misc_feature (1895)..(1895): n is a, c, g, or t
  misc_feature (1907)..(1907): n is a, c, g, or t
  misc_feature (1911)..(1911): n is a, c, g, or t
  misc_feature (1916)..(1917): n is a, c, g, or t
  misc_feature (1925)..(1926): n is a, c, g, or t
  misc_feature (1930)..(1930): n is a, c, g, or t
  misc_feature (1937)..(1937): n is a, c, g, or t
  misc_feature (1940)..(1940): n is a, c, g, or t
  misc_feature (1949)..(1949): n is a, c, g, or t
  misc_feature (1957)..(1958): n is a, c, g, or t
  misc_feature (1964)..(1966): n is a, c, g, or t
  misc_feature (1971)..(1972): n is a, c, g, or t
  misc_feature (1974)..(1974): n is a, c, g, or t
  misc_feature (1982)..(1982): n is a, c, g, or t
  misc_feature (1988)..(1988): n is a, c, g, or t
  misc_feature (1992)..(1992): n is a, c, g, or t
  misc_feature (2006)..(2006): n is a, c, g, or t
  misc_feature (2012)..(2012): n is a, c, g, or t
  misc_feature (2016)..(2016): n is a, c, g, or t
  misc_feature (2023)..(2023): n is a, c, g, or t
  misc_feature (2025)..(2025): n is a, c, g, or t
  misc_feature (2044)..(2044): n is a, c, g, or t
  misc_feature (2050)..(2051): n is a, c, g, or t
  misc_feature (2056)..(2056): n is a, c, g, or t
  misc_feature (2064)..(2065): n is a, c, g, or t
atgtaaggcaaattttgcaaattgcaaattttgcaaatgcaaaaattacaggtgtgagccagtgcgcccagccatatataacattttaaatctcagctacaaagtgttttcacatacatattctcaactgatttttataatcaatttgagatgcattgtcagtttcattttacaaatggaaaaaaaggaagctgaggcaaaggtcaggcagtgaaaccaaagcatcacagccagtagatcaagctgtagggtgggatccaagtcttcgtttctctcgtnctactgtgttgcagcatgctgtcaagaggatgcagtcctggtcggatctttaacaggaatgatgatggtggtgctggaattgttggccctttttctgctctgctcctatgtaacatcttcttggtttttgttcctttccctccccttctgtttctttcagcttggattccttagcaccaccacagctcagccagaacagaaggcctcgaatctcattggcacataccgccatgttgaccgtgccaccggccaggtgctaacctgtgacaagtgtccagcaggaacctatgtctctgagcattgtaccaacacaagcctgcgcgtctgcagcagttgccctgtggggacctttaccaggcatgagaatggcatagagaaatgccatgactgtagtcagccatgcccatggccaatgattgagaaattaccttgtgctgccttgactgaccgagaatgcacttgcccacctggcatgttccagtctaacgctacctgtgccccccatacggtgtgtcctgtgggttggggtgtgcggaagaaagggacagagactgaggatgtgcggtgtaagcagtgtgctcggggtaccttctcagatgtgccttctagtgtgatgaaatgcaaagcatacacagactgtctgagtcagaacctggtggtgatcaagccggggaccaaggagacagacaacgtctgtggcacactcccgtccttctccagctccacctcaccttcccctggcacagccatctttccacgccctgagcacatggaaacccatgaagtcccttcctccacttatgttcccaaaggtaacttaacctcatgaattatttatttgaggaaggctttgagcccagtggaggtaccaagagtgggcttataccaaagatgttttctccatttcgtgtattccaaagtcaccccttggagagaggccttcatatggtggctaattaaatctggcttttttggacttaatagaaacatgtagactcagaatttttctgttaggggagatcagatatctaaaaactaggtcacatcaagctataaaatatgaaccaagagaaacaaggacagcgtgtgaccttatgtaagttacttaacctcttcaggcctcagtttcaaacttgtcaaacaaatgaataatttagatgtttaaggttccttccagatcaaaagttttccaacatggagtcagtcccaggtagacatagccaggagcagagaagagggagaaaggaagaaaataccattacatccggaagcgagagatgaattttgaatccaggtggggcaaagaatgggtaggaaagttagaagctcaggaaataagcaaatttgtatcagattgaaggtaactagcactcatgtctggaaaataataactttattttttccaaatgattttaactttactccttatatcaattattcaagttttccatcagaacctcaagcagaatataaaatttatcctttattttcaaatcctttttgatttaatgtaattttcatgagatgatgaccaacttgagttgttcctcctagtgtcctctcatgcatgattacatttagccttcatgataagcctgtgaagtccgtctctactnaaaatataaaanttanctggnnatggtggnncacncctgtantcncagctactngggaggcnnaggcannngaatnncntgaacccnggaggnagangttgcagtgagccnagatcntgcnactgcantncagcctgggtgacagagcnagactnngtctnaaaaaacnn

SEQ ID NO: 351466 - DNA, 2247 bp, Homo sapiens
tctagaggatccagtggacgatgtgcagaaggagagcaaatgttatccccaagacaatggggaaaatgtctccaggccatgtcagaggccttcacggcagctccctcatggaagatgtgcggtgtaagcagtgtgctcggggtaccttctcagatgtgccttctagtgtgatgaaatgcaaagcatacacagactgtctgagtcagaacctggtggtgatcaagccggggaccaaggagacagacaacgtctgtggcacactcccgtccttctccagctccacctcaccttcccctggcacagccatctttccacgccctgagcacatggaaacccatgaagtcccttcctccacttatgttcccaaaggcatgaactcaacagaatccaactcttctgcctctgttagaccaaaggtactgagtagcatccaggaagggacagtccctgacaacacaagctcagcaagggggaaggaagacgtgaacaagaccctcccaaaccttcaggtagtcaaccaccagcaaggcccccaccacagacacatcctgaagctgctgccgtccatggaggccactgggggcgagaagtccagcacgcccatcaagggccccaagaggggacatcctagacagaacctacacaagcattttgacatcaatgagcatttgccctggatgattgtgcttttcctgctgctggtgcttgtggtgattgtggtgtgcagtatccggaaaagctcgaggactctgaaaaaggggccccggcaggatcccagtgccattgtggaaaaggcagggctgaagaaatccatgactccaacccagaaccgggagaaatggatctactactgcaatggccatggtatcgatatcctgaagcttgtagcagcccaagtgggaagccagtggaaagatatctatcagtttctttgcaatgccagtgagagggaggttgctgctttctccaatgggtacacagccgaccacgagcgggcctacgcagctctgcagcactggaccatccggggccccgaggccagcctcgcccagctaattagcgccctgcgccagcaccggagaaacgatgttgtggagaagattcgtgggctgatggaagacaccacccagctggaaactgacaaactagctctcccgatgagccccagcccgcttagcccgagccccatccccagccccaacgcgaaacttgagaattccgctctcctgacggtggagccttccccacaggacaagaacaagggcttcttcgtggatgagtcggagccccttctccgctgtgactctacatccagcggctcctccgcgctgagcaggaacggttcctttattaccaaagaaaagaaggacacagtgttgcggcaggtacgcctggacccctgtgacttgcagcctatctttgatgacatgctccactttctaaatcctgaggagctgcgggtgattgaagagattccccaggctgaggacaaactagaccggctattcgaaattattggagtcaagagccaggaagccagccagaccctcctggactctgtttatagccatcttcctgacctgctgtagaacatagggatactgcattctggaaattactcaatttagtggcagggtggttttttaattttcttctgtttctgatttttgttgtccggggtgtgtgtgtgtgtttgtgtgtgtgtgtgtgtgtgtgtgtgtgtgtgtttaacagagaatatggccagtgcttgagttctttctccttctctctctctcttttttttttaaataactcttctgggaagttggtttataagcctttgccaggtgtaactgttgtgaaatacccaccactaaagttttttaagtcccatattttctccattgggccttcttatgtatttcaagattattctgtgcactttaaatttacttaacttaccataaatgcagtgtgacttttcccacacagtggattgtgaggctcttaacttcttaaaagtataggggcatcttgtgaatcctataagcagtctttatgtctcttaacattcacacctatttttaaaaacaaatattattactatttttattattggttgtcctttataaattttcttaaagattaagaaaatttaagaccccattgagttactgtaatgcaattcaactttgagttatcttttaaatatgtcttgtatagttcatattcatggctgaaacttgaccacactattgctgattg

SEQ ID NO: 351467 - DNA, 2347 bp, Homo sapiens
agcggggcgccaccacgtgtgtccctgcgcccggtggccaccgactcagtccctcgccgaccagtctgggcagcggaggagggtggttggcagtggctggaagcttcgctatgggaagttgttcctttgctctctcgcgcccagtcctcctccctggttctcctcagccgctgtcggaggagagcacccggagacgcgggctgcagtcgcggcggcttctccccgcctgggcggccgcgccgctgggcaggtgctgagcgcccctagagcctcccttgccgcctccctcctctgcccggccgcagcagtgcacatggggtgttggaggtagatgggctcccggcccgggaggcggcggtggatgcggcgctgggcagaagcagccgccgattccagctgccccgcgcgccccgggcgcccctgcgagtccccggttcagccatggggacctctccgagcagcagcaccgccctcgcctcctgcagccgcatcgcccgccgagccacagccacgatgatcgcgggctcccttctcctgcttggattccttagcaccaccacagctcagccagaacagaaggcctcgaatctcattggcacataccgccatgttgaccgtgccaccggccaggtgctaacctgtgacaagtgtccagcaggaacctatgtctctgagcattgtaccaacacaagcctgcgcgtctgcagcagttgccctgtggggacctttaccaggcatgagaatggcatagagaaatgccatgactgtagtcagccatgcccatggccaatgattgagaaattaccttgtgctgccttgactgaccgagaatgcacttgcccacctggcatgttccagtctaacgctacctgtgccccccatacggtgtgtcctgtgggttggggtgtgcggaagaaagggacagagactgaggatgtgcggtgtaagcagtgtgctcggggtaccttctcagatgtgccttctagtgtgatgaaatgcaaagcatacacagactgtctgagtcagaacctggtggtgatcaagccggggaccaaggagacagacaacgtctgtggcacactcccgtccttctccagctccacctcaccttcccctggcacagccatctttccacgccctgagcacatggaaacccatgaagtcccttcctccacttatgttcccaaaggcatgaactcaacagaatccaactcttctgcctctgttagaccaaaggtactgagtagcatccaggaagggacagtccctgacaacacaagctcagcaagggggaaggaagacgtgaacaagaccctcccaaaccttcaggtagtcaaccaccagcaaggcccccaccacagacacatcctgaagctgctgccgtccatggaggccactgggggcgagaagtccagcacgcccatcaagggccccaagaggggacatcctagacagaacctacacaagcattttgacatcaatgagcatttgccctggatgattgtgcttttcctgctgctggtgcttgtggtgattgtggtgtgcagtatccggaaaagctcgaggactctgaaaaaggggccccggcaggatcccagtgccattgtggaaaaggcagggctgaagaaatccatgactccaacccagaaccgggagaaatggatctactactgcaatggccatggtatcgatatcctgaagcttgtagcagcccaagtgggaagccagtggaaagatatctatcagtttctttgcaatgccagtgagagggaggttgctgctttctccaatgggtacacagccgaccacgagcgggcctacgcagctctgcagcactggaccatccggggccccgaggccagcctcgcccagctaattagcgccctgcgccagcaccggagaaacgatgttgtggagaagattcgtgggctgatggaagacaccacccagctggaaactgacaaactagctctcccgatgagccccagcccgcttagcccgagccccatccccagccccaacgcgaaacttgagaattccgctctcctgacggtggagccttccccacaggacaagaacaagggcttcttcgtggatgagtcggagccccttctccgctgtgactctacatccagcggctcctccgcgctgagcaggaacggttcctttattaccaaagaaaagaaggacacagtgttgcggcaggtacgcctggacccctgtgacttgcagcctatctttgatgacatgctccactttctaaatcctgaggagctgcgtctcctgaggagctcctcagcagacgcagctcacacgtagaaaatacccccattatctcatttggcca

SEQ ID NO: 351468 - DNA, 940 bp, Homo sapiens
agcgggtgtccgcatgcgcgactgagccgggtggatggtactgctgcatccgggtgtctggaggctgtggccgttttgttttcttggctaaaatcgggggagtgaggcgggccggcgcggcgcgacaccgggctccggaaccactgcacgacggggctggactgacctgaaaaaaatgtctggatttctagagggcttgagatgctcagaatgcattgactggggggaaaagcgcaatactattgcttccattgctgctggtgtactattttttacaggctggtggattatcatagatgcagctgttatttatcccaccatgaaagatttcaaccactcataccatgcctgtggtgttatagcaaccatagccttcctaatgattaatgcagtatcgaatggacaagtccgaggtgatagttacagtgaaggttgtctgggtcaaacaggtgctcgcatttggcttttcgttggtttcatgttggcctttggatctctgattgcatctatgtggattctttttggaggttatgttgctaaagaaaaagacatagtataccctggaattgctgtatttttccagaatgccttcatcttttttggagggctggtttttaagtttggccgcactgaagacttatggcagtgaacacatctgatttcccacagcacaacagccctgcatgggtttgtttgtttttttactgctcactcccaaccttttgtaatgccattttctaaacttatttctgagtgtagtctcagcttaaagttgtgtaatactaaaatcacgagaacacctaaacaacaaccaaaaatctattgtggtatgcacttgattaacttataaaatgttagaggaaactttcacatgaataatttttgtcaaattttatcatggtataatttgtaaaaataaaaagaaattacaaaagaaatt

SEQ ID NO: 351469 - DNA, 525 bp, Homo sapiens
  misc_feature (2)..(2): n is a, c, g, or t
  misc_feature (26)..(26): n is a, c, g, or t
  misc_feature (42)..(42): n is a, c, g, or t
  misc_feature (57)..(57): n is a, c, g, or t
  misc_feature (70)..(70): n is a, c, g, or t
  misc_feature (91)..(91): n is a, c, g, or t
anggaaaaaaaaaggggaaaattttncccctttttttaaagnaaagggggttttttnggaaaaaaggggnccccccccaaacccccttttnccttctcttttcacataggagggaacagaccatggaaatttaaacgacttcctcacggtcacagaactagttttttaatcctcaggcagtgcatccccccaccctacaactgagcacaacctctttccccacagtgcaattcagaatatgctcagggaatgccagccaccttgtaaaactgctgggagaaaagcatgattcccacaaggactaagtatcagtgatttgtaattttcctgttttgtattatctgctttgctgatgtagacaagagttaactgagtagcatgctttattaagcatgagaaagaatcttaagaattgtcaataaaattaacccaaaactttaataatgtgtctgtaaccaagaaaatattgatagcatcatcctaatgaaactaaacatttattttaaacttattaaattgactctt

SEQ ID NO: 351470 - DNA, 2291 bp, Homo sapiens
cgacccacgcgtccggacccacgcgtccgggtactgctgcatccgggtgtctggaggctgtggccgttttgttttcttggctaaaatcgggggagtgaggcgggccggcgcggcgcgacaccgggctccggaaccactgcacgacggggctggactgacctgaaaaaaatgtctggatttctagagggcttgagatgctcagaatgcattgactggggggaaaagcgcaatactattgcttccattgctgctggtgtactattttttacaggctggtggattatcatagatgcagctgttatttatcccaccatgaaagatttcaaccactcataccatgcctgtggtgttatagcaaccatagccttcctaatgattaatgcagtatcgaatggacaagtccgaggtgatagttacagtgaaggttgtctgggtcaaacaggtgctcgcatttggcttttcgttggtttcatgttggcctttggatctctgattgcatctatgtggattctttttggaggttatgttgctaaagaaaaagacatagtataccctggaattgctgtatttttccagaatgccttcatcttttttggagggctggtttttaagtttggccgcactgaagacttatggcagtgaacacatctgatttcccacagcacaacagccctgcatgggtttgtttgtttttttactgctcactcccaaccttttgtaatgccattttctaaacttatttctgagtgtagtctcagcttaaagttgtgtaatactaaaatcacgagaacacctaaacaacaaccaaaaatctattgtggtatgcacttgattaacttataaaatgttagaggaaactttcacatgaataatttttgtcaaattttatcatggtataatttgtaaaaataaaaagaaattacaaaagaaattatggatttgtcaatgtaagtatttgtcatatctgaggtccaaaaccacaatgaaagtgctctgaagatttaatgtgtttattcaaatgtggtctcttctgtgtcaaatgttaaatgaaatataaacattttttagtttttaaaatattccgtggtcaaaattcttcctcactataattggtatttacttttaccaaaaattctgtgaacatgtaatgtaactggcttttgagggtctcccaaggggtgagtggacgtgttggaagagagaagcaccatggtccagccaccaggctccctgtgtcccttccatgggaaggtcttccgctgtgcctctcattccaagggcaggaagatgtgactcagccatgacacgtggttctggtgggatgcacagtcactccacatccaccattgaaggaaaggaaaaaagggcagagacttgacactccagtcttagacaggggacaatttctttgtagttgttctgataataaactgggttccatgttgcatttcatctgtgtactgaaccactagcctaatagaccagcacggtcaactagaatgacaaacattagctactgggaactcttgttgtctcttcctcttcagaactcttgtccccccaggctccccacctctgcaagatgggatacactcttcaggaccacagtttgaaatgtctttcataaaatgtgctacaattagccttcggaatatttgctgggtgatttaaatgtgtgggtctcatttccatgctagccatggtcatctgacagtctctacactgtgaatattgcctggtgatcaagactctcctcaaagaaatgacttgctgtcatcccacatgaactcctgatgttttttctacaaaagtccataaaatgtgaaaactggagaagatcttagaggttgaagcccaccttctcttttcacataggagggaacagaccatggaaatttaaacgacttcctcacggtcacagaactagttttttaatcctcaggcagtgcatccccccaccctacaactgagcacaacctctttccccacagtgcaattcagaatatgctcagggaatgccagccaccttgtaaaactgctgggagaaaagcatgattcccacaaggactaagtatcagtgatttgtaattttcctgttttgtattatctgctttgctgatgtagacaagagttaactgagtagcatgctttattaagcatgagaaagaatcttaagaattgtcaataaaattaacccaaaactttaataatgtgtctgtaaccaagaaaatattgatagcatcatcctaatgaaactaaacatttattttaaacttattaaattgactctt

SEQ ID NO: 351471 - DNA, 2257 bp, Homo sapiens
agcgggtgtccgcatgcgcgactgagccgggtggatggtactgctgcatccgggtgtctggaggctgtggccgttttgttttcttggctaaaatcgggggagtgaggcgggccggcgcggcgcgacaccgggctccggaaccactgcacgacggggctggactgacctgaaaaaaatgtctggatttctagagggcttgagatgctcagaatgcattgactggggggttttttacaggctggtggattatcatagatgcagctgttatttatcccaccatgaaagatttcaaccactcataccatgcctgtggtgttatagcaaccatagccttcctaatgattaatgcagtatcgaatggacaagtccgaggtgatagttacagtgaaggttgtctgggtcaaacaggtgctcgcatttggcttttcgttggtttcatgttggcctttggatctctgattgcatctatgtggattctttttggaggttatgttgctaaagaaaaagacatagtataccctggaattgctgtatttttccagaatgccttcatcttttttggagggctggtttttaagtttggccgcactgaagacttatggcagtgaacacatctgatttcccacagcacaacagccctgcatgggtttgtttgtttttttactgctcactcccaaccttttgtaatgccattttctaaacttatttctgagtgtagtctcagcttaaagttgtgtaatactaaaatcacgagaacacctaaacaacaaccaaaaatctattgtggtatgcacttgattaacttataaaatgttagaggaaactttcacatgaataatttttgtcaaattttatcatggtataatttgtaaaaataaaaagaaattacaaaagaaattatggatttgtcaatgtaagtatttgtcatatctgaggtccaaaaccacaatgaaagtgctctgaagatttaatgtgtttattcaaatgtggtctcttctgtgtcaaatgttaaatgaaatataaacattttttagtttttaaaatattccgtggtcaaaattcttcctcactataattggtatttacttttaccaaaaattctgtgaacatgtaatgtaactggcttttgagggtctcccaaggggtgagtggacgtgttggaagagagaagcaccatggtccagccaccaggctccctgtgtcccttccatgggaaggtcttccgctgtgcctctcattccaagggcaggaagatgtgactcagccatgacacgtggttctggtgggatgcacagtcactccacatccaccattgaaggaaaggaaaaaagggcagagacttgacactccagtcttagacaggggacaatttctttgtagttgttctgataataaactgggttccatgttgcatttcatctgtgtactgaaccactagcctaatagaccagcacggtcaactagaatgacaaacattagctactgggaactcttgttgtctcttcctcttcagaactcttgtccccccaggctccccacctctgcaagatgggatacactcttcaggaccacagtttgaaatgtctttcataaaatgtgctacaattagccttcggaatatttgctgggtgatttaaatgtgtgggtctcatttccatgctagccatggtcatctgacagtctctacactgtgaatattgcctggtgatcaagactctcctcaaagaaatgacttgctgtcatcccacatgaactcctgatgttttttctacaaaagtccataaaatgtgaaaactggagaagatcttagaggttgaagcccaccttctcttttcacataggagggaacagaccatggaaatttaaacgacttcctcacggtcacagaactagttttttaatcctcaggcagtgcatccccccaccctacaactgagcacaacctctttccccacagtgcaattcagaatatgctcagggaatgccagccaccttgtaaaactgctgggagaaaagcatgattcccacaaggactaagtatcagtgatttgtaattttcctgttttgtattatctgctttgctgatgtagacaagagttaactgagtagcatgctttattaagcatgagaaagaatcttaagaattgtcaataaaattaacccaaaactttaataatgtgtctgtaaccaagaaaatattgatagcatcatcctaatgaaactaaacatttattttaaacttattaaattgactctt

SEQ ID NO: 351472 - DNA, 2253 bp, Homo sapiens
catactggggggaaaagcgcaatactattgcttccattgctgctggtgtactattttttacaggctggtggattatcatagatgcagctgttatttatccgcaccgaatggctggactgacctgaaaaaaatgtctggatttctagagggcttgagatgctcagaatgcattgactggggggaaaagcgcaatactattgcttccattgctgctggtgtactattttttacaggctggtggattatcatagatgcagctgttatttatcccaccatgaaagatttcaaccactcataccatgcctgtggtgttatagcaaccatagccttcctaatgattaatgcagtatcgaatggacaagtccgaggtgatagttacagtgaaggttgtctgggtcaaacaggtgctcgcatttggcttttcgttggtttcatgttggcctttggatctctgattgcatctatgtggattctttttggaggttatgttgctaaagaaaaagacatagtataccctggaattgctgtatttttccagaatgccttcatcttttttggagggctggtttttaagtttggccgcactgaagacttatggcagtgaacacatctgatttcccacagcacaacagccctgcatgggtttgtttgtttttttactgctcactcccaaccttttgtaatgccattttctaaacttatttctgagtgtagtctcagcttaaagttgtgtaatactaaaatcacgagaacacctaaacaacaaccaaaaatctattgtggtatgcacttgattaacttataaaatgttagaggaaactttcacatgaataatttttgtcaaattttatcatggtataatttgtaaaaataaaaagaaattacaaaagaaattatggatttgtcaatgtaagtatttgtcatatctgaggtccaaaaccacaatgaaagtgctctgaagatttaatgtgtttattcaaatgtggtctcttctgtgtcaaatgttaaatgaaatataaacattttttagtttttaaaatattccgtggtcaaaattcttcctcactataattggtatttacttttaccaaaaattctgtgaacatgtaatgtaactggcttttgagggtctcccaaggggtgagtggacgtgttggaagagagaagcaccatggtccagccaccaggctccctgtgtcccttccatgggaaggtcttccgctgtgcctctcattccaagggcaggaagatgtgactcagccatgacacgtggttctggtgggatgcacagtcactccacatccaccattgaaggaaaggaaaaaagggcagagacttgacactccagtcttagacaggggacaatttctttgtagttgttctgataataaactgggttccatgttgcatttcatctgtgtactgaaccactagcctaatagaccagcacggtcaactagaatgacaaacattagctactgggaactcttgttgtctcttcctcttcagaactcttgtccccccaggctccccacctctgcaagatgggatacactcttcaggaccacagtttgaaatgtctttcataaaatgtgctacaattagccttcggaatatttgctgggtgatttaaatgtgtgggtctcatttccatgctagccatggtcatctgacagtctctacactgtgaatattgcctggtgatcaagactctcctcaaagaaatgacttgctgtcatcccacatgaactcctgatgttttttctacaaaagtccataaaatgtgaaaactggagaagatcttagaggttgaagcccaccttctcttttcacataggagggaacagaccatggaaatttaaacgacttcctcacggtcacagaactagttttttaatcctcaggcagtgcatccccccaccctacaactgagcacaacctctttccccacagtgcaattcagaatatgctcagggaatgccagccaccttgtaaaactgctgggagaaaagcatgattcccacaaggactaagtatcagtgatttgtaattttcctgttttgtattatctgctttgctgatgtagacaagagttaactgagtagcatgctttattaagcatgagaaagaatcttaagaattgtcaataaaattaacccaaaactttaataatgtgtctgtaaccaagaaaatattgatagcatcatcctaatgaaactaaacatttattttaaacttattaaattgactctt

SEQ ID NO: 351473 - DNA, 2401 bp, Homo sapiens
atttctctggaagtttatcatatatcaacaggacacttctgtcagttggaattggagtcacttttttcctttccccctccatgagataactggtttctagttcaccaaattagattacaaggctttattatgataaaaattaaataatgattgaagtaggcttagagaaaagttatgttaataaatataaattgctctcagatttaagggtacctaatcagttattaggccatgtgcaaattacatgtgggaaaaagctagaacatttttgaaatgtattaaaagggatctcctcacttaaataccttgcttttagccagtgagatacagaattgctatgatttctcattggtatcacctttgttttagttttttttacaggctggtggattatcatagatgcagctgttatttatcccaccatgaaagatttcaaccactcataccatgcctgtggtgttatagcaaccatagccttcctaatgattaatgcagtatcgaatggacaagtccgaggtgatagttacagtgaaggttgtctgggtcaaacaggtgctcgcatttggcttttcgttggtttcatgttggcctttggatctctgattgcatctatgtggattctttttggaggttatgttgctaaagaaaaagacatagtataccctggaattgctgtatttttccagaatgccttcatcttttttggagggctggtttttaagtttggccgcactgaagacttatggcagtgaacacatctgatttcccacagcacaacagccctgcatgggtttgtttgtttttttactgctcactcccaaccttttgtaatgccattttctaaacttatttctgagtgtagtctcagcttaaagttgtgtaatactaaaatcacgagaacacctaaacaacaaccaaaaatctattgtggtatgcacttgattaacttataaaatgttagaggaaactttcacatgaataatttttgtcaaattttatcatggtataatttgtaaaaataaaaagaaattacaaaagaaattatggatttgtcaatgtaagtatttgtcatatctgaggtccaaaaccacaatgaaagtgctctgaagatttaatgtgtttattcaaatgtggtctcttctgtgtcaaatgttaaatgaaatataaacattttttagtttttaaaatattccgtggtcaaaattcttcctcactataattggtatttacttttaccaaaaattctgtgaacatgtaatgtaactggcttttgagggtctcccaaggggtgagtggacgtgttggaagagagaagcaccatggtccagccaccaggctccctgtgtcccttccatgggaaggtcttccgctgtgcctctcattccaagggcaggaagatgtgactcagccatgacacgtggttctggtgggatgcacagtcactccacatccaccattgaaggaaaggaaaaaagggcagagacttgacactccagtcttagacaggggacaatttctttgtagttgttctgataataaactgggttccatgttgcatttcatctgtgtactgaaccactagcctaatagaccagcacggtcaactagaatgacaaacattagctactgggaactcttgttgtctcttcctcttcagaactcttgtccccccaggctccccacctctgcaagatgggatacactcttcaggaccacagtttgaaatgtctttcataaaatgtgctacaattagccttcggaatatttgctgggtgatttaaatgtgtgggtctcatttccatgctagccatggtcatctgacagtctctacactgtgaatattgcctggtgatcaagactctcctcaaagaaatgacttgctgtcatcccacatgaactcctgatgttttttctacaaaagtccataaaatgtgaaaactggagaagatcttagaggttgaagcccaccttctcttttcacataggagggaacagaccatggaaatttaaacgacttcctcacggtcacagaactagttttttaatcctcaggcagtgcatccccccaccctacaactgagcacaacctctttccccacagtgcaattcagaatatgctcagggaatgccagccaccttgtaaaactgctgggagaaaagcatgattcccacaaggactaagtatcagtgatttgtaattttcctgttttgtattatctgctttgctgatgtagacaagagttaactgagtagcatgctttattaagcatgagaaagaatcttaagaattgtcaataaaattaacccaaaactttaataatgtgtctgtaaccaagaaaatattgatagcatcatcctaatgaaactaaacatttattttaaacttattaaattgactctt

SEQ ID NO: 351474 - DNA, 1980 bp, Homo sapiens
  misc_feature (4)..(4): n is a, c, g, or t
  misc_feature (7)..(7): n is a, c, g, or t
  misc_feature (23)..(23): n is a, c, g, or t
ggtnagnaattcccgaggtcaanccacgcgtgcgggtgttataacaaccatagccttcctaatgattaatgcagtatcgaatggacaagtccgaggtgatagttacagtgaaggttgtctgggtcaaacaggtgctcgcatttggcttttcgttggtttcatgttggcctttggatctctgattgcatctatgtggattctttttggaggttatgttgctaaagaaaaagacatagtataccctggaattgctgtatttttccagaatgccttcatcttttttggagggctggtttttaagtttggccgcactgaagacttatggcagtgaacacatctgatttcccacagcacaacagccctgcatgggtttgtttgtttttttactgctcactcccaaccttttgtaatgccattttctaaacttatttctgagtgtagtctcagcttaaagttgtgtaatactaaaatcacgagaacacctaaacaacaaccaaaaatctattgtggtatgcacttgattaacttataaaatgttagaggaaactttcacatgaataatttttgtcaaattttatcatggtataatttgtaaaaataaaaagaaattacaaaagaaattatggatttgtcaatgtaagtatttgtcatatctgaggtccaaaaccacaatgaaagtgctctgaagatttaatgtgtttattcaaatgtggtctcttctgtgtcaaatgttaaatgaaatataaacattttttagtttttaaaatattccgtggtcaaaattcttcctcactataattggtatttacttttaccaaaaattctgtgaacatgtaatgtaactggcttttgagggtctcccaaggggtgagtggacgtgttggaagagagaagcaccatggtccagccaccaggctccctgtgtcccttccatgggaaggtcttccgctgtgcctctcattccaagggcaggaagatgtgactcagccatgacacgtggttctggtgggatgcacagtcactccacatccaccattgaaggaaaggaaaaaagggcagagacttgacactccagtcttagacaggggacaatttctttgtagttgttctgataataaactgggttccatgttgcatttcatctgtgtactgaaccactagcctaatagaccagcacggtcaactagaatgacaaacattagctactgggaactcttgttgtctcttcctcttcagaactcttgtccccccaggctccccacctctgcaagatgggatacactcttcaggaccacagtttgaaatgtctttcataaaatgtgctacaattagccttcggaatatttgctgggtgatttaaatgtgtgggtctcatttccatgctagccatggtcatctgacagtctctacactgtgaatattgcctggtgatcaagactctcctcaaagaaatgacttgctgtcatcccacatgaactcctgatgttttttctacaaaagtccataaaatgtgaaaactggagaagatcttagaggttgaagcccaccttctcttttcacataggagggaacagaccatggaaatttaaacgacttcctcacggtcacagaactagttttttaatcctcaggcagtgcatccccccaccctacaactgagcacaacctctttccccacagtgcaattcagaatatgctcagggaatgccagccaccttgtaaaactgctgggagaaaagcatgattcccacaaggactaagtatcagtgatttgtaattttcctgttttgtattatctgctttgctgatgtagacaagagttaactgagtagcatgctttattaagcatgagaaagaatcttaagaattgtcaataaaattaacccaaaactttaataatgtgtctgtaaccaagaaaatattgatagcatcatcctaatgaaactaaacatttattttaaacttattaaattgactctt

SEQ ID NO: 351475 - DNA, 2205 bp, Homo sapiens
agcgggtgtccgcatgcgcgactgagccgggtggatggtactgctgcatccgggtgtctggaggctgtggccgttttgttttcttggctaaaatcgggggagtgaggcgggccggcgcggcgcgacaccgggctccggaaccactgcacgacggggctggactgacctgaaaaaaatgtctggatttctagagggcttgagatgctcagaatgcattgactggggggaaaagcgcaatactattgcttccattgctgctggtgtactattttttacaggctggtggattatcatagatgcagctgttatttatcccaccatgaaagatttcaaccactcataccatgcctgtggtgttatagcaaccatagccttcctaatgattaatgcagtatcgaatggacaagtccgaggtgatagttacagtgaaggttgtctgggtcaaacagaaaaagacatagtataccctggaattgctgtatttttccagaatgccttcatcttttttggagggctggtttttaagtttggccgcactgaagacttatggcagtgaacacatctgatttcccacagcacaacagccctgcatgggtttgtttgtttttttactgctcactcccaaccttttgtaatgccattttctaaacttatttctgagtgtagtctcagcttaaagttgtgtaatactaaaatcacgagaacacctaaacaacaaccaaaaatctattgtggtatgcacttgattaacttataaaatgttagaggaaactttcacatgaataatttttgtcaaattttatcatggtataatttgtaaaaataaaaagaaattacaaaagaaattatggatttgtcaatgtaagtatttgtcatatctgaggtccaaaaccacaatgaaagtgctctgaagatttaatgtgtttattcaaatgtggtctcttctgtgtcaaatgttaaatgaaatataaacattttttagtttttaaaatattccgtggtcaaaattcttcctcactataattggtatttacttttaccaaaaattctgtgaacatgtaatgtaactggcttttgagggtctcccaaggggtgagtggacgtgttggaagagagaagcaccatggtccagccaccaggctccctgtgtcccttccatgggaaggtcttccgctgtgcctctcattccaagggcaggaagatgtgactcagccatgacacgtggttctggtgggatgcacagtcactccacatccaccattgaaggaaaggaaaaaagggcagagacttgacactccagtcttagacaggggacaatttctttgtagttgttctgataataaactgggttccatgttgcatttcatctgtgtactgaaccactagcctaatagaccagcacggtcaactagaatgacaaacattagctactgggaactcttgttgtctcttcctcttcagaactcttgtccccccaggctccccacctctgcaagatgggatacactcttcaggaccacagtttgaaatgtctttcataaaatgtgctacaattagccttcggaatatttgctgggtgatttaaatgtgtgggtctcatttccatgctagccatggtcatctgacagtctctacactgtgaatattgcctggtgatcaagactctcctcaaagaaatgacttgctgtcatcccacatgaactcctgatgttttttctacaaaagtccataaaatgtgaaaactggagaagatcttagaggttgaagcccaccttctcttttcacataggagggaacagaccatggaaatttaaacgacttcctcacggtcacagaactagttttttaatcctcaggcagtgcatccccccaccctacaactgagcacaacctctttccccacagtgcaattcagaatatgctcagggaatgccagccaccttgtaaaactgctgggagaaaagcatgattcccacaaggactaagtatcagtgatttgtaattttcctgttttgtattatctgctttgctgatgtagacaagagttaactgagtagcatgctttattaagcatgagaaagaatcttaagaattgtcaataaaattaacccaaaactttaataatgtgtctgtaaccaagaaaatattgatagcatcatcctaatgaaactaaacatttattttaaacttattaaattgactctt

SEQ ID NO: 351476 - DNA, 1427 bp, Homo sapiens
tcaagcttctaacgatgtacggggacatggtataatttgtaaaaataaaaagaaattacaaaagaaattatggatttgtcaatgtaagtatttgtcatatctgaggtccaaaaccacaatgaaagtgctctgaagatttaatgtgtttattcaaatgtggtctcttctgtgtcaaatgttaaatgaaatataaacattttttagtttttaaaatattccgtggtcaaaattcttcctcactataattggtatttacttttaccaaaaattctgtgaacatgtaatgtaactggcttttgagggtctcccaaggggtgagtggacgtgttggaagagagaagcaccatggtccagccaccaggctccctgtgtcccttccatgggaaggtcttccgctgtgcctctcattccaagggcaggaagatgtgactcagccatgacacgtggttctggtgggatgcacagtcactccacatccaccattgaaggaaaggaaaaaagggcagagacttgacactccagtcttagacaggggacaatttctttgtagttgttctgataataaactgggttccatgttgcatttcatctgtgtactgaaccactagcctaatagaccagcacggtcaactagaatgacaaacattagctactgggaactcttgttgtctcttcctcttcagaactcttgtccccccaggctccccacctctgcaagatgggatacactcttcaggaccacagtttgaaatgtctttcataaaatgtgctacaattagccttcggaatatttgctgggtgatttaaatgtgtgggtctcatttccatgctagccatggtcatctgacagtctctacactgtgaatattgcctggtgatcaagactctcctcaaagaaatgacttgctgtcatcccacatgaactcctgatgttttttctacaaaagtccataaaatgtgaaaactggagaagatcttagaggttgaagcccaccttctcttttcacataggagggaacagaccatggaaatttaaacgacttcctcacggtcacagaactagttttttaatcctcaggcagtgcatccccccaccctacaactgagcacaacctctttccccacagtgcaattcagaatatgctcagggaatgccagccaccttgtaaaactgctgggagaaaagcatgattcccacaaggactaagtatcagtgatttgtaattttcctgttttgtattatctgctttgctgatgtagacaagagttaactgagtagcatgctttattaagcatgagaaagaatcttaagaattgtcaataaaattaacccaaaactttaataatgtgtctgtaaccaagaaaatattgatagcatcatcctaatgaaactaaacatttattttaaacttattaaattgactctt

SEQ ID NO: 351477 - DNA, 934 bp, Homo sapiens
aacaggctggtccccggtacgggatccagtcttagacaggggacaatttctttgtagttgttctgataataaactgggttccatgttgcatttcatctgtgtactgaaccactagcctaatagaccagcacggtcaactagaatgacaaacattagctactgggaactcttgttgtctcttcctcttcagaactcttgtccccccaggctccccacctctgcaagatgggatacactcttcaggaccacagtttgaaatgtctttcataaaatgtgctacaattagccttcggaatatttgctgggtgatttaaatgtgtgggtctcatttccatgctagccatggtcatctgacagtctctacactgtgaatattgcctggtgatcaagactctcctcaaagaaatgacttgctgtcatcccacatgaactcctgatgttttttctacaaaagtccataaaatgtgaaaactggagaagatcttagaggttgaagcccaccttctcttttcacataggagggaacagaccatggaaatttaaacgacttcctcacggtcacagaactagttttttaatcctcaggcagtgcatccccccaccctacaactgagcacaacctctttccccacagtgcaattcagaatatgctcagggaatgccagccaccttgtaaaactgctgggagaaaagcatgattcccacaaggactaagtatcagtgatttgtaattttcctgttttgtattatctgctttgctgatgtagacaagagttaactgagtagcatgctttattaagcatgagaaagaatcttaagaattgtcaataaaattaacccaaaactttaataatgtgtctgtaaccaagaaaatattgatagcatcatcctaatgaaactaaacatttattttaaacttattaaattgactctt

SEQ ID NO: 351478 - DNA, 640 bp, Homo sapiens
acccagtttattatcagaacaactacaaagaaattgtcccctgtctaagactggagtgtcaagtctctacactgtgaatattgcctggtgatcaagactctcctcaaagaaatgacttgctgtcatcccacatgaactcctgatgttttttctacaaaagtccataaaatgtgaaaactggagaagatcttagaggttgaagcccaccttctcttttcacataggagggaacagaccatggaaatttaaacgacttcctcacggtcacagaactagttttttaatcctcaggcagtgcatccccccaccctacaactgagcacaacctctttccccacagtgcaattcagaatatgctcagggaatgccagccaccttgtaaaactgctgggagaaaagcatgattcccacaaggactaagtatcagtgatttgtaattttcctgttttgtattatctgctttgctgatgtagacaagagttaactgagtagcatgctttattaagcatgagaaagaatcttaagaattgtcaataaaattaacccaaaactttaataatgtgtctgtaaccaagaaaatattgatagcatcatcctaatgaaactaaacatttattttaaacttattaaattgactctt

SEQ ID NO: 351479 - DNA, 847 bp, Homo sapiens
agcgggtgtccgcatgcgcgactgagccgggtggatggtactgctgcatccgggtgtctggaggctgtggccgttttgttttcttggctaaaatcgggggagtgaggcgggccggcgcggcgcgacaccgggctccggaaccactgcacgacggggctggactgacctgaaaaaaatgtctggatttctagagggcttgagatgctcagaatgcattgactggggggaaaagcgcaatactattgcttccattgctgctggtgtactattttttacaggctggtggattatcatagatgcagctgttatttatcccaccatgaaagatttcaaccactcataccatgcctgtggtgttatagcaaccatagccttcctaatgattaatgcagtatcgaatggacaagtccgaggtgatagttacagtgaaggttgtctgggtcaaacagaaaaagacatagtataccctggaattgctgtatttttccagaatgccttcatcttttttggagggctggtttttaagtttggccgcactgaagacttatggcagtgaacacatctgatttcccacagcacaacagccctgcatgggtttgtttgtttttttactgctcactcccaaccttttgtaatgccattttctaaacttatttctgagtgtagtctcagcttaaagttgtgtaatactaaaatcacgagaacacctaaacaacaaccaaaaatctattgtggtatgcacttgattaacttataaaatgttagaggaaactttcacatgaataatttttgtcaaattttatcatggtataatttgtaaaaataaaaagaaattacaaaagaaatt

SEQ ID NO: 351480 - DNA, 579 bp, Homo sapiens
agcgggtgtccgcatgcgcgactgagccgggtggatggtactgctgcatccgggtgtctggaggctgtggccgttttgttttcttggctaaaatcgggggagtgaggcgggccggcgcggcgcgacaccgggctccggaaccactgcacgacggggctggactgacctgaaaaaaatgtctggatttctagagggcttgagatgctcagaactagttttttaatcctcaggcagtgcatccccccaccctacaactgagcacaacctctttccccacagtgcaattcagaatatgctcagggaatgccagccaccttgtaaaactgctgggagaaaagcatgattcccacaaggactaagtatcagtgatttgtaattttcctgttttgtattatctgctttgctgatgtagacaagagttaactgagtagcatgctttattaagcatgagaaagaatcttaagaattgtcaataaaattaacccaaaactttaataatgtgtctgtaaccaagaaaatattgatagcatcatcctaatgaaactaaacatttattttaaacttattaaattgactctt

SEQ ID NO: 351481 - DNA, 2298 bp, Homo sapiens
agcgggtgtccgcatgcgcgactgagccgggtggatggtactgctgcatccgggtgtctggaggctgtggccgttttgttttcttggctaaaatcgggggagtgaggcgggccggcgcggcgcgacaccgggctccggaaccactgcacgacggggctggactgacctgaaaaaaatgtctggatttctagagggcttgagatgctcagaatgcattgactggggggaaaagcgcaatactattgcttccattgctgctggtgtactattttttacaggctggtggattatcatagatgcagctgttatttatcccaccatgaaagatttcaaccactcataccatgcctgtggtgttatagcaaccatagccttcctaatgattaatgcagtatcgaatggacaagtccgaggtgatagttacagtgaaggttgtctgggtcaaacaggtgctcgcatttggcttttcgttggtttcatgttggcctttggatctctgattgcatctatgtggattctttttggaggttatgttgctaaagaaaaagacatagtataccctggaattgctgtatttttccagaatgccttcatcttttttggagggctggtttttaagtttggccgcactgaagacttatggcagtgaacacatctgatttcccacagcacaacagccctgcatgggtttgtttgtttttttactgctcactcccaaccttttgtaatgccattttctaaacttatttctgagtgtagtctcagcttaaagttgtgtaatactaaaatcacgagaacacctaaacaacaaccaaaaatctattgtggtatgcacttgattaacttataaaatgttagaggaaactttcacatgaataatttttgtcaaattttatcatggtataatttgtaaaaataaaaagaaattacaaaagaaattatggatttgtcaatgtaagtatttgtcatatctgaggtccaaaaccacaatgaaagtgctctgaagatttaatgtgtttattcaaatgtggtctcttctgtgtcaaatgttaaatgaaatataaacattttttagtttttaaaatattccgtggtcaaaattcttcctcactataattggtatttacttttaccaaaaattctgtgaacatgtaatgtaactggcttttgagggtctcccaaggggtgagtggacgtgttggaagagagaagcaccatggtccagccaccaggctccctgtgtcccttccatgggaaggtcttccgctgtgcctctcattccaagggcaggaagatgtgactcagccatgacacgtggttctggtgggatgcacagtcactccacatccaccattgaaggaaaggaaaaaagggcagagacttgacactccagtcttagacaggggacaatttctttgtagttgttctgataataaactgggttccatgttgcatttcatctgtgtactgaaccactagcctaatagaccagcacggtcaactagaatgacaaacattagctactgggaactcttgttgtctcttcctcttcagaactcttgtccccccaggctccccacctctgcaagatgggatacactcttcaggaccacagtttgaaatgtctttcataaaatgtgctacaattagccttcggaatatttgctgggtgatttaaatgtgtgggtctcatttccatgctagccatggtcatctgacagtctctacactgtgaatattgcctggtgatcaagactctcctcaaagaaatgacttgctgtcatcccacatgaactcctgatgttttttctacaaaagtccataaaatgtgaaaactggagaagatcttagaggttgaagcccaccttctcttttcacataggagggaacagaccatggaaatttaaacgacttcctcacggtcacagaactagttttttaatcctcaggcagtgcatccccccaccctacaactgagcacaacctctttccccacagtgcaattcagaatatgctcagggaatgccagccaccttgtaaaactgctgggagaaaagcatgattcccacaaggactaagtatcagtgatttgtaattttcctgttttgtattatctgctttgctgatgtagacaagagttaactgagtagcatgctttattaagcatgagaaagaatcttaagaattgtcaataaaattaacccaaaactttaataatgtgtctgtaaccaagaaaatattgatagcatcatcctaatgaaactaaacatttattttaaacttattaaattgactctt

SEQ ID NO: 351482 - DNA, 2213 bp, Homo sapiens
agcgggtgtccgcatgcgcgactgagccgggtggatggtactgctgcatccgggtgtctggaggctgtggccgttttgttttcttggctaaaatcgggggagtgaggcgggccggcgcggcgcgacaccgggctccggaaccactgcacgacggggctggactgacctgaaaaaaatgtctggatttctagagggcttgagatgctcagaatgcattgactggggggaaaagcgcaatactattgcttccattgctgctggtgtactattttttacaggctggtggattatcatagatgcagctgttatttatcccaccatgaaagatttcaaccactcataccatgcctgtggtgttatagcaaccatagccttcctaatgattaatgcagtatcgaatggacaagtccgaggtgatagttacagtgaaggttgtctgggtcaaacaggtgctcgcatttggcttttcgttggtttcatgttggcctttggatctctgattgcatctatgtggattctttttggaggttatgttgctaaagaaaaagacatagtataccctggaattgctgtatttttccagaatgccttcatcttttttggagggctggtttttaagtttggccgcactgaagacttatggcagtgaacacatctgatttcccacagcacaacagccctgcatgggtttgtttgtttttttactgctcactcccaaccttttgtaatgccattttctaaacttatttctgagtgtagtctcagcttaaagttgtgtaatactaaaatcacgagaacacctaaacaacaaccaaaaatctattgtggtatgcacttgattaacttataaaatgttagaggaaactttcacatgaataatttttgtcaaattttatcatggtataatttgtaaaaataaaaagaaattacaaaagaaattatggatttgtcaatgtaagtatttgtcatatctgaggtccaaaaccacaatgaaagtgctctgaagatttaatgtgtttattcaaatgtggtctcttctgtgtcaaatgttaaatgaaatataaacattttttagtttttaaaatattccgtggtcaaaattcttcctcactataattggtatttacttttaccaaaaattctgtgaacatgtaatgtaactggcttttgagggtctcccaaggggtgagtggacgtgttggaagagagaagcaccatggtccagccaccaggctccctgtgtcccttccatgggaaggtcttccgctgtgcctctcattccaagggcaggaagatgtgactcagccatgacacgtggttctggtgggatgcacagtcactccacatccaccattgaaggaaaggaaaaaagggcagagacttgacactccagtcttagacaggggacaatttctttgtagttgttctgataataaactgggttccatgttgcatttcatctgtgtactgaaccactagcctaatagaccagcacggtcaactagaatgacaaacattagctactgggaactcttgttgtctcttcctcttcagaactcttgtccccccaggctccccacctctgcaagatgggatacactcttcaggaccacagtttgaaatgtctttcataaaatgtgctacaattagccttcggaatatttgctgggtgatttaaatgtgtgggtctcatttccatgctagccatggtcatctgacagtctctacactgtgaatattgcctggtgatcaagactctcctcaaagaaatgacttgctgtcatcccacatgaactcctgatgttttttctacaaaagtccataaaatgtgaaaactggagaagatcttagaggttgaagcccaccttctcttttcacataggagggaacagaccatggaaatttaaacgacttcctcacggtcacagaactagttttttaatcctcaggcagtgcatccccccaccctacaactgagcacaacctctttccccacagtgcaattcagaatatgctcagggaatgccagccaccttgtaaaactgctgggagaaaagcatgattcccacaaggactaagtatcagtgatttgtaattttcctgttttgtattatctgctttgctgatgtagacaagagttaactgagtagcatgctttattaagcatgagaaagaatcttaagaattgtcaataaaattaacccaaaacttta

SEQ ID NO: 351483 - DNA, 2445 bp, Homo sapiens
agctggggccgtctgacgggctggtgcccacagggtcgttgccgccacccaccggcaagtcgcagacccggcctgagcctccctggacccttcctggcctcttcctcctgtcctaggtaccgcggcgccaggagaaggcgaccgcgtccacaccccgccatgacagagaggggacctcaccctcccccggaacaccccaagacccctggaaaatcccccgatcccccacttcacagctggacaagccgaagccccgagaaaagagcgtgacccggccagctccctcagcgaggggtgccccggctaaagtgacctgaaaaaaatgtctggatttctagagggcttgagatgctcagaatgcattgactggggggaaaagcgcaatactattgcttccattgctgctggtgtactattttttacaggctggtggattatcatagatgcagctgttatttatcccaccatgaaagatttcaaccactcataccatgcctgtggtgttatagcaaccatagccttcctaatgattaatgcagtatcgaatggacaagtccgaggtgatagttacagtgaaggttgtctgggtcaaacaggtgctcgcatttggcttttcgttggtttcatgttggcctttggatctctgattgcatctatgtggattctttttggaggttatgttgctaaagaaaaagacatagtataccctggaattgctgtatttttccagaatgccttcatcttttttggagggctggtttttaagtttggccgcactgaagacttatggcagtgaacacatctgatttcccacagcacaacagccctgcatgggtttgtttgtttttttactgctcactcccaaccttttgtaatgccattttctaaacttatttctgagtgtagtctcagcttaaagttgtgtaatactaaaatcacgagaacacctaaacaacaaccaaaaatctattgtggtatgcacttgattaacttataaaatgttagaggaaactttcacatgaataatttttgtcaaattttatcatggtataatttgtaaaaataaaaagaaattacaaaagaaattatggatttgtcaatgtaagtatttgtcatatctgaggtccaaaaccacaatgaaagtgctctgaagatttaatgtgtttattcaaatgtggtctcttctgtgtcaaatgttaaatgaaatataaacattttttagtttttaaaatattccgtggtcaaaattcttcctcactataattggtatttacttttaccaaaaattctgtgaacatgtaatgtaactggcttttgagggtctcccaaggggtgagtggacgtgttggaagagagaagcaccatggtccagccaccaggctccctgtgtcccttccatgggaaggtcttccgctgtgcctctcattccaagggcaggaagatgtgactcagccatgacacgtggttctggtgggatgcacagtcactccacatccaccattgaaggaaaggaaaaaagggcagagacttgacactccagtcttagacaggggacaatttctttgtagttgttctgataataaactgggttccatgttgcatttcatctgtgtactgaaccactagcctaatagaccagcacggtcaactagaatgacaaacattagctactgggaactcttgttgtctcttcctcttcagaactcttgtccccccaggctccccacctctgcaagatgggatacactcttcaggaccacagtttgaaatgtctttcataaaatgtgctacaattagccttcggaatatttgctgggtgatttaaatgtgtgggtctcatttccatgctagccatggtcatctgacagtctctacactgtgaatattgcctggtgatcaagactctcctcaaagaaatgacttgctgtcatcccacatgaactcctgatgttttttctacaaaagtccataaaatgtgaaaactggagaagatcttagaggttgaagcccaccttctcttttcacataggagggaacagaccatggaaatttaaacgacttcctcacggtcacagaactagttttttaatcctcaggcagtgcatccccccaccctacaactgagcacaacctctttccccacagtgcaattcagaatatgctcagggaatgccagccaccttgtaaaactgctgggagaaaagcatgattcccacaaggactaagtatcagtgatttgtaattttcctgttttgtattatctgctttgctgatgtagacaagagttaactgagtagcatgctttattaagcatgagaaagaatcttaagaattgtcaataaaattaacccaaaactttaataatgtgtctgtaaccaagaaaatattgatagcatcatcctaatgaaactaaacatttattttaaacttattaaattgactctt

SEQ ID NO: 351484 - DNA, 2237 bp, Homo sapiens
agcgggtgtccgcatgcgcgactgagccgggtggatggtactgctgcatccgggtgtctggaggctgtggccgttttgttttcttggctaaaatcgggggagtgaggcgggccggcgcggcgcgacaccgggctccggaaccactgcacgacggggctggactgacctgaaaaaaatgtctggatttctagagggcttgagatgctcagaatgcattgactggggggaaaagcgcaatactattgcttccattgctgctggtgtactattttttacaggctggtggattatcatagatgcagctgttatttatcccaccatgaaagatttcaaccactcataccatgcctgtggtgttatagcaaccatagccttcctaatgattaatgcagtatcgaatggacaagtccgaggtgatagttacagtgaaggttgtctgggtcaaacaggtgctcgcatttggcttttcgttggtttcatgttggcctttggatctctgattgcatctatgtggattctttttggaggttatgttgctaaagagggctggtttttaagtttggccgcactgaagacttatggcagtgaacacatctgatttcccacagcacaacagccctgcatgggtttgtttgtttttttactgctcactcccaaccttttgtaatgccattttctaaacttatttctgagtgtagtctcagcttaaagttgtgtaatactaaaatcacgagaacacctaaacaacaaccaaaaatctattgtggtatgcacttgattaacttataaaatgttagaggaaactttcacatgaataatttttgtcaaattttatcatggtataatttgtaaaaataaaaagaaattacaaaagaaattatggatttgtcaatgtaagtatttgtcatatctgaggtccaaaaccacaatgaaagtgctctgaagatttaatgtgtttattcaaatgtggtctcttctgtgtcaaatgttaaatgaaatataaacattttttagtttttaaaatattccgtggtcaaaattcttcctcactataattggtatttacttttaccaaaaattctgtgaacatgtaatgtaactggcttttgagggtctcccaaggggtgagtggacgtgttggaagagagaagcaccatggtccagccaccaggctccctgtgtcccttccatgggaaggtcttccgctgtgcctctcattccaagggcaggaagatgtgactcagccatgacacgtggttctggtgggatgcacagtcactccacatccaccattgaaggaaaggaaaaaagggcagagacttgacactccagtcttagacaggggacaatttctttgtagttgttctgataataaactgggttccatgttgcatttcatctgtgtactgaaccactagcctaatagaccagcacggtcaactagaatgacaaacattagctactgggaactcttgttgtctcttcctcttcagaactcttgtccccccaggctccccacctctgcaagatgggatacactcttcaggaccacagtttgaaatgtctttcataaaatgtgctacaattagccttcggaatatttgctgggtgatttaaatgtgtgggtctcatttccatgctagccatggtcatctgacagtctctacactgtgaatattgcctggtgatcaagactctcctcaaagaaatgacttgctgtcatcccacatgaactcctgatgttttttctacaaaagtccataaaatgtgaaaactggagaagatcttagaggttgaagcccaccttctcttttcacataggagggaacagaccatggaaatttaaacgacttcctcacggtcacagaactagttttttaatcctcaggcagtgcatccccccaccctacaactgagcacaacctctttccccacagtgcaattcagaatatgctcagggaatgccagccaccttgtaaaactgctgggagaaaagcatgattcccacaaggactaagtatcagtgatttgtaattttcctgttttgtattatctgctttgctgatgtagacaagagttaactgagtagcatgctttattaagcatgagaaagaatcttaagaattgtcaataaaattaacccaaaactttaataatgtgtctgtaaccaagaaaatattgatagcatcatcctaatgaaactaaacatttattttaaacttattaaattgactctt

SEQ ID NO: 351485 - DNA, 937 bp, Homo sapiens
agcgggtgtccgcatgcgcgactgagccgggtggatggtactgctgcatccgggtgtctggaggctgtggccgttttgttttcttggctaaaatcgggggagtgaggcgggccggcgcggcgcgacaccgggctccggaaccactgcacgacggggctggactgacctgaaaaaaatgtctggatttctagagggcttgagatgctcagaatgcattgactggggggaaaagcgcaatactattgcttccattgctgctggtgtactattttttacaggctggtggattatcatagatgcagctgttatttatcccaccatgaaagatttcaaccactcataccatgcctgtggtgttatagcaaccatagccttcctaatgattaatgcagtatcgaatggacaagtccgaggtgatagttacagtgaaggttgtctgggtcaaacaggtgctcgcatttggcttttcgttggtttcatgttggcctttggatctctgattgcatctatgtggattctttttggaggttatgttgctaaagaaaaagacatagtataccctggaattgctgtatttttccagaatgccttcatcttttttggagggctggtttttaagtttggccgcactgaagacttatggcagtgaacacatctgatttcccacagcacaacagccctgcatgggtttgtttgtttttttactgctcactcccaaccttttgtaatgccattttctaaacttatttctgagtgtagtctcagcttaaagttgtgtaatactaaaatcacgagaacacctaaacaagagccaaatctatggggatgcacctggagtacgtttaaacggtcaaggagacttcactgaaactaaccccggcacatctacccgggcataactgggcagataacagcaacttcgcgcacacacacacgg

SEQ ID NO: 351486 - DNA, 1031 bp, Homo sapiens
ggaaacggaagaaggagcaagctatggaggggaacagggatgaggctgagaaatgtgtcgagatcgcccgggaggccctgaacgccggcaaccgcgagaaggcccagcgcttcctgcagaaggccgagaagctctacccactgccctcggcccgcgcactattggaaataattatgaaaaatggaagcacggctggaaatagccctcattgccgaaaaccatcaggtagtggcgatcaaagcaagcctaattgcacaaaggacagcacatctggtagtggtgaaggtggaaaaggctataccaaagaccaagtagatggagttctcagcataaacaaatgtaaaaattactatgaagtacttggagttacgaaagatgctggtgatgaagatttgaaaaaagcttatagaaagcttgctttgaagtttcatccagacaaaaaccatgcacctggagcaacagatgcttttaaaagtaaagtaaaccttttaaagcaattttactaagctgtctttagaattcactttacggcgtttcagaatattaagttctgcttttggactggtgcatttagagaccagcacaagcaagagtctggaaaatcctttaaaacttcagtattaactggttatacccgaaggcaaacaaatgcagtttggcttcacaaaagcaacattccagttctgatacagtctcaagtaacttttctaggcacatatgcatgctttcttgtttaccaggaacaaatagggtgatgattatgcatgagcttctagcgtattgtcatctggttctaaatgaactaaaagcaaaatatagtttttttgagtttttaaggtacaagagactgtgtggaatttggatatttaagaaatagctccccagtgttcttttatttctattaaactttgcccaggtttttcattttatatatgtagttttagctaatgttatttttttctttttaaaaattaatatctttcctcttgcctactatttatttttttattttccatcccaatattctttaa

SEQ ID NO: 351487 - DNA, 5900 bp, Homo sapiens
ggaaacggaagaaggagcaagctatggaggggaacagggatgaggctgagaaatgtgtcgagatcgcccgggaggccctgaacgccggcaaccgcgagaaggcccagcgcttcctgcagaaggccgagaagctctacccactgccctcggcccgcgcactattggaaataattatgaaaaatggaagcacggctggaaatagccctcattgccgaaaaccatcaggtagtggcgatcaaagcaagcctaattgcacaaaggacagcacatctggtagtggtgaaggtggaaaaggctataccaaagaccaagtagatggagttctcagcataaacaaatgtaaaaattactatgaagtacttggagttacgaaagatgctggtgatgaagatttgaaaaaagcttatagaaagcttgctttgaagtttcatccagacaaaaaccatgcacctggagcaacagatgcttttaaaaagattggaaatgcttatgctgttttaagtaatccagaaaagcgaaaacagtatgacctcacgggcaatgaagaacaagcatgtaaccaccaaaacaatggcagatttaatttccattgaggttgtgaagctgatataactccagaagacttgtttaatatattttttgggggtggatttccttcaggtagtgtacattctttttcaaatggaagagctggttatagccaacaacatcagcatcgacatagtggacatgaaagagaagaggaaagaggagatggaggtttttctgtgtttatccagctgatgcccataattgtattgatcctcgtgtcattattaagccagttgatggtctctaatcctccttattccttatatcccagatctggaactgggcaaactattaaaatgcaaacagaaaacttgggtgttgtttattatgtcaacaaggacttcaaaaatgaatataaaggaatgttattacaaaaggtagaaaagagtgtggaggaagattatgtgactaatattcgaaataactgctggaaagaaagacaacaaaaaacagatatgcagtatgcagcaaaagtataccgtgatgatcgactccgaaggaaggcagatgccttgagcatggacaactgtaaagaattagagcggcttaccagtctttataaaggaggatgaactggaatttttatttataccttttagcgtactctttattttttctgtaagtaagtttggtttcatcatgagggatgaaggaaaagatttgatactgaaaactaaactgaatagttggttcctgaaatcttggactgtttatgacctactggctcctttaaatagtaactgaaaactaaaatggaatattttagttaacgcttctacaagtattttcattttaaaagcttacatgattcctaactaaagtgtcatgagaaaggattatcacacctgtagcaatttccagttttagtgattctccattttttcccttgtcatgtaaatatttatggaatgatcattttgtgtacatacaggttactgcttttttatttaaattcttttagtgtttagctccatgagacacttcagtttaaattgatggaataaatgttatatgacacatttacattttccttatcaaggtgtcaaatatgtggactttaaacaatgaaactttttcaaaaagaaaaaacaaaaactttaactttgtgtaaaatcttatagtattatcagcttagagggaattgatatttttaatattgccgttatattccaaaatatatattgagataaatgaactggtgtagaatatcagtttgctatttagttttatgaattactatacatatacatgcatagaaatgaaatgctatactgataaattttaaagaaaatatgaggaaatggctataaatattaaactaaaagggtcttcaacagtaaagtgcagttatgtcatttaaaattccaatactttaaaggccaccaaattttgatgtatatgtccttgaagggctgctaaaatttatgaagaggactcacattttcccccatagaaatttgcagtttcttggtgatcatttaagcaggatccaaagaagttcctttacaaataagtaataagaaaaatgagtactaaaatacagctttgtgccttttaaccctatgccaactcctaaacatataagtagattacagtatacttatctgatcagagcatgatctgtttggccacatgcaagtgtgagcagaaatagagcagcacgtagaatagtaacttaaagcaagtcatcctttaaaaattctgagctaaaatctatttaccattgagtaattgaattaatcccataggaataagctccttgtaagtaaatccatgatatgaattagaaaaaaaaaacagctggaaattgaagtttttgatgcctgtatactggatatgaaactatttgatttctagtcttctgtgtttagcagttgtaatattttaatgattttgcttcatactcggttaatggaacataaacatatctttgatacttctttgtgagtgagagaatgctagatagggtggctttgttctttgtttaagttttttttcctgaatgtagttaatttatggcatctgttgaataaaactgctaaaatgacctcttaaaaatgttctgttgtatccccttttccaggtgaatcaatagaaatgcctgattgaattagtaggttaaactaaacaacatactgtcataggaaaactggagagcttaaccaacttgctcttagaaatgttaccttaaaaaaaaaaaaaagcagtgcttaagagaaaatacaattttaattattttgttgagcctgcagagtagtaagtttttaaaaatataagttcatagcattttaattaactttgaaagttcatatgcatcagaaaatttatgaaaatttgaatgaaaaatttcatctatttatttttctaattttaatggcaaatttacactattatggctgataattctgtgaacttaccttcttgttgactgattctttttcccttaatcccagctttaaggagataggtgaagttattgtacaaagttaagtgataccataaagtatatattataaagtcatacatggcttttggacagtattatatttcagttgcagtgctgcattccattaaatttcataaaatgctagggaaaatgtgtttgataaaattttctgcagtgagaaatgacagactgagtgcctgacaatttaagccacatatgaagtatgcaagtaaagattcagtccttaatgtcatctatatcatggtataaaagctcaacaagtatcttataatttggagttaactttataaagtaagaagagtttggatatcttgataaaagattttcatgtttgctgcttttttatttcatcggctcattctaatgaccacctaaaagtcctcaatctttgaatattgctttattagctcctctaactggtattctaacagtttagcagcacttatatttattaatgctttacatttttacccctttttgtgtaaacacaaatacacccatgcatatacacacaaacattattgtccttgtgagggtttgggggaaatgaaaaatagtacctttctcctcttcttttgattccttagttcccaaatagactggtgctagtcatttagtcatctgtaaatttcgaaatgtagtttgattaaatgtgaactgaattctcagcaatgaaaaatgtcaagttgaattcatctaataagtgaaaataatatattttgtaaacagattacatttgaacacctaaataagtatttgtttcataatcattacatgcttgtttatgatttacaaagatttggtagagaaaagtacagtccttaaggcatatatatgccaatgcattaaactactcagcttttgtgccagctcaggtgttcataggaacaggaatgtggaataccagctttttactttaattatacttttatgctgaatttttcttccagttaaacctttaattacactagtatgtaaagtagttactgagaaaaataagtttttgatttcccttctgttgatctgtaacatttttaaatgaagctatttaacacatgacatgctaatgttacttaatggattcctatgtatttcattaaaaaaaagtctcccacctgtgttaagacagctaaatatttcttgatgttggcttgaggaccaagtgagccatcttgccagttaagcaagttttatatcagaggaccaaatggttaagaagagaatttgtacatttcttgagcttccccatgtgaagcttgggttcagtactatcctattactatccatcttcataatgagtgaagcaaactgaaagggaattcataatcttttttcttatctgaacagaaaaactaatgaaaatcaacaataaatctttattttaattttcattcaacagctgaaaaaccatgtctgttgaccacattggaccattgcctagttaaaatccataaaattccctataaaccaatgaaaagaaacttgtctggcaataatttccaacattttaaattctaatttttagttacaaagaaaaaggatagaatgaggcttttcaaggaattcttgctcatcccttcaattatttggcaggtaaaacagtcctagaattcagcttcctttttggttttattactattaaatagatactttcatataaatggaaacacttttcctcaaaacattaattcaaaacatactccttatattaaggattatagcaccatattttttgtatattccctatgtgtaactttttcctgttggtatgtgatatttttcatttaatatgactatctgctggtgttggggccaatagatttgtgaatattctgtggatgtgtctatgtataggtgtatatatatatatatatattatttttgttttttttcccagctaattacctcaaatgtgtgattgtttaatatataccacactatgtttgcacagagcagggcttccattagcagtggatatttttatgtctgactttgaaaatcagtcaacacaatttcattggtgtgaattatttgttgctctttttcatattttaatggagagattcctattataaggcccatgcttcaaacataattatatctttctatatccagccatctggaaatacataggggtaagaagtatttcttgaaatgtccttgtttagtaagttagtaaaaactgggatgactagttgccaagatgtcttgtaactgcatagcagatgacacctggcatggcaagtctcattcacttcagcacaacactctgtacatttcagtctgatattctactttgccatttaaggacaccattaaaatcatagagattttcagtgacattggagtattgtaattattactttcaaaaaattatttttaataggatgattaaaccaatgagaagaaacacacataaatgatattttgcagtttatctgtattaagaaatgcttcttgccaatttctagttttagtttttggattgctacataagactttctttccatttactttatgtgtttttaaaagctgcaggtaatttttaaggtttgatggaattataatggaagccttgtataagttaaatgaaattggtaaaggagagcttactttgtctataatgcattcaggattaaaaattagatttcaaaatgaaatgtctgatttgtaaaatatttaatgttatatcagacttacataaaattttctgtgagaactcaaatgcatttgatttttaatgaatgttctgaatgaaatatgaatttttgtctttcagtctctgtagtttatctcaatatattaataaaaaggtctgttctcactgtaaaaaaaaaagttt

SEQ ID NO: 351488 - DNA, 4247 bp, Homo sapiens
  misc_feature (4214)..(4214): n is a, c, g, or t
ggaaacggaagaaggagcaagctatggaggggaacagggatgaggctgagaaatgtgtcgagatcgcccgggaggccctgaacgccggcaaccgcgagaaggcccagcgcttcctgcagaaggccgagaagctctacccactgccctcggcccgcgcactattggaaataattatgaaaaatggaagcacggctggaaatagccctcattgccgaaaaccatcaggtagtggcgatcaaagcaagcctaattgcacaaaggacagcacatctggtagtggtgaaggtggaaaaggctataccaaagaccaagtagatggagttctcagcataaacaaatgtaaaaattactatgaagtacttggagttacgaaagatgctggtgatgaagatttgaaaaaagcttatagaaagcttgctttgaagtttcatccagacaaaaaccatgcacctggagcaacagatgcttttaaaaagattggaaatgcttatgctgttttaagtaatccagaaaagcgaaaacagtatgacctcacgggcaatgaagaacaagcatgtaaccaccaaaacaatggcagatttaatttccattgaggttgtgaagctgatataactccagaagacttgtttaatatattttttgggggtggatttccttcaggtagtgtacattctttttcaaatggaagagctggttatagccaacaacatcagcatcgacatagtggacatgaaagagaagaggaaagaggagatggaggtttttctgtgtttatccagctgatgcccataattgtattgatcctcgtgtcattattaagccagttgatggtctctaatcctccttattccttatatcccagatctggaactgggcaaactattaaaatgcaaacagaaaacttgggtgttgtttattatgtcaacaaggacttcaaaaatgaatataaaggaatgttattacaaaaggtagaaaagagtgtggaggaagattatgtgactaatattcgaaataactgctggaaagaaagacaacaaaaaacagatatgcagtatgcagcaaaagtataccgtgatgatcgactccgaaggaaggcagatgccttgagcatggacaactgtaaagaattagagcggcttaccagtctttataaaggaggatgaactggaatttttatttataccttttagcgtactctttattttttctgtaagtaagtttggtttcatcatgagggatgaaggaaaagatttgatactgaaaactaaactgaatagttggttcctgaaatcttggactgtttatgacctactggctcctttaaatagtaactgaaaactaaaatggaatattttagttaacgcttctacaagtattttcattttaaaagcttacatgattcctaactaaagtgtcatgagaaaggattatcacacctgtagcaatttccagttttagtgattctccattttttcccttgtcatgtaaatatttatggaatgatcattttgtgtacatacaggttactgcttttttatttaaattcttttagtgtttagctccatgagacacttcagtttaaattgatggaataaatgttatatgacacatttacattttccttatcaaggtgtcaaatatgtggactttaaacaatgaaactttttcaaaaagaaaaaacaaaaactttaactttgtgtaaaatcttatagtattatcagcttagagggaattgatatttttaatattgccgttatattccaaaatatatattgagataaatgaactggtgtagaatatcagtttgctatttagttttatgaattactatacatatacatgcatagaaatgaaatgctatactgataaattttaaagaaaatatgaggaaatggctataaatattaaactaaaagggtcttcaacagtaaagtgcagttatgtcatttaaaattccaatactttaaaggccaccaaattttgatgtatatgtccttgaagggctgctaaaatttatgaagaggactcacattttcccccatagaaatttgcagtttcttggtgatcatttaagcaggatccaaagaagttcctttacaaataagtaataagaaaaatgagtactaaaatacagctttgtgccttttaaccctatgccaactcctaaacatataagtagattacagtatacttatctgatcagagcatgatctgtttggccacatgcaagtgtgagcagaaatagagcagcacgtagaatagtaacttaaagcaagtcatcctttaaaaattctgagctaaaatctatttaccattgagtaattgaattaatcccataggaataagctccttgtaagtaaatccatgatatgaattagaaaaaaaaaacagctggaaattgaagtttttgatgcctgtatactggatatgaaactatttgatttctagtcttctgtgtttagcagttgtaatattttaatgattttgcttcatactcggttaatggaacataaacatatctttgatacttctttgtgagtgagagaatgctagatagggtggctttgttctttgtttaagttttttttcctgaatgtagttaatttatggcatctgttgaataaaactgctaaaatgacctcttaaaaatgttctgttgtatccccttttccaggtgaatcaatagaaatgcctgattgaattagtaggttaaactaaacaacatactgtcataggaaaactggagagcttaaccaacttgctcttagaaatgttaccttaaaaaaaaaaaaaagcagtgcttaagagaaaatacaattttaattattttgttgagcctgcagagtagtaagtttttaaaaatataagttcatagcattttaattaactttgaaagttcatatgcatcagaaaatttatgaaaatttgaatgaaaaatttcatctatttatttttctaattttaatggcaaatttacactattatggctgataattctgtgaacttaccttcttgttgactgattctttttcccttaatcccagctttaaggagataggtgaagttattgtacaaagttaagtgataccataaagtatatattataaagtcatacatggcttttggacagtattatatttcagttgcagtgctgcattccattaaatttcataaaatgctagggaaaatgtgtttgataaaattttctgcagtgagaaatgacagactgagtgcctgacaatttaagccacatatgaagtatgcaagtaaagattcagtccttaatgtcatctatatcatggtataaaagctcaacaagtatcttataatttggagttaactttataaagtaagaagagtttggatatcttgataaaagattttcatgtttgctgctttttttataataaaaatcccaacattttgccatcttatgtttagctacatgaacttcgcaatttcatcggctcattctaatgaccacctaaaagtcctcaatctttgaatattgctttattagctcctctaactggtattctaacagtttagcagcacttatatttattaatgctttacatttttacccctttttgtgtaaacacaaatacacccatgcatatacacacaaacattattgtccttgtgagggtttgggggaaatgaaaaatagtacctttctcctcttcttttgattccttagttcccaaatagactggtgctagtcatttagtcatctgtaaatttcgaaatgtagtttgattaaatgtgaactgaattctcagcaatgaaaaatgtcaagttgaattcatctaataagtgaaaataatatattttgtaaacagattacatttgaacacctaaataagtatttgtttcataatcattacatgcttgtttatgatttacaaagatttggtagagaaaagtacagtccttaaggcatatatatgccaatgcattaaactactcagcttttgtgccagctcaggtgttcataggaacaggaatgtggaataccagctttttactttaattatacttttatgctgaatttttcttccagttaaacctttaattacactagtatgtaaagtagttactgagaaaaataagtttttgatttcccttctgttgatctgtaacatttttaaatgaagctatttaacacatgacatgctaatgttacttaatgggtctctgcattttaattttangaaacacaaacctgggtcacaaaacatcttcag

SEQ ID NO: 351489 - DNA, 4299 bp, Homo sapiens
ttacatatcgtcccatcatctctcaagttattcgcctttgggaaggaaaaagctccccatggcagtgagcctgtacactgccttaatcctgtctcccacagccatcaggaaatagtagtgagcagtattaatgccatataaaagaccagttaatataacatagtaccaaatccatttttaaccgagagggactttactgatgggagcaagaccttcgtcccatcagtatgaggaaatggctataaatattaaactaaaagggtcttcaacagtaaagtgcagttatgtcatttaaaattccaatactttaaaggccaccaaattttgatgtatatgtccttgaagggctgctaaaatttatgaagaggactcacattttcccccatagaaatttgcagtttcttggtgatcatttaagcaggatccaaagaagttcctttacaaataagtaataagaaaaatgagtactaaaatacagctttgtgccttttaaccctatgccaactcctaaacatataagtagattacagtatacttatctgatcagagcatgatctgtttggccacatgcaagtgtgagcagaaatagagcagcacgtagaatagtaacttaaagcaagtcatcctttaaaaattctgagctaaaatctatttaccattgagtaattgaattaatcccataggaataagctccttgtaagtaaatccatgatatgaattagaaaaaaaaaacagctggaaattgaagtttttgatgcctgtatactggatatgaaactatttgatttctagtcttctgtgtttagcagttgtaatattttaatgattttgcttcatactcggttaatggaacataaacatatctttgatacttctttgtgagtgagagaatgctagatagggtggctttgttctttgtttaagttttttttcctgaatgtagttaatttatggcatctgttgaataaaactgctaaaatgacctcttaaaaatgttctgttgtatccccttttccaggtgaatcaatagaaatgcctgattgaattagtaggttaaactaaacaacatactgtcataggaaaactggagagcttaaccaacttgctcttagaaatgttaccttaaaaaaaaaaaaaagcagtgcttaagagaaaatacaattttaattattttgttgagcctgcagagtagtaagtttttaaaaatataagttcatagcattttaattaactttgaaagttcatatgcatcagaaaatttatgaaaatttgaatgaaaaatttcatctatttatttttctaattttaatggcaaatttacactattatggctgataattctgtgaacttaccttcttgttgactgattctttttcccttaatcccagctttaaggagataggtgaagttattgtacaaagttaagtgataccataaagtatatattataaagtcatacatggcttttggacagtattatatttcagttgcagtgctgcattccattaaatttcataaaatgctagggaaaatgtgtttgataaaattttctgcagtgagaaatgacagactgagtgcctgacaatttaagccacatatgaagtatgcaagtaaagattcagtccttaatgtcatctatatcatggtataaaagctcaacaagtatcttataatttggagttaactttataaagtaagaagagtttggatatcttgataaaagattttcatgtttgctgctttttttataataaaaatcccaacattttgccatcttatgtttagctacatgaacttcgcaatttcatcggctcattctaatgaccacctaaaagtcctcaatctttgaatattgctttattagctcctctaactggtattctaacagtttagcagcacttatatttattaatgctttacatttttacccctttttgtgtaaacacaaatacacccatgcatatacacacaaacattattgtccttgtgagggtttgggggaaatgaaaaatagtacctttctcctcttcttttgattccttagttcccaaatagactggtgctagtcatttagtcatctgtaaatttcgaaatgtagtttgattaaatgtgaactgaattctcagcaatgaaaaatgtcaagttgaattcatctaataagtgaaaataatatattttgtaaacagattacatttgaacacctaaataagtatttgtttcataatcattacatgcttgtttatgatttacaaagatttggtagagaaaagtacagtccttaaggcatatatatgccaatgcattaaactactcagcttttgtgccagctcaggtgttcataggaacaggaatgtggaataccagctttttactttaattatacttttatgctgaatttttcttccagttaaacctttaattacactagtatgtaaagtagttactgagaaaaataagtttttgatttcccttctgttgatctgtaacatttttaaatgaagctatttaacacatgacatgctaatgttacttaatggattcctatgtatttcattaaaaaaaagtctcccacctgtgttaagacagctaaatatttcttgatgttggcttgaggaccaagtgagccatcttgccagttaagcaagttttatatcagaggaccaaatggttaagaagagaatttgtacatttcttgagcttccccatgtgaagcttgggttcagtactatcctattactatccatcttcataatgagtgaagcaaactgaaagggaattcataatcttttttcttatctgaacagaaaaactaatgaaaatcaacaataaatctttattttaattttcattcaacagctgaaaaaccatgtctgttgaccacattggaccattgcctagttaaaatccataaaattccctataaaccaatgaaaagaaacttgtctggcaataatttccaacattttaaattctaatttttagttacaaagaaaaaggatagaatgaggcttttcaaggaattcttgctcatcccttcaattatttggcaggtaaaacagtcctagaattcagcttcctttttggttttattactattaaatagatactttcatataaatggaaacacttttcctcaaaacattaattcaaaacatactccttatattaaggattatagcaccatattttttgtatattccctatgtgtaactttttcctgttggtatgtgatatttttcatttaatatgactatctgctggtgttggggccaatagatttgtgaatattctgtggatgtgtctatgtataggtgtatatatatatatatatattatttttgttttttttcccagctaattacctcaaatgtgtgattgtttaatatataccacactatgtttgcacagagcagggcttccattagcagtggatatttttatgtctgactttgaaaatcagtcaacacaatttcattggtgtgaattatttgttgctctttttcatattttaatggagagattcctattataaggcccatgcttcaaacataattatatctttctatatccagccatctggaaatacataggggtaagaagtatttcttgaaatgtccttgtttagtaagttagtaaaaactgggatgactagttgccaagatgtcttgtaactgcatagcagatgacacctggcatggcaagtctcattcacttcagcacaacactctgtacatttcagtctgatattctactttgccatttaaggacaccattaaaatcatagagattttcagtgacattggagtattgtaattattactttcaaaaaattatttttaataggatgattaaaccaatgagaagaaacacacataaatgatattttgcagtttatctgtattaagaaatgcttcttgccaatttctagttttagtttttggattgctacataagactttctttccatttactttatgtgtttttaaaagctgcaggtaatttttaaggtttgatggaattataatggaagccttgtataagttaaatgaaattggtaaaggagagcttactttgtctataatgcattcaggattaaaaattagatttcaaaatgaaatgtctgatttgtaaaatatttaatgttatatcagacttacataaaattttctgtgagaactcaaatgcatttgatttttaatgaatgttctgaatgaaatatgaatttttgtctttcagtctctgtagtttatctcaatatattaataaaaaggtctgttctcactgtaaaaaaaaaagttt

SEQ ID NO: 351490 - DNA, 2380 bp, Homo sapiens
ggaaacggaagaaggagcaagctatggaggggaacagggatgaggctgagaaatgtgtcgagatcgcccgggaggccctgaacgccggcaaccgcgagaaggcccagcgcttcctgcagaaggccgagaagctctacccactgccctcggcccgcgcactattggaaataattatgaaaaatggaagcacggctggaaatagccctcattgccgaaaaccatcaggtagtggcgatcaaagcaagcctaattgcacaaaggacagcacatctggtagtggtgaaggtggaaaaggctataccaaagaccaagtagatggagttctcagcataaacaaatgtaaaaattactatgaagtacttggagttacgaaagatgctggtgatgaagatttgaaaaaagcttatagaaagcttgctttgaagtttcatccagacaaaaaccatgcacctggagcaacagatgcttttaaaaagattggaaatgcttatgctgttttaagtaatccagaaaagcgaaaacagtatgacctcacgggcaatgaagaacaagcatgtaaccaccaaaacaatggcagatttaatttccattgaggttgtgaagctgatataactccagaagacttgtttaatatattttttgggggtggatttccttcaggtagtgtacattctttttcaaatggaagagctggttatagccaacaacatcagcatcgacatagtggacatgaaagagaagaggaaagaggagatggaggtttttctgtgtttatccagctgatgcccataattgtattgatcctcgtgtcattattaagccagttgatggtctctaatcctccttattccttatatcccagatctggaactgggcaaactattaaaatgcaaacagaaaacttgggtgttgtttattatgtcaacaaggacttcaaaaatgaatataaaggaatgttattacaaaaggtagaaaagagtgtggaggaagattatgtgactaatattcgaaataactgctggaaagaaagacaacaaaaaacagatatgcagtatgcagcaaaagtataccgtgatgatcgactccgaaggaaggcagatgccttgagcatggacaactgtaaagaattagagcggcttaccagtctttataaaggaggatgaactggaatttttatttataccttttagcgtactctttattttttctgtaagtaagtttggtttcatcatgagggatgaaggaaaagatttgatactgaaaactaaactgaatagttggttcctgaaatcttggactgtttatgacctactggctcctttaaatagtaactgaaaactaaaatggaatattttagttaacgcttctacaagtattttcattttaaaagcttacatgattcctaactaaagtgtcatgagaaaggattatcacacctgtagcaatttccagttttagtgattctccattttttcccttgtcatgtaaatatttatggaatgatcattttgtgtacatacaggttactgcttttttatttaaattcttttagtgtttagctccatgagacacttcagtttaaattgatggaataaatgttatatgacacatttacattttccttatcaaggtgtcaaatatgtggactttaaacaatgaaactttttcaaaaagaaaaaacaaaaactttaactttgtgtaaaatcttatagtattatcagcttagagggaattgatatttttaatattgccgttatattccaaaatatatattgagataaatgaactggtgtagaatatcagtttgctatttagttttatgaattactatacatatacatgcatagaaatgaaatgctatactgataaattttaaagaaaatatgaggaaatggctataaatattaaactaaaagggtcttcaacagtaaagtgcagttatgtcatttaaaattccaatactttaaaggccaccaaattttgatgtatatgtccttgaagggctgctaaaatttatgaagaggactcacattttcccccatagaaatttgcagtttcttggtgatcatttaagcaggatccaaagaagttcctttacaaataagtaataagaaaaatgagtactaaaatacagctttgtgccttttaaccctatgccaactcctaaacatataagtagattacagtatacttatctgatcagagcatgatgcgcgctcttctcccatcagcggattgcctaatcttcacaaggtgttcatttcctgtctcacccagctagccaccttctgcatttttattttgttgatctttactgcctgaatttccatggggattccttattgtaaacatgttctttgctcacacctctgtacataac

SEQ ID NO: 351491 - DNA, 985 bp, Homo sapiens
ggaaacggaagaaggagcaagctatggaggggaacagggatgaggctgagaaatgtgtcgagatcgcccgggaggccctgaacgccggcaaccgcgagaaggcccagcgcttcctgcagaaggccgagaagctctacccactgccctcggcccgcgcactattggaaataattatgaaaaatggaagcacggctggaaatagccctcattgccgaaaaccatcaggtagtggcgatcaaagcaagcctaattgcacaaaggacagcacatctggtagtggtgaaggtggaaaaggctataccaaagaccaagtagatggagttctcagagctttatggatattggaacattgatatgggatggtggacctgtacctaacacacaagagtgatacagataaattatctttggcataacggggatggccgggtgcagtggtttatgcctataatcccagcactttggaaggctgagatgggaggatcatttgaggcccgaatttcaagactagcctcagccccaaataacaagagccccatctatatcaaaaataaataaatattgacatttaaaccataaaaaaaaaaaaaaaaaatcgagttaaagagaagcggggggaacacgccatgtcaactccgttaataaacaacaaccccgggggtgcccacaatattttttggtcggcccaagagccaatgatgaataggacgttcggagtaaaaacacaaacacagaagacgagctccccacaacaacttaattattattcaaggtacacagaatctacgaaaaacaggccccaccacaagtggggagtgtcggtcctcacaaaaacattgtgtctcgggtccacgcaagagtaggcgcggaatacagctccgtaaaaccaccccgagtgcgcgcagggtccacgacctcgatcctgggcagcccactacctatcaatctctcatgtagcaatgtagcgactaatctgctccactgt

SEQ ID NO: 351492 - DNA, 5955 bp, Homo sapiens
ggaaacggaagaaggagcaagctatggaggggaacagggatgaggctgagaaatgtgtcgagatcgcccgggaggccctgaacgccggcaaccgcgagaaggcccagcgcttcctgcagaaggccgagaagctctacccactgccctcggcccgcgcactattggaaataattatgaaaaatggaagcacggctggaaatagccctcattgccgaaaaccatcaggtagtggcgatcaaagcaagcctaattgcacaaaggacagcacatctggtagtggtgaaggtggaaaaggctataccaaagaccaagtagatggagttctcagcataaacaaatgtaaaaattactatgaagtacttggagttacgaaagatgctggtgatgaagatttgaaaaaagcttatagaaagcttgctttgaagtttcatccagacaaaaaccatgcacctggagcaacagatgcttttaaaaagattggaaatgcttatgctgttttaagtaatccagaaaagcgaaaacagtatgacctcacgggcaatgaagaacaagcatgtaaccaccaaaacaatggcagatttaatttccattgaggttgtgaagctgatataactccagaagacttgtttaatatattttttgggggtggatttccttcaggtagtgtacattctttttcaaatggaagagctggttatagccaacaacatcagcatcgacatagtggacatgaaagagaagaggaaagaggagatggaggtttttctgtgtttatccagctgatgcccataattgtattgatcctcgtgtcattattaagccagttgatggtctctaatcctccttattccttatatcccagatctggaactgggcaaactattaaaatgcaaacagaaaacttgggtgttgtttattatgtcaacaaggacttcaaaaatgaatataaaggaatgttattacaaaaggtagaaaagagtgtggaggaagattatgtgactaatattcgaaataactgctggaaagaaagacaacaaaaaacagatatgcagtatgcagcaaaagtataccgtgatgatcgactccgaaggaaggcagatgccttgagcatggacaactgtaaagaattagagcggcttaccagtctttataaaggaggatgaactggaatttttatttataccttttagcgtactctttattttttctgtaagtaagtttggtttcatcatgagggatgaaggaaaagatttgatactgaaaactaaactgaatagttggttcctgaaatcttggactgtttatgacctactggctcctttaaatagtaactgaaaactaaaatggaatattttagttaacgcttctacaagtattttcattttaaaagcttacatgattcctaactaaagtgtcatgagaaaggattatcacacctgtagcaatttccagttttagtgattctccattttttcccttgtcatgtaaatatttatggaatgatcattttgtgtacatacaggttactgcttttttatttaaattcttttagtgtttagctccatgagacacttcagtttaaattgatggaataaatgttatatgacacatttacattttccttatcaaggtgtcaaatatgtggactttaaacaatgaaactttttcaaaaagaaaaaacaaaaactttaactttgtgtaaaatcttatagtattatcagcttagagggaattgatatttttaatattgccgttatattccaaaatatatattgagataaatgaactggtgtagaatatcagtttgctatttagttttatgaattactatacatatacatgcatagaaatgaaatgctatactgataaattttaaagaaaatatgaggaaatggctataaatattaaactaaaagggtcttcaacagtaaagtgcagttatgtcatttaaaattccaatactttaaaggccaccaaattttgatgtatatgtccttgaagggctgctaaaatttatgaagaggactcacattttcccccatagaaatttgcagtttcttggtgatcatttaagcaggatccaaagaagttcctttacaaataagtaataagaaaaatgagtactaaaatacagctttgtgccttttaaccctatgccaactcctaaacatataagtagattacagtatacttatctgatcagagcatgatctgtttggccacatgcaagtgtgagcagaaatagagcagcacgtagaatagtaacttaaagcaagtcatcctttaaaaattctgagctaaaatctatttaccattgagtaattgaattaatcccataggaataagctccttgtaagtaaatccatgatatgaattagaaaaaaaaaacagctggaaattgaagtttttgatgcctgtatactggatatgaaactatttgatttctagtcttctgtgtttagcagttgtaatattttaatgattttgcttcatactcggttaatggaacataaacatatctttgatacttctttgtgagtgagagaatgctagatagggtggctttgttctttgtttaagttttttttcctgaatgtagttaatttatggcatctgttgaataaaactgctaaaatgacctcttaaaaatgttctgttgtatccccttttccaggtgaatcaatagaaatgcctgattgaattagtaggttaaactaaacaacatactgtcataggaaaactggagagcttaaccaacttgctcttagaaatgttaccttaaaaaaaaaaaaaagcagtgcttaagagaaaatacaattttaattattttgttgagcctgcagagtagtaagtttttaaaaatataagttcatagcattttaattaactttgaaagttcatatgcatcagaaaatttatgaaaatttgaatgaaaaatttcatctatttatttttctaattttaatggcaaatttacactattatggctgataattctgtgaacttaccttcttgttgactgattctttttcccttaatcccagctttaaggagataggtgaagttattgtacaaagttaagtgataccataaagtatatattataaagtcatacatggcttttggacagtattatatttcagttgcagtgctgcattccattaaatttcataaaatgctagggaaaatgtgtttgataaaattttctgcagtgagaaatgacagactgagtgcctgacaatttaagccacatatgaagtatgcaagtaaagattcagtccttaatgtcatctatatcatggtataaaagctcaacaagtatcttataatttggagttaactttataaagtaagaagagtttggatatcttgataaaagattttcatgtttgctgctttttttataataaaaatcccaacattttgccatcttatgtttagctacatgaacttcgcaatttcatcggctcattctaatgaccacctaaaagtcctcaatctttgaatattgctttattagctcctctaactggtattctaacagtttagcagcacttatatttattaatgctttacatttttacccctttttgtgtaaacacaaatacacccatgcatatacacacaaacattattgtccttgtgagggtttgggggaaatgaaaaatagtacctttctcctcttcttttgattccttagttcccaaatagactggtgctagtcatttagtcatctgtaaatttcgaaatgtagtttgattaaatgtgaactgaattctcagcaatgaaaaatgtcaagttgaattcatctaataagtgaaaataatatattttgtaaacagattacatttgaacacctaaataagtatttgtttcataatcattacatgcttgtttatgatttacaaagatttggtagagaaaagtacagtccttaaggcatatatatgccaatgcattaaactactcagcttttgtgccagctcaggtgttcataggaacaggaatgtggaataccagctttttactttaattatacttttatgctgaatttttcttccagttaaacctttaattacactagtatgtaaagtagttactgagaaaaataagtttttgatttcccttctgttgatctgtaacatttttaaatgaagctatttaacacatgacatgctaatgttacttaatggattcctatgtatttcattaaaaaaaagtctcccacctgtgttaagacagctaaatatttcttgatgttggcttgaggaccaagtgagccatcttgccagttaagcaagttttatatcagaggaccaaatggttaagaagagaatttgtacatttcttgagcttccccatgtgaagcttgggttcagtactatcctattactatccatcttcataatgagtgaagcaaactgaaagggaattcataatcttttttcttatctgaacagaaaaactaatgaaaatcaacaataaatctttattttaattttcattcaacagctgaaaaaccatgtctgttgaccacattggaccattgcctagttaaaatccataaaattccctataaaccaatgaaaagaaacttgtctggcaataatttccaacattttaaattctaatttttagttacaaagaaaaaggatagaatgaggcttttcaaggaattcttgctcatcccttcaattatttggcaggtaaaacagtcctagaattcagcttcctttttggttttattactattaaatagatactttcatataaatggaaacacttttcctcaaaacattaattcaaaacatactccttatattaaggattatagcaccatattttttgtatattccctatgtgtaactttttcctgttggtatgtgatatttttcatttaatatgactatctgctggtgttggggccaatagatttgtgaatattctgtggatgtgtctatgtataggtgtatatatatatatatatattatttttgttttttttcccagctaattacctcaaatgtgtgattgtttaatatataccacactatgtttgcacagagcagggcttccattagcagtggatatttttatgtctgactttgaaaatcagtcaacacaatttcattggtgtgaattatttgttgctctttttcatattttaatggagagattcctattataaggcccatgcttcaaacataattatatctttctatatccagccatctggaaatacataggggtaagaagtatttcttgaaatgtccttgtttagtaagttagtaaaaactgggatgactagttgccaagatgtcttgtaactgcatagcagatgacacctggcatggcaagtctcattcacttcagcacaacactctgtacatttcagtctgatattctactttgccatttaaggacaccattaaaatcatagagattttcagtgacattggagtattgtaattattactttcaaaaaattatttttaataggatgattaaaccaatgagaagaaacacacataaatgatattttgcagtttatctgtattaagaaatgcttcttgccaatttctagttttagtttttggattgctacataagactttctttccatttactttatgtgtttttaaaagctgcaggtaatttttaaggtttgatggaattataatggaagccttgtataagttaaatgaaattggtaaaggagagcttactttgtctataatgcattcaggattaaaaattagatttcaaaatgaaatgtctgatttgtaaaatatttaatgttatatcagacttacataaaattttctgtgagaactcaaatgcatttgatttttaatgaatgttctgaatgaaatatgaatttttgtctttcagtctctgtagtttatctcaatatattaataaaaaggtctgttctcactgtaaaaaaaaaagttt

SEQ ID NO: 351493 - DNA, 5901 bp, Homo sapiens
ggaaacggaagaaggagcaagctatggaggggaacagggatgaggctgagaaatgtgtcgagatcgcccgggaggccctgaacgccggcaaccgcgagaaggcccagcgcttcctgcagaaggccgagaagctctacccactgccctcggcccgcgcactattggaaataattatgaaaaatggaagcacggctggaaatagccctcattgccgaaaaccatcaggtagtggcgatcaaagcaagcctaattgcacaaaggacagcacatctggtagtggtgaaggtggaaaaggctataccaaagaccaagtagatggagttctcagcataaacaaatgtaaaaattactatgaagtacttggagttacgaaagatgctggtgatgaagatttgaaaaaagcttatagaaagcttgctttgaagtttcatccagacaaaaaccatgcacctggagcaacagatgcttttaaaaagattggaaatgcttatgctgttttaagtaatccagaaaagcgaaaacagtatgacctcacgggcaatgaagaacaagcatgtaaccaccaaaacaatggcagatttaatttccattgaggttgtgaagctgatataactccagaagacttgtttaatatattttttgggggtggatttccttcaggtagtgtacattctttttcaaatggaagagctggttatagccaacaacatcagcatcgacatagtggacatgaaagagaagaggaaagaggagatggaggtttttctgtgtttatccagctgatgcccataattgtattgatcctcgtgtcattattaagccagttgatggtctctaatcctccttattccttatatcccagatctggaactgggcaaactattaaaatgcaaacagaaaacttgggtgttgtttattatgtcaacaaggacttcaaaaatgaatataaaggaatgttattacaaaaggtagaaaagagtgtggaggaagattatgtgactaatattcgaaataactgctggaaagaaagacaacaaaaaacagatatgcagtatgcagcaaaagtataccgtgatgatcgactccgaaggaaggcagatgccttgagcatggacaactgtaaagaattagagcggcttaccagtctttataaaggaggatgaactggaatttttatttataccttttagcgtactctttattttttctgtaagtaagtttggtttcatcatgagggatgaaggaaaagatttgatactgaaaactaaactgaatagttggttcctgaaatcttggactgtttatgacctactggctcctttaaatagtaactgaaaactaaaatggaatattttagttaacgcttctacaagtattttcattttaaaagcttacatgattcctaactaaagtgtcatgagaaaggattatcacacctgtagcaatttccagttttagtgattctccattttttcccttgtcatgtaaatatttatggaatgatcattttgtgtacatacaggttactgcttttttatttaaattcttttagtgtttagctccatgagacacttcagtttaaattgatggaataaatgttatatgacacatttacattttccttatcaaggtgtcaaatatgtggactttaaacaatgaaactttttcaaaaagaaaaaacaaaaactttaactttgtgtaaaatcttatagtattatcagcttagagggaattgatatttttaatattgccgttatattccaaaatatatattgagataaatgaactggtgtagaatatcagtttgctatttagttttatgaattactatacatatacatgcatagaaatgaaatgctatactgataaattttaaagaaaatatgaggaaatggctataaatattaaactaaaagggtcttcaacagtaaagtgcagttatgtcatttaaaattccaatactttaaaggccaccaaattttgatgtatatgtccttgaagggctgctaaaatttatgaagaggactcacattttcccccatagaaatttgcagtttcttggtgatcatttaagcaggatccaaagaagttcctttacaaataagtaataagaaaaatgagtactaaaatacagctttgtgccttttaaccctatgccaactcctaaacatataagtagattacagtatacttatctgatcagagcatgatctgtttggccacatgcaagtgtgagcagaaatagagcagcacgtagaatagtaacttaaagcaagtcatcctttaaaaattctgagctaaaatctatttaccattgagtaattgaattaatcccataggaataagctccttgtaagtaaatccatgatatgaattagaaaaaaaaaacagctggaaattgaagtttttgatgcctgtatactggatatgaaactatttgatttctagtcttctgtgtttagcagttgtaatattttaatgattttgcttcatactcggttaatggaacataaacatatctttgatacttctttgtgagtgagagaatgctagatagggtggctttgttctttgtttaagttttttttcctgaatgtagttaatttatggcatctgttgaataaaactgctaaaatgacctcttaaaaatgttctgttgtatccccttttccaggtgaatcaatagaaatgcctgattgaattagtaggttaaactaaacaacatactgtcataggaaaactggagagcttaaccaacttgctcttagaaatgttaccttaaaaaaaaaaaaaagcagtgcttaagagaaaatacaattttaattattttgttgagcctgcagagtagtaagtttttaaaaatataagttcatagcattttaattaactttgaaagttcatatgcatcagaaaatttatgaaaatttgaatgaaaaatttcatctatttatttttctaattttaatggcaaatttacactattatggctgataattctgtgaacttaccttcttgttgactgattctttttcccttaatcccagctttaaggagataggtgaagttattgtacaaagttaagtgataccataaagtatatattataaagtcatacatggcttttggacagtattatatttcagttgcagtgctgcattccattaaatttcataaaatgctagggaaaatgtgtttgataaaattttctgcagtgagaaatgacagactgagtgcctgacaatttaagccacatatgaagtatgcaagtaaagattcagtccttaatgtcatctatatcatggtataaaagctcaacaagtatcttataatttggagttaactttataaagtaagaagagtttggatatcttgataaaagattttcatgtttgctgctttttttataataaaaatcccaacattttgccatcttatgtttagctacatgaacttcgcaatttcatcggctcattctaatgaccacctaaaagtcctcaatctttgaatattgctttattagctcctctaactggtattctaacagtttagcagcacttatatttattaatgctttacatttttacccctttttgtgtaaacacaaatacacccatgcatatacacacaaacattattgtccttgtgagggtttgggggaaatgaaaaatagtacctttctcctcttcttttgattccttagttcccaaatagactggtgctagtcatttagtcatctgtaaatttcgaaatgtagtttgattaaatgtgaactgaattctcagcaatgaaaaatgtcaagttgaattcatctaataagtgaaaataatatattttgtaaacagattacatttgaacacctaaataagtatttgtttcataatcattacatgcttgtttatgatttacaaagatttggtagagaaaagtacagtccttaaggcatatatatgccaatgcattaaactactcagcttttgtgccagctcaggtgttcataggaacaggaatgtggaataccagctttttactttaattatacttttatgctgaatttttcttccagttaaacctttaattacactagtatgtaaagtagttactgagaaaaataagtttttgatttcccttctgttgatctgtaacatttttaaatgaagctatttaacacatgacatgctaatgttacttaatggattcctatgtatttcattaaaaaaaagtctcccacctgtgttaagacagctaaatatttcttgatgttggcttgaggaccaagtgagccatcttgccagttaagcaagttttatatcagaggaccaaatggttaagaagagaatttgtacatttcttgagcttccccatgtgaagcttgggttcagtactatcctattactatccatcttcataatgagtgaagcaaactgaaagggaattcataatcttttttcttatctgaacagaaaaactaatgaaaatcaacaataaatctttattttaattttcattcaacagctgaaaaaccatgtctgttgaccacattggaccattgcctagttaaaatccataaaattccctataaaccaatgaaaagaaacttgtctggcaataatttccaacattttaaattctaatttttagttacaaagaaaaaggatagaatgaggcttttcaaggaattcttgctcatcccttcaattatttggcaggtaaaacagtcctagaattcagcttcctttttggttttattactattaaatagatactttcatataaatggaaacacttttcctcaaaacattaattcaaaacatactccttatattaaggattatagcaccatattttttgtatattccctatgtgtaactttttcctgttggtatgtgatatttttcatttaatatgactatctgctggtgttggggccaatagatttgtgaatattctgtggatgtgtctatgtataggtgtatatatatatatatatattatttttgttttttttcccagctaattacctcaaatgtgtgattgtttaatatataccacactatgtttgcacagagcagggcttccattagcagtggatatttttatgtctgactttgaaaatcagtcaacacaatttcattggtgtgaattatttgttgctctttttcatattttaatggagagattcctattataaggcccatgcttcaaacataattatatctttctatatccagccatctggaaatacataggggtaagaagtatttcttgaaatgtccttgtttagtaagttagtaaaaactgggatgactagttgccaagatgtcttgtaactgcatagcagatgacacctggcatggcaagtctcattcacttcagcacaacactctgtacatttcagtctgatattctactttgccatttaaggacaccattaaaatcatagagattttcagtgacattggagtattgtaattattactttcaatattttgcagtttatctgtattaagaaatgcttcttgccaatttctagttttagtttttggattgctacataagactttctttccatttactttatgtgtttttaaaagctgcaggtaatttttaaggtttgatggaattataatggaagccttgtataagttaaatgaaattggtaaaggagagcttactttgtctataatgcattcaggattaaaaattagatttcaaaatgaaatgtctgatttgtaaaatatttaatgttatatcagacttacataaaattttctgtgagaactcaaatgcatttgatttttaatgaatgttctgaatgaaatatgaatttttgtctttcagtctctgtagtttatctcaatatattaataaaaaggtctgttctcactgtaaaaaaaaaagttt

SEQ ID NO: 351494 - DNA, 5971 bp, Homo sapiens
ggaaacggaagaaggagcaagctatggaggggaacagggatgaggctgagaaatgtgtcgagatcgcccgggaggccctgaacgccggcaaccgcgagaaggcccagcgcttcctgcagaaggccgagaagctctacccactgccctcggcccgcgcactattggaaataattatgaaaaatggaagcacggctggaaatagccctcattgccgaaaaccatcaggtagtggcgatcaaagcaagcctaattgcacaaaggacagcacatctggtagtggtgaaggtggaaaaggctataccaaagaccaagtagatggagttctcagcataaacaaatgtaaaaattactatgaagtacttggagttacgaaagatgctggtgatgaagatttgaaaaaagcttatagaaagcttgctttgaagtttcatccagacaaaaaccatgcacctggagcaacagatgcttttaaaaagattggaaatgcttatgctgttttaagtaatccagaaaagcgaaaacagtatgacctcacgggcaatgaagaacaagcatgtaaccaccaaaacaatggcagatttaatttccattgaggttgtgaagctgatataactccagaagacttgtttaatatattttttgggggtggatttccttcaggtagtgtacattctttttcaaatggaagagctggttatagccaacaacatcagcatcgacatagtggacatgaaagagaagaggaaagaggagatggaggtttttctgtgtttatccagctgatgcccataattgtattgatcctcgtgtcattattaagccagttgatggtctctaatcctccttattccttatatcccagatctggaactgggcaaactattaaaatgcaaacagaaaacttgggtgttgtttattatgtcaacaaggacttcaaaaatgaatataaaggaatgttattacaaaaggtagaaaagagtgtggaggaagattatgtgactaatattcgaaataactgctggaaagaaagacaacaaaaaacagatatgcagtatgcagcaaaagtataccgtgatgatcgactccgaaggaaggcagatgccttgagcatggacaactgtaaagaattagagcggcttaccagtctttataaaggaggatgaactggaatttttatttataccttttagcgtactctttattttttctgtaagtaagtttggtttcatcatgagggatgaaggaaaagatttgatactgaaaactaaactgaatagttggttcctgaaatcttggactgtttatgacctactggctcctttaaatagtaactgaaaactaaaatggaatattttagttaacgcttctacaagtattttcattttaaaagcttacatgattcctaactaaagtgtcatgagaaaggattatcacacctgtagcaatttccagttttagtgattctccattttttcccttgtcatgtaaatatttatggaatgatcattttgtgtacatacaggttactgcttttttatttaaattcttttagtgtttagctccatgagacacttcagtttaaattgatggaataaatgttatatgacacatttacattttccttatcaaggtgtcaaatatgtggactttaaacaatgaaactttttcaaaaagaaaaaacaaaaactttaactttgtgtaaaatcttatagtattatcagcttagagggaattgatatttttaatattgccgttatattccaaaatatatattgagataaatgaactggtgtagaatatcagtttgctatttagttttatgaattactatacatatacatgcatagaaatgaaatgctatactgataaattttaaagaaaatatgaggaaatggctataaatattaaactaaaagggtcttcaacagtaaagtgcagttatgtcatttaaaattccaatactttaaaggccaccaaattttgatgtatatgtccttgaagggctgctaaaatttatgaagaggactcacattttcccccatagaaatttgcagtttcttggtgatcatttaagcaggatccaaagaagttcctttacaaataagtaataagaaaaatgagtactaaaatacagctttgtgccttttaaccctatgccaactcctaaacatataagtagattacagtatacttatctgatcagagcatgatctgtttggccacatgcaagtgtgagcagaaatagagcagcacgtagaatagtaacttaaagcaagtcatcctttaaaaattctgagctaaaatctatttaccattgagtaattgaattaatcccataggaataagctccttgtaagtaaatccatgatatgaattagaaaaaaaaaacagctggaaattgaagtttttgatgcctgtatactggatatgaaactatttgatttctagtcttctgtgtttagcagttgtaatattttaatgattttgcttcatactcggttaatggaacataaacatatctttgatacttctttgtgagtgagagaatgctagatagggtggctttgttctttgtttaagttttttttcctgaatgtagttaatttatggcatctgttgaataaaactgctaaaatgacctcttaaaaatgttctgttgtatccccttttccaggtgaatcaatagaaatgcctgattgaattagtaggttaaactaaacaacatactgtcataggaaaactggagagcttaaccaacttgctcttagaaatgttaccttaaaaaaaaaaaaaagcagtgcttaagagaaaatacaattttaattattttgttgagcctgcagagtagtaagtttttaaaaatataagttcatagcattttaattaactttgaaagttcatatgcatcagaaaatttatgaaaatttgaatgaaaaatttcatctatttatttttctaattttaatggcaaatttacactattatggctgataattctgtgaacttaccttcttgttgactgattctttttcccttaatcccagctttaaggagataggtgaagttattgtacaaagttaagtgataccataaagtatatattataaagtcatacatggcttttggacagtattatatttcagttgcagtgctgcattccattaaatttcataaaatgctagggaaaatgtgtttgataaaattttctgcagtgagaaatgacagactgagtgcctgacaatttaagccacatatgaagtatgcaagtaaagattcagtccttaatgtcatctatatcatggtataaaagctcaacaagtatcttataatttggagttaactttataaagtaagaagagtttggatatcttgataaaagattttcatgtttgctgctttttttataataaaaatcccaacattttgccatcttatgtttagctacatgaacttcgcaatttcatcggctcattctaatgaccacctaaaagtcctcaatctttgaatattgctttattagctcctctaactggtattctaacagtttagcagcacttatatttattaatgctttacatttttacccctttttgtgtaaacacaaatacacccatgcatatacacacaaacattattgtccttgtgagggtttgggggaaatgaaaaatagtacctttctcctcttcttttgattccttagttcccaaatagactggtgctagtcatttagtcatctgtaaatttcgaaatgtagtttgattaaatgtgaactgaattctcagcaatgaaaaatgtcaagttgaattcatctaataagtgaaaataatatattttgtaaacagattacatttgaacacctaaataagtatttgtttcataatcattacatgcttgtttatgatttacaaagatttggtagagaaaagtacagtccttaaggcatatatatgccaatgcattaaactactcagcttttgtgccagctcaggtgttcataggaacaggaatgtggaataccagctttttactttaattatacttttatgctgaatttttcttccagttaaacctttaattacactagtatgtaaagtagttactgagaaaaataagtttttgatttcccttctgttgatctgtaacatttttaaatgaagctatttaacacatgacatgctaatgttacttaatggattcctatgtatttcattaaaaaaaagtctcccacctgtgttaagacagctaaatatttcttgatgttggcttgaggaccaagtgagccatcttgccagttaagcaagttttatatcagaggaccaaatggttaagaagagaatttgtacatttcttgagcttccccatgtgaagcttgggttcagtactatcctattactatccatcttcataatgagtgaagcaaactgaaagggaattcataatcttttttcttatctgaacagaaaaactaatgaaaatcaacaataaatctttattttaattttcattcaacagctgaaaaaccatgtctgttgaccacattggaccattgcctagttaaaatccataaaattccctataaaccaatgaaaagaaacttgtctggcaataatttccaacattttaaattctaatttttagttacaaagaaaaaggatagaatgaggcttttcaaggaattcttgctcatcccttcaattatttggcaggtaaaacagtcctagaattcagcttcctttttggttttattactattaaatagatactttcatataaatggaaacacttttcctcaaaacattaattcaaaacatactccttatattaaggattatagcaccatattttttgtatattccctatgtgtaactttttcctgttggtatgtgatatttttcatttaatatgactatctgctggtgttggggccaatagatttgtgaatattctgtggatgtgtctatgtataggtgtatatatatatatatatattatttttgttttttttcccagctaattacctcaaatgtgtgattgtttaatatataccacactatgtttgcacagagcagggcttccattagcagtggatatttttatgtctgactttgaaaatcagtcaacacaatttcattggtgtgaattatttgttgctctttttcatattttaatggagagattcctattataaggcccatgcttcaaacataattatatctttctatatccagccatctggaaatacataggggtaagaagtatttcttgaaatgtccttgtttagtaagttagtaaaaactgggatgactagttgccaagatgtcttgtaactgcatagcagatgacacctggcatggcaagtctcattcacttcagcacaacactctgtacatttcagtctgatattctactttgccatttaaggacaccattaaaatcatagagattttcagtgacattggagtattgtaattattactttcaaaaaattatttttaataggatgattaaaccaatgagaagaaacacacataaatgatattttgcagtttatctgtattaagaaatgcttcttgccaatttctagttttagtttttggattgctacataagactttctttccatttactttatgtgtttttaaaagctgcaggtaatttttaaggtttgatggaattataatggaagccttgtataagttaaatgaaattggtaaaggagagcttactttgtctataatgcattcaggattaaaaattagatttcaaaatgaaatgtctgatttgtaaaatatttaatgttatatcagacttacataaaattttctgtgagaactcaaatgcatttgatttttaatgaatgttctgaatgaaatatgaatttttgtctttcagtctctccacctcctcctcctcctcttggatctagttgaaggtccccggttgagtcatgaagcgagactggggcggccgc

SEQ ID NO: 351495 - DNA, 1303 bp, Homo sapiens
  misc_feature (4)..(4): n is a, c, g, or t
  misc_feature (1278)..(1278): n is a, c, g, or t
  misc_feature (1300)..(1300): n is a, c, g, or t
ggcngaggggctcactctgcaaccaaggcacgtgcattccggtcatcccacgcggggagcgcgcgcaaggcccgcccagcccccacatgccagccccaccctccagtcggtccggacgccgacgcctttttgaccctcgctgtgcccggccctcctcatctggcctgcccagggcttggtgctggcggggtccagctgctccaatccctcctcctctgctctgccctgccctgccctggcctgccccggcgccctccctcagcccgggtatcaggcgagaggcggagctggcccggcgcgccccgcccccgctgtagaaagggccgggcgagtgttactcgcgggtcatcccggcctgggccttttatctcggtgctgccgggggaggcgggaggaggagacaccaggggtggccctgagcgccggcgacacctttcctggactataaattgagcacctgggatgggtagggggccaacgcagtcaccgccgtccgcagtcacagtccagccactgaccgcagcagcgcccttgcgtagcagccgcttgcagcgagaacactgaattgccaacgagcaggagagtctcaaggcgcaagaggaggccagggctcgacccacagagcaccctcagccatcgcgagtttccgggcgccaaagccaggagaagccgcccatcccgcagggccggtctgccagcgagacgagagttggcgagggcggaggagtgccgggaatcccgccacaccggctatagccaggcccccagcgcgggccttggagagcgcgtgaaggcgggcatccccttgacccggccgaccatccccgtgcccctgcgtccctgcgctccaacgtccgcgcggccaccatgatgcaaatctgcgacacctacaaccagaagcactcgctctttaacgccatgaatcgcttcattggcgccgtgaacaacatggaccagacggtgatggtgcccagcttgctgcgcgacgtgcccctggctgaccccgggttagacaacgatgttggcgtggaggtaggcggcagtggcggctgcctggaggagcgcacgcccccagtccccgactcgggaagcgccaatggcagctttttcgcgccctctcgggacatgtacagccactacgtgcttctcaagtccatccgcaacgacatcgagtggggggtcctgcaccagccgcctccaccggctgggagcgaggagggcagtgctgaatcaaggcatctgtgactggcattgaggtgcgcgcgcaaaaactgacanagtcatcactggcgctgaatgnttc

SEQ ID NO: 351496 - DNA, 655 bp, Homo sapiens
gagctctggccggcggaccttttccttctggagtttccccggcgggtgtgagttgttgcggggtctgggggagctgggaggcccggtttgggaagttttgcaggcaggtgcatgagccatctttctctgaaagtgtttaagaaatgttcaagaacagcggccagagtcaagaaactgggggatgaagggttatctcgagactagacggaaggaaacgtatcaggggaggggtggaggccagaaggaaggagttaggtaggggccctctcccaagctggcgtttttgctgggtggaatccttttgctagatcccttggatttccgttttccgtgtgttatcacactgttggaactgggaagaagagaaaaagaggcaagattttggcatttagtaagttaagtctgaataccgagttttcatccgggtgcatacgtacttaaaataccaaatgggtccaggaagggggacaaagtacgctttaatttatgagaagatcagctactagaaactgtatatctgtttttctcgagttttcttcttgcagtgctctttcaatctcattggacatattttatattattttcctgcttaagcactgggggttgggtggaaggatctgtggctcatcataggcaatttccacacttttaaggt

SEQ ID NO: 351497 - DNA, 2721 bp, Homo sapiens
  misc_feature (4)..(4): n is a, c, g, or t
ggcngaggggctcactctgcaaccaaggcacgtgcattccggtcatcccacgcggggagcgcgcgcaaggcccgcccagcccccacatgccagccccaccctccagtcggtccggacgccgacgcctttttgaccctcgctgtgcccggccctcctcatctggcctgcccagggcttggtgctggcggggtccagctgctccaatccctcctcctctgctctgccctgccctgccctggcctgccccggcgccctccctcagcccgggtatcaggcgagaggcggagctggcccggcgcgccccgcccccgctgtagaaagggccgggcgagtgttactcgcgggtcatcccggcctgggccttttatctcggtgctgccgggggaggcgggaggaggagacaccaggggtggccctgagcgccggcgacacctttcctggactataaattgagcacctgggatgggtagggggccaacgcagtcaccgccgtccgcagtcacagtccagccactgaccgcagcagcgcccttgcgtagcagccgcttgcagcgagaacactgaattgccaacgagcaggagagtctcaaggcgcaagaggaggtgggtgcccacgccccatcgctgccccggccagcttggttgcttgagctcaggcttttcggagggagaagttgtggtggtggggggacacccttctccccgcggccgtaggtgggcgaggaggtgggactgcccagccgcggggagccacccaggcgccgtcccggacgaggctgtagccagagaagggggtgcgcgcgggcaagggcgccaggccccctagcagggtgaataatctaatctgttctttcgtctccgtgtatcaaacaggccagggctcgacccacagagcaccctcagccatcgcgagtttccgggcgccaaagccaggagaagccgcccatcccgcagggccggtctgccagcgagacgagagttggcgagggcggaggagtgccgggaatcccgccacaccggctatagccaggcccccagcgcgggccttggagagcgcgtgaaggcgggcatccccttgacccggccgaccatccccgtgcccctgcgtccctgcgctccaacgtccgcgcggccaccatgatgcaaatctgcgacacctacaaccagaagcactcgctctttaacgccatgaatcgcttcattggcgccgtgaacaacatggaccagacggtgatggtgcccagcttgctgcgcgacgtgcccctggctgaccccgggttagacaacgatgttggcgtggaggtaggcggcagtggcggctgcctggaggagcgcacgcccccagtccccgactcgggaagcgccaatggcagctttttcgcgccctctcgggacatgtacagccactacgtgcttctcaagtccatccgcaacgacatcgagtggggggtcctgcaccagccgcctccaccggctgggagcgaggagggcagtgcctggaagtccaaggacatcctggtggacctgggccacttggagggtgcggacgccggcgaagaagacctggaacagcagttccactaccacctgcgcgggctgcacactgtgctctcgaaactcacgcgcaaagccaacatcctcactaacagatacaagcaggagatcggcttcggcaattggggccactgaggcgtggcgcccgtggctgcccagcaccttcttcgacccatctcaccctctctcattcctcaaagcttttttttttttttcctggctggggggcgggaagggcagactgcaaactggggggctgcgtacgtgcaggaggcgcggtggggctgcgtggaggagggggccacgtgtgagagagaagaaaatggtggccggagatgggagggcccaaggaacctcctgggagggggcctgcattctatgttggtgggaatgggactgggctgacgccctgcattcagcctgtgcctttcctggggtttcttttctgttcttttcggaggagagggcccgagaaggggccataccagggcgcggcgctgggttgccacacttgggaaagcagcccggagctgggtgctggggaaggcggggcgcgtagcctcccgccgccctgcggttgggccggtggaggcccaggcgttgctaggattgcatcagttttcctgtttgcactatttctttttgtaacattggccctgtgtgaagtatttcgaatctcctccttgctctgaaacttcagcgattccattgtgataagcgcacaaacagcactgtctgtcggtaatcggtactactttattaatgattttctgttacactgtatagtagtcctatggcacccccaccccatccctttcgtgccactcccgtccccacccccaccccagtgtgtataagctggcatttcgccagcttgtacgtagcttgccactcagtgaaaataataacattattatgagaaagtggacttaaccgaaatggaaccaactgacattctatcgtgttgtacatagaatgatgaagggttccactgttgttgtatgtcttaaatttatttaaaactttttttaatccagatgtagactatattctaaaaaataaaaaagcaaatgtgtcaactaaattggacaagcgtctggtcctcattaatctgccaatgaatggtttcgtcattaaataaaaatcaatttaattgatttactagca

SEQ ID NO: 351498 - DNA, 2258 bp, Homo sapiens
  misc_feature (4)..(4): n is a, c, g, or t
ggcngaggggctcactctgcaaccaaggcacgtgcattccggtcatcccacgcggggagcgcgcgcaaggcccgcccagcccccacatgccagccccaccctccagtcggtccggacgccgacgcctttttgaccctcgctgtgcccggccctcctcatctggcctgcccagggcttggtgctggcggggtccagctgctccaatccctcctcctctgctctgccctgccctgccctggcctgccccggcgccctccctcagcccgggtatcaggcgagaggcggagctggcccggcgcgccccgcccccgctgtagaaagggccgggcgagtgttactcgcgggtcatcccggcctgggccttttatctcggtgctgccgggggaggcgggaggaggagacaccaggggtggccctgagcgccggcgacacctttcctggactataaattgagcacctgggatgggtagggggccaacgcagtcaccgccgtccgcagtcacagtccagccactgaccgcagcagcgcccttgcgtagcagccgcttgcagcgagaacactgaattgccaacgagcaggagagtctcaaggcgcaagaggaggccagggctcgacccacagagcaccctcagccatcgcgagtttccgggcgccaaagccaggagaagccgcccatcccgcagggccggtctgccagcgagacgagagttggcgagggcggaggagtgccgggaatcccgccacaccggctatagccaggcccccagcgcgggccttggagagcgcgtgaaggcgggcatccccttgacccggccgaccatccccgtgcccctgcgtccctgcgctccaacgtccgcgcggccaccatgatgcaaatctgcgacacctacaaccagaagcactcgctctttaacgccatgaatcgcttcattggcgccgtgaacaacatggaccagacggtgatggtgcccagcttgctgcgcgacgtgcccctggctgaccccgggttagacaacgatgttggcgtggaggtaggcggcagtggcggctgcctggaggagcgcacgcccccagtccccgactcgggaagcgccaatggcagctttttcgcgccctctcgggacatgtacagccactacgtgcttctcaagtccatccgcaacgacatcgagtggggggtcctgcaccagccgcctccaccggctgggagcgaggagggcagtgcctggaagtccaaggacatcctggtggacctgggccacttggagggtgcggacgccggcgaagaagacctggaacagcagttccactaccacctgcgcgggctgcacactgtgctctcgaaactcacgcgcaaagccaacatcctcactaacagatacaagcaggagatcggcttcggcaattggggccactgaggcgtggcgcccgtggctgcccagcaccttcttcgacccatctcaccctctctcattcctcaaagcttttttttttttttcctggctggggggcgggaagggcagactgcaaactggggggctgcgtacgtgcaggaggcgcggtggggctgcgtggaggagggggccacgtgtgagagagaagaaaatggtggccggagatgggagggcccaaggaacctcctgggagggggcctgcattctatgttggtgggaatgggactgggctgacgccctgcattcagcctgtgcctttcctggggtttcttttctgttcttttcggaggagagggcccgagaaggggccataccagggcgcggcgctgggttgccacacttgggaaagcagcccggagctgggtgctggggaaggcggggcgcgtagcctcccgccgccctgcggttgggccggtggaggcccaggcgttgctaggattgcatcagttttcctgtttgcactatttctttttgtaacattggccctgtgtgaagtatttcgaatctcctccttgctctgaaacttcagcgattccattgtgataagcgcacaaacagcactgtctgtcggtaatcggtactactttattaatgattttctgttacactgtatagtagtcctatggcaccccctcggcttctgctttttagtgaatggcatgactgactatccgggtggtaagccacccaggtgcctaagcaagagactgagggaaacagctgtgcgagttttataaagttttatactaaaagaatttttactggatctctatcatctacatgcatatctgggagtttctata

SEQ ID NO: 351499 - DNA, 983 bp, Homo sapiens
gagctctggccggcggaccttttccttctggagtttccccggcgggtgtgagttgttgcggggtctgggggagctgggaggcccggtttgggaagttttgcaggcaggtgcatgagccatctttctctgaaagtgtttaagaaatgttcaagaacagcggccagagtcaagaaactgggggatgaagggttatctcgagactagacggaaggaaacgtatcaggggaggggtggaggccagaaggaaggagttaggtaggggccctctcccaagctggcgtttttgctgggtggaatccttttgctagatcccttggatttccgttttccgtgtgttatcacactgttggaactgggaagaagagaaaaagaggcaagattttggcatttagtaagttaagtctgaataccgagttttcatccgggtgcatacgtacttaaaataccaaatgggtccaggaagggggacaaagtacgctttaatttatgagaagatcagctactagaaactttcagcgattccattgtgataagcgcacaaacagcactgtctgtcggtaatcggtactactttattaatgattttctgttacactgtatagtagtcctatggcacccccaccccatccctttcgtgccactcccgtccccacccccaccccagtgtgtataagctggcatttcgccagcttgtacgtagcttgccactcagtgaaaataataacattattatgagaaagtggacttaaccgaaatggaaccaactgacattctatcgtgttgtacatagaatgatgaagggttccactgttgttgtatgtcttaaatttatttaaaactttttttaatccagatgtagactatattctaaaaaataaaaaagcaaatgtgtcaactaaattggacaagcgtctggtcctcattaatctgccaatgaatggtttcgtcattaaataaaaatcaatttaattgatttactagca

SEQ ID NO: 351500 - DNA, 2451 bp, Homo sapiens
  misc_feature (4)..(4): n is a, c, g, or t
ggcngaggggctcactctgcaaccaaggcacgtgcattccggtcatcccacgcggggagcgcgcgcaaggcccgcccagcccccacatgccagccccaccctccagtcggtccggacgccgacgcctttttgaccctcgctgtgcccggccctcctcatctggcctgcccagggcttggtgctggcggggtccagctgctccaatccctcctcctctgctctgccctgccctgccctggcctgccccggcgccctccctcagcccgggtatcaggcgagaggcggagctggcccggcgcgccccgcccccgctgtagaaagggccgggcgagtgttactcgcgggtcatcccggcctgggccttttatctcggtgctgccgggggaggcgggaggaggagacaccaggggtggccctgagcgccggcgacacctttcctggactataaattgagcacctgggatgggtagggggccaacgcagtcaccgccgtccgcagtcacagtccagccactgaccgcagcagcgcccttgcgtagcagccgcttgcagcgagaacactgaattgccaacgagcaggagagtctcaaggcgcaagaggaggccagggctcgacccacagagcaccctcagccatcgcgagtttccgggcgccaaagccaggagaagccgcccatcccgcagggccggtctgccagcgagacgagagttggcgagggcggaggagtgccgggaatcccgccacaccggctatagccaggcccccagcgcgggccttggagagcgcgtgaaggcgggcatccccttgacccggccgaccatccccgtgcccctgcgtccctgcgctccaacgtccgcgcggccaccatgatgcaaatctgcgacacctacaaccagaagcactcgctctttaacgccatgaatcgcttcattggcgccgtgaacaacatggaccagacggtgatggtgcccagcttgctgcgcgacgtgcccctggctgaccccgggttagacaacgatgttggcgtggaggtaggcggcagtggcggctgcctggaggagcgcacgcccccagtccccgactcgggaagcgccaatggcagctttttcgcgccctctcgggacatgtacagccactacgtgcttctcaagtccatccgcaacgacatcgagtggggggtcctgcaccagccgcctccaccggctgggagcgaggagggcagtgcctggaagtccaaggacatcctggtggacctgggccacttggagggtgcggacgccggcgaagaagacctggaacagcagttccactaccacctgcgcgggctgcacactgtgctctcgaaactcacgcgcaaagccaacatcctcactaacagatacaagcaggagatcggcttcggcaattggggccactgaggcgtggcgcccgtggctgcccagcaccttcttcgacccatctcaccctctctcattcctcaaagcttttttttttttttcctggctggggggcgggaagggcagactgcaaactggggggctgcgtacgtgcaggaggcgcggtggggctgcgtggaggagggggccacgtgtgagagagaagaaaatggtggccggagatgggagggcccaaggaacctcctgggagggggcctgcattctatgttggtgggaatgggactgggctgacgccctgcattcagcctgtgcctttcctggggtttcttttctgttcttttcggaggagagggcccgagaaggggccataccagggcgcggcgctgggttgccacacttgggaaagcagcccggagctgggtgctggggaaggcggggcgcgtagcctcccgccgccctgcggttgggccggtggaggcccaggcgttgctaggattgcatcagttttcctgtttgcactatttctttttgtaacattggccctgtgtgaagtatttcgaatctcctccttgctctgaaacttcagcgattccattgtgataagcgcacaaacagcactgtctgtcggtaatcggtactactttattaatgattttctgttacactgtatagtagtcctatggcacccccaccccatccctttcgtgccactcccgtccccacccccaccccagtgtgtataagctggcatttcgccagcttgtacgtagcttgccactcagtgaaaataataacattattatgagaaagtggacttaaccgaaatggaaccaactgacattctatcgtgttgtacatagaatgatgaagggttccactgttgttgtatgtcttaaatttatttaaaactttttttaatccagatgtagactatattctaaaaaataaaaaagcaaatgtgtcaactaaattggacaagcgtctggtcctcattaatctgccaatgaatggtttcgtcattaaataaaaatcaatttaattgatttactagca

SEQ ID NO: 351501 - DNA, 3113 bp, Homo sapiens
  misc_feature (4)..(4): n is a, c, g, or t
ggcngaggggctcactctgcaaccaaggcacgtgcattccggtcatcccacgcggggagcgcgcgcaaggcccgcccagcccccacatgccagccccaccctccagtcggtccggacgccgacgcctttttgaccctcgctgtgcccggccctcctcatctggcctgcccagggcttggtgctggcggggtccagctgctccaatccctcctcctctgctctgccctgccctgccctggcctgccccggcgccctccctcagcccgggtatcaggcgagaggcggagctggcccggcgcgccccgcccccgctgtagaaagggccgggcgagtgttactcgcgggtcatcccggcctgggccttttatctcggtgctgccgggggaggcgggaggaggagacaccaggggtggccctgagcgccggcgacacctttcctggactataaattgagcacctgggatgggtagggggccaacgcagtcaccgccgtccgcagtcacagtccagccactgaccgcagcagcgcccttgcgtagcagccgcttgcagcgagaacactgaattgccaacgagcaggagagtctcaaggcgcaagaggaggccagggctcgacccacagagcaccctcagccatcgcgagtttccgggcgccaaagccaggagaagccgcccatcccgcagggccggtctgccagcgagacgagagttggcgagggcggaggagtgccgggaatcccgccacaccggctatagccaggcccccagcgcgggccttggagagcgcgtgaaggcgggcatccccttgacccggccgaccatccccgtgcccctgcgtccctgcgctccaacgtccgcgcggccaccatgatgcaaatctgcgacacctacaaccagaagcactcgctctttaacgccatgaatcgcttcattggcgccgtgaacaacatggaccagacggtgatggtgcccagcttgctgcgcgacgtgcccctggctgaccccgggttagacaacgatgttggcgtggaggtaggcggcagtggcggctgcctggaggagcgcacgcccccagtccccgactcgggaagcgccaatggcagctttttcgcgccctctcgggacatgtacagccactacgtgcttctcaagtccatccgcaacgacatcgagtggggggtcctgcaccagccgcctccaccggctgggagcgaggagggcagtgcctggaagtccaaggacatcctggtggacctgggccacttggagggtgcggacgccggcgaagaagacctggaacagcagttccactaccacctgcgcgggctgcacactgtgctctcgaaactcacgcgcaaagccaacatcctcactaacagatacaagcaggagatcggcttcggcaattggggccactgaggcgtggcgcccgtggctgcccagcaccttcttcgacccatctcaccctctctcattcctcaaagcttttttttttttttcctggctggggggcgggaagggcagactgcaaactggggggctgcgtacgtgcaggaggcgcggtggggctgcgtggaggagggggccacgtgtgagagagaagaaaatggtggccggagatgggagggcccaaggaacctcctgggagggggcctgcattctatgttggtgggaatgggactgggctgacgccctgcattcagcctgtgcctttcctggggtttcttttctgttcttttcggaggagagggcccgagaaggggccataccagggcgcggcgctgggttgccacacttgggaaagcagcccggagctgggtgctggggaaggcggggcgcgtagcctcccgccgccctgcggttgggccggtggaggcccaggcgttgctaggattgcatcagttttcctgtttgcactatttctttttgtaacattggccctgtgtgaagtatttcgaatctcctccttgctctgaaacttcagcgattccattgtgataagcgcacaaacagcactgtctgtcggtaatcggtactactttattaatgattttctgttacactgtatagtagtcctatggcacccccaccccatccctttcgtgccactcccgtccccacccccaccccagtgtgtataagctggcatttcgccagcttgtacgtagcttgccactcagtgaaaataataacattattatgagaaagtggacttaaccgaaatggaaccaactgacattctatcgtgttgtacatagaatgatgaagggttccactgttgttgtatgtcttaaatttatttaaaactttttttaatccagatgtagactatattctaaaaaataaaaaaaaaaaaaaaaaaaaacatgggggtggccgcgcgcccgcgcggcccccggaaaaaagttttaaaaaaccccgcgtgtgtggggcgcggcggggccccaggggggtaaggggcacacgggggccacaaaggcgggttccccaaagggaaaacaccggggcccgaggaaacacaaggtgggcggtgggtctctcctacccaaaaaataaaaaaaccgccggggggggaaccaccgagcgcgttttggacacaaccccgaagggcgggccctcgaggagggacaaacacggggagcttcataaacacacgggagccccaagggcgagcccgaataataaaaattagcccgcgccggagagagaagtaaaccaacgagacaacaacatacacaaacactagcacactacacactaaaagactaatagagagaacgtaaccgccagacgacggaaaataaaccaaacatcaaaaacagctagggcgacaggagccagccggaagaagaacaggaaggccgaagaaaacagatgagagagagagaagagcagagagagaagcctaacacgaagagaaaaatggagtacaaaaagcaccacgaaaagcagagaagaacaacgaaacaacgagagaaagaaacatcaaaacgaaatacatactacacacagcaagatggaagaaaacaataacagaaacgaaaacataacaggaacagcccagacacagcagacacagcaggcacgacacaccacaacaacagagaagaaac

SEQ ID NO: 351502 - DNA, 1457 bp, Homo sapiens
gggctgctatggctgctgactgatagcgaggtggcgaagcctcccagtcttgcacgcacttgcgtgagaagctgccgaagtggacgagacattcccacgctgcacctcggtcgtggcacagtgtccaggctcgacgttactgttgtctgtctctaagatccatccgcaacgacatcgagtggggggtcctgcaccagccgcctccaccggctgggagcgaggagggcagtgcctggaagtccaaggacatcctggtggacctgggccacttggagggtgcggacgccggcgaagaagacctggaacagcagttccactaccacctgcgcgggctgcacactgtgctctcgaaactcacgcgcaaagccaacatcctcactaacagatacaagcaggagatcggcttcggcaattggggccactgaggcgtggcgcccgtggctgcccagcaccttcttcgacccatctcaccctctctcattcctcaaagcttttttttttttttcctggctggggggcgggaagggcagactgcaaactggggggctgcgtacgtgcaggaggcgcggtggggctgcgtggaggagggggccacgtgtgagagagaagaaaatggtggccggagatgggagggcccaaggaacctcctgggagggggcctgcattctatgttggtgggaatgggactgggctgacgccctgcattcagcctgtgcctttcctggggtttcttttctgttcttttcggaggagagggcccgagaaggggccataccagggcgcggcgctgggttgccacacttgggaaagcagcccggagctgggtgctggggaaggcggggcgcgtagcctcccgccgccctgcggttgggccggtggaggcccaggcgttgctaggattgcatcagttttcctgtttgcactatttctttttgtaacattggccctgtgtgaagtatttcgaatctcctccttgctctgaaacttcagcgattccattgtgataagcgcacaaacagcactgtctgtcggtaatcggtactactttattaatgattttctgttacactgtatagtagtcctatggcacccccaccccatccctttcgtgccactcccgtccccacccccaccccagtgtgtataagctggcatttcgccagcttgtacgtagcttgccactcagtgaaaataataacattattatgagaaagtggacttaaccgaaatggaaccaactgacattctatcgtgttgtacatagaatgatgaagggttccactgttgttgtatgtcttaaatttatttaaaactttttttaatccagatgtagactatattctaaaaaataaaaaagcaaatgtgtcaactaaattggacaagcgtctggtcctcattaatctgccaatgaatggtttcgtcattaaataaaaatcaatttaattgatttactagca

SEQ ID NO: 351503 - DNA, 2152 bp, Homo sapiens
tgccatcttggactcgggctgagtaataaattccccccgcaccgaaacgcggtctttctctagacgcgtcttgctgggagagtgtccgttgcttcccgtccgtgtcgcggccctgcggttggcggcctcctcgtggagcggagcaaggccaggcggcccctgctcgagtcccgcgtcgccatggccgcggttcccgagttgctgcagcagcaggaggaggaccgcagcaagctgagatctgtatctgtggacctgaatgttgatccctcgcttcagattgacatacctgatgcgctcagtgagagagacaaagtcaaatttacagtgcacacaaagaccacactgcccacgtttcagagcccagagttttctgttacaaggcaacatgaagactttgtgtggctacatgacactcttattgaaacaacagactatgctgggcttattattccacctgctcctacgaagcccgactttgatggtcctcgagagaagatgcagaaactgggagaaggtgaagggtctatgaccaaagaagaatttgccaagatgaaacaagaactggaagctgagtatctcgctgtgtttaagaagactgtgtcctcccatgaagtctttcttcagcggctttcttctcaccctgttctcagtaaagatcgcaactttcatgttttcctggaatatgatcaggatctaagtgttaggcggaaaaatactaaagagatgtttggtggcttcttcaaaagtgtggtgaaaagtgctgatgaagtcctttttactggagttaaggaggtagatgacttctttgagcaagagaagaacttccttattaactattacaataggatcaaagattcttgtgtgaaagctgacaaaatgaccagatctcataaaaatgttgccgatgactatatccacaccgcagcctgcttacatagcctggctttagaagagcccacagtcatcaaaaagtacctattgaaggttgctgagctatttgaaaaactaaggaaagtagagggtcgagtttcatcagatgaagatttgaagctaacagagctcctccgatactacatgctcaacattgaagctgctaaggatctcttatacagacgcaccaaagccctcattgactatgagaactcaaacaaagctctggataaggcccggttaaagagcaaagacgtcaagttggctgaggcacaccagcaggagtgctgccagaaatttgaacaactttccgaatctgcaaaagaagaactgataaatttcaaacggaagagagtggcagcatttagaaagaatctaattgaaatgtctgaactggaaataaaacatgccaggaacaatgtctcccttttgcagagctgtattgacttgttcaagaataactgatatgccttcactcagaagaaaagaaatgaatgtgaaagaaagccaagcatcacttgcacttaaatcattaccacggaagatatattagcttcaactttagtttaaaattatgtgaataaatattttgatttctacaaatcttaacatttaaccatgttggtttaaaaatattattgcttgctacttggacataactaatttttccttgtgcatttaatacctctgggcagaatccaaatactgggttctcccgtagttcgtctttagttactaagaaagggtgtaggacacattagccttctggaaacaagtagaagccatcacctggcccatgtccctacaaacccatgattgtcagggaggtgccagttacagcaggtgattcagctacttgaggtcggtaacagaccttccattcctcactgaaggtggggtttgtgtttttgttttgccctgttactccactggtagtcatctggtgtttgtactataacaacagcaagaaaatctcatttatctttatatactctttgcacctcctttttttagtcgagatataaatatttgaggggagagaaatatctacaggtatatatggaaacaaataatgtggtctgctttataagatggccagatctacattaggaaaagtataagccccctccctaatggccgctggggggtgagggcggtgtgttgtatgtctttgggtgtttgtttttttataaagcatataataaaataatcgtgctactaa

SEQ ID NO: 351504 - DNA, 1607 bp, Homo sapiens
  misc_feature (1574)..(1574): n is a, c, g, or t
agtttatccattcgctgagtgcgctgcactgaccttcttccaagcctcagttcctgttctaggaacttgaggctatgtagcctgaaaatgccctgcagtctgcagtgttctactgtgaactgcttgtgtgttggcaggctaccggtaagaatggttggtgtcagcagggacggggccctctgagacccatctcacaaagatgagtggtgaaaatctgatcacttgctgcagccctttagttttttattaagccgatgcctgagtagctttaatagctattagctatgttagtagactgagatcttctgttagaagtctttagttctgttttccttgggggactaagaaattatattgcaggcctgaattacaggaaggggagaaccaatggctagggaatgagagccaatacctgtaaaagcagagttgggctgggcgcggtggctcacgcctgtaatcccaggactttgggaggctgaggcgggcagatcacgaggtcaggagttagagaccagcctgaccaacatggtgaaaccctgtctctactaaaaatacaaaaattagctgggtggggtggtgggcgcctgtaatcccagctactcaggaggctgaggcaggagtatctgggagaattgaaccccgggggtggaggtcgcggtgagctgagactgtgccactgcactccagcctgggcaacagagtgagactccgtctccaaaaaaaaaaaaaaaaagcagagttaatatattgcttatagttagttgaaccagttgtttctcacacaccagtgccataatctaaagctgagattgaacacagataggtacgtattagttatcttcaggatggcagagaatagtaacaattcggagcaccaatgggaacattgtttcctgagagttcaaacagtaacaaagtagcatgtgtttcctaaatatgtatcatgtgaatctttaatatttgtggacattaatacaaatctagagtgtgacagaacatctttgaattttatattctcacttaacaaatattggactaggcaaggtgtggatatctttccagctgaaaatctgatcaaggaggcaggcttcttggctccatgctaagaatcatcgatgatttgtcatattggccctcttgctggcaaaatcttagtttcttaggcagtggaatgaaacataacaaaacaaaatccctagaggctaggaacagatagtttgaaagagaagacactgtagcatgtgctgcttaagtacatatcttctgcttttggaatggaaactaggaagtcatttaaatagatatgtgtcttttttatcctatctgtagtaatttatgtgggatattcaaataggaaaatacaggctagcactgcatattgtatccatgtcttacattgtatacaaatgactattagatttaaatgactgttcaactagccccaatctaacagatcagagattgtggagtttcacttctttggactgtgtctttttcattttggcactgagtctgcagtcaccataaccacttagaaaaaactgtattttttctgttctcctggtgggtcagancataaggtttatcctcaagagtcagccatgacg

SEQ ID NO: 351505 - DNA, 702 bp, Homo sapiens
gcccaggcagagcttcccccggaaggattgcataggccagcagcaggaggaggaccgcagcaagctgagatctgtatctgtggacctgaatgttgatccctcgcttcagattgacatacctgatgcgctcagtgagagagacaaagtcaaatttacagtgcacacaaagaccacactgcccacgtttcagagcccagagttttctgttacaaggcaacatgaagactttgtgtggctacatgacactcttattgaaacaacagactatgctgggcttattattccacctgctcctacgaagcccgactttgatggtcctcgagagaagatgcagaaactgggagaaggtgaagggtctatgaccaaagaagaatttgccaagatgaaacaagaactggaagctgagtatctcgctgtgtttaagaagactgtgtcctcccatgaagtctttcttcagcggctttcttctcaccctgttctcagtaaagatcgcaactttcatgttttcctggaatatgatcaggatctaagtgttaggcggaaaaatactaaagagatgtttggtggcttcttcaaaagtgtggtgaaaagtgctgatgaagtcctttttactggagttaaggtaagtgacctttggctgttggagaaaattttttacttcatcgggaataggtgaccttttgtttctttgaaagagatact

SEQ ID NO: 351506 - DNA, 566 bp, Homo sapiens
atttctagcaacttttattcaatctttccaaggccctcgccttcatggaacaacgcactgatagtgtcttaagaagttacagtaagcaggatcacatttaggagcaagcaggtgagggcagaggtgctggagtgaacgtcggctctttggctggtagccttacccactgagggagaggagctgaaacatgaaatggggatgcgtggtacgttgcagttcacctgggatttgatgaagagaagggccagcttgctctggctgactttaaacctcccgtgaaaagccgtgttggtgtacttgagtcattccaggtatatggcaagttttaataattcactggtctgccttgccttttttccccacagaacaatgtctcccttttgcagagctgtattgacttgttcaagaataactgatatgccttcactcagaagaaaagaaatgaatgtgaaagaaagccaagcatcacttgcacttaaatcattaccacggaagatatattagcttcaactttagtttaaaattatgtgaataaatattttgatttctacaaatcttaacattta

SEQ ID NO: 351507 - DNA, 635 bp, Homo sapiens
gagcgcaatcaggtatgtcaatctgaagcgagggatcaacaatcaggtccacagatacagatctcagctgaaatacattttttgcgtattagtctcaaactcatttggccctaaaaaattattcccaaaatgagtagttacttaaaagcagtttatacatagatcatttagaaatgtcagttgaactgggttgggtggctcacacctgtaatcctagcacttcgggaggacaagatgggcagatcgtttgagcctgggcaacatggcaaaattatctaaaagtcgtggttaccagttaacttctttctttctttacagaccacactgcccacgtttcagagcccagagttttctgttacaaggcaacatgaagactttgtgtggctacatgacactcttattgaaacaacagactatgctgggcttattgtgagtcttttagaaaatcaaataagctagttctttctgccttgctatgcattagtttaaaagagacttatatccactttttttaatggattgtgaaaagttagatttcatctacctactggagtatttgctgactgtcaagtggaaagtatgtgaaggaatagtgttacagctttgaggtggtgcatacaggcttacattattta

SEQ ID NO: 351508 - DNA, 2394 bp, Homo sapiens
tgccatcttggactcgggctgagtaataaattccccccgcaccgaaacgcggtctttctctagacgcgtcttgctgggagagtgtccgttgcttcccgtccgtgtcgcggccctgcggttggcggcctcctcgtggagcggagcaagggtaggccccacgtggcgtctttgcccggctccaagatggacggcagcggggactgggaggctgctctgggggagcacgtggcgccctgctcgcctgctcccggggcagctgggatggtggcggagtccggaggcctcctgccgccgtcgggcagggaggccggcggaggcggggccgtggccgcccccgagaggcgcccaggcggcggcggcggcggcccagcttcttctttcctcgcacagccaggcggcccctgctcgagtcccgcgtcgccatggccgcggttcccgagttgctgcagcagcaggaggaggaccgcagcaagctgagatctgtatctgtggacctgaatgttgatccctcgcttcagattgacatacctgatgcgctcagtgagagagacaaagtcaaatttacagtgcacacaaagaccacactgcccacgtttcagagcccagagttttctgttacaaggcaacatgaagactttgtgtggctacatgacactcttattgaaacaacagactatgctgggcttattattccacctgctcctacgaagcccgactttgatggtcctcgagagaagatgcagaaactgggagaaggtgaagggtctatgaccaaagaagaatttgccaagatgaaacaagaactggaagctgagtatctcgctgtgtttaagaagactgtgtcctcccatgaagtctttcttcagcggctttcttctcaccctgttctcagtaaagatcgcaactttcatgttttcctggaatatgatcaggatctaagtgttaggcggaaaaatactaaagagatgtttggtggcttcttcaaaagtgtggtgaaaagtgctgatgaagtcctttttactggagttaaggaggtagatgacttctttgagcaagagaagaacttccttattaactattacaataggatcaaagattcttgtgtgaaagctgacaaaatgaccagatctcataaaaatgttgccgatgactatatccacaccgcagcctgcttacatagcctggctttagaagagcccacagtcatcaaaaagtacctattgaaggttgctgagctatttgaaaaactaaggaaagtagagggtcgagtttcatcagatgaagatttgaagctaacagagctcctccgatactacatgctcaacattgaagctgctaaggatctcttatacagacgcaccaaagccctcattgactatgagaactcaaacaaagctctggataaggcccggttaaagagcaaagacgtcaagttggctgaggcacaccagcaggagtgctgccagaaatttgaacaactttccgaatctgcaaaagaagaactgataaatttcaaacggaagagagtggcagcatttagaaagaatctaattgaaatgtctgaactggaaataaaacatgccaggaacaatgtctcccttttgcagagctgtattgacttgttcaagaataactgatatgccttcactcagaagaaaagaaatgaatgtgaaagaaagccaagcatcacttgcacttaaatcattaccacggaagatatattagcttcaactttagtttaaaattatgtgaataaatattttgatttctacaaatcttaacatttaaccatgttggtttaaaaatattattgcttgctacttggacataactaatttttccttgtgcatttaatacctctgggcagaatccaaatactgggttctcccgtagttcgtctttagttactaagaaagggtgtaggacacattagccttctggaaacaagtagaagccatcacctggcccatgtccctacaaacccatgattgtcagggaggtgccagttacagcaggtgattcagctacttgaggtcggtaacagaccttccattcctcactgaaggtggggtttgtgtttttgttttgccctgttactccactggtagtcatctggtgtttgtactataacaacagcaagaaaatctcatttatctttatatactctttgcacctcctttttttagtcgagatataaatatttgaggggagagaaatatctacaggtatatatggaaacaaataatgtggtctgctttataagatggccagatctacattaggaaaagtataagccccctccctaatggccgctggggggtgagggcggtgtgttgtatgtctttgggtgtttgtttttttataaagcatataataaaataatcgtgctactaa

SEQ ID NO: 351509 - DNA, 2069 bp, Homo sapiens
tgccatcttggactcgggctgagtaataaattccccccgcaccgaaacgcggtctttctctagacgcgtcttgctgggagagtgtccgttgcttcccgtccgtgtcgcggccctgcggttggcggcctcctcgtggagcggagcaaggctgagatctgtatctgtggacctgaatgttgatccctcgcttcagattgacatacctgatgcgctcagtgagagagacaaagtcaaatttacagtgcacacaaagaccacactgcccacgtttcagagcccagagttttctgttacaaggcaacatgaagactttgtgtggctacatgacactcttattgaaacaacagactatgctgggcttattattccacctgctcctacgaagcccgactttgatggtcctcgagagaagatgcagaaactgggagaaggtgaagggtctatgaccaaagaagaatttgccaagatgaaacaagaactggaagctgagtatctcgctgtgtttaagaagactgtgtcctcccatgaagtctttcttcagcggctttcttctcaccctgttctcagtaaagatcgcaactttcatgttttcctggaatatgatcaggatctaagtgttaggcggaaaaatactaaagagatgtttggtggcttcttcaaaagtgtggtgaaaagtgctgatgaagtcctttttactggagttaaggaggtagatgacttctttgagcaagagaagaacttccttattaactattacaataggatcaaagattcttgtgtgaaagctgacaaaatgaccagatctcataaaaatgttgccgatgactatatccacaccgcagcctgcttacatagcctggctttagaagagcccacagtcatcaaaaagtacctattgaaggttgctgagctatttgaaaaactaaggaaagtagagggtcgagtttcatcagatgaagatttgaagctaacagagctcctccgatactacatgctcaacattgaagctgctaaggatctcttatacagacgcaccaaagccctcattgactatgagaactcaaacaaagctctggataaggcccggttaaagagcaaagacgtcaagttggctgaggcacaccagcaggagtgctgccagaaatttgaacaactttccgaatctgcaaaagaagaactgataaatttcaaacggaagagagtggcagcatttagaaagaatctaattgaaatgtctgaactggaaataaaacatgccaggaacaatgtctcccttttgcagagctgtattgacttgttcaagaataactgatatgccttcactcagaagaaaagaaatgaatgtgaaagaaagccaagcatcacttgcacttaaatcattaccacggaagatatattagcttcaactttagtttaaaattatgtgaataaatattttgatttctacaaatcttaacatttaaccatgttggtttaaaaatattattgcttgctacttggacataactaatttttccttgtgcatttaatacctctgggcagaatccaaatactgggttctcccgtagttcgtctttagttactaagaaagggtgtaggacacattagccttctggaaacaagtagaagccatcacctggcccatgtccctacaaacccatgattgtcagggaggtgccagttacagcaggtgattcagctacttgaggtcggtaacagaccttccattcctcactgaaggtggggtttgtgtttttgttttgccctgttactccactggtagtcatctggtgtttgtactataacaacagcaagaaaatctcatttatctttatatactctttgcacctcctttttttagtcgagatataaatatttgaggggagagaaatatctacaggtatatatggaaacaaataatgtggtctgctttataagatggccagatctacattaggaaaagtataagccccctccctaatggccgctggggggtgagggcggtgtgttgtatgtctttgggtgtttgtttttttataaagcatataataaaataatcgtgctactaa

SEQ ID NO: 351510 - DNA, 3101 bp, Homo sapiens
tgccatcttggactcgggctgagtaataaattccccccgcaccgaaacgcggtctttctctagacgcgtcttgctgggagagtgtccgttgcttcccgtccgtgtcgcggccctgcggttggcggcctcctcgtggagcggagcaaggccaggcggcccctgctcgagtcccgcgtcgccatggccgcggttcccgagttgctgcagcagcaggaggaggaccgcagcaagctgagatctgtatctgtggacctgaatgttgatccctcgcttcagattgacatacctgatgcgctcagtgagagagacaaagtcaaatttacagtgcacacaaagaccacactgcccacgtttcagagcccagagttttctgttacaaggcaacatgaagactttgtgtggctacatgacactcttattgaaacaacagactatgctgggcttattattccacctgctcctacgaagcccgactttgatggtcctcgagagaagatgcagaaactgggagaaggtgaagggtctatgaccaaagaagaatttgccaagatgaaacaagaactggaagctgagtatctcgctgtgtttaagaagactgtgtcctcccatgaagtctttcttcagcggctttcttctcaccctgttctcagtaaagatcgcaactttcatgttttcctggaatatgatcaggatctaagtgttaggcggaaaaatactaaagagatgtttggtggcttcttcaaaagtgtggtgaaaagtgctgatgaagtcctttttactggagttaaggaggtagatgacttctttgagcaagagaagaacttccttattaactattacaataggatcaaagattcttgtgtgaaagctgacaaaatgaccagatctcataaaaatgttgccgatgactatatccacaccgcagcctgcttacatagcctggctttagaagagcccacagtcatcaaaaagtacctattgaaggttgctgagctatttgaaaaactaaggaaagtagagggtcgagtttcatcagatgaagatttgaagctaacagagctcctccgatactacatgctcaacattgaagctgctaaggatctcttatacagacgcaccaaagccctcattgactatgagaactcaaacaaagctctggataaggcccggttaaagagcaaagacgtcaagttggctgaggcacaccagcaggagtgctgccagaaatttgaacaactttccgaatctgcaaaagaaggagttcaacttaagattttacctgtaagtgagatcatgtaatgtttgtctttctgtgcctggtttattttatttggcataatgtcctctaagatccatccacattgtcccatatgagagaattttgttattttaaaaggccggatagtataatgtatctatactacattgtcttcatccactgatggataattctcaattgattttgtattttggctattgtaaataatgctgcagtgaacatggaagtacggatatcccattgagatactgatttcagttccttttatattcccagaagtgggtttgctggatcatatggtaattctatttttagttttttgaggaacctctataccattttccatggtggctgtactaatttacattcccagcaacggtgtagaagagttcacttttctctgcattgttgctaacactgatctttcatctatttgagaaaatgcattctagcaggtgtgaggtaatctcattgtggttttaatttgcatttccctaatggctagtgctgctgaacgttgtttgcatgaacctggtatgtcttcttttgagaagcattttcacaagccattggtgaagtatgtggctcaccaccacccatactccagccctgttcccagtcactggtacctagagggtgagagtgaggctgctcatcaacgtgttctccaagtcataagctgctgctctcccactcacgatgcttggtgattcagtgatgttttccacttaaagacagtgatagctgtatcaccacagttaatagatgtctgatgtgtcccagtcacagagataatacaaatgtgaggaaataatgctggtgcctgaaagcattggagaccatttgtaagaatgccatttggtagttaaagtgaacatgaaaattgtttagtttttcttggtttcataaacattttttcttcctgtagaactgataaatttcaaacggaagagagtggcagcatttagaaagaatctaattgaaatgtctgaactggaaataaaacatgccaggaacaatgtctcccttttgcagagctgtattgacttgttcaagaataactgatatgccttcactcagaagaaaagaaatgaatgtgaaagaaagccaagcatcacttgcacttaaatcattaccacggaagatatattagcttcaactttagtttaaaattatgtgaataaatattttgatttctacaaatcttaacatttaaccatgttggtttaaaaatattattgcttgctacttggacataactaatttttccttgtgcatttaatacctctgggcagaatccaaatactgggttctcccgtagttcgtctttagttactaagaaagggtgtaggacacattagccttctggaaacaagtagaagccatcacctggcccatgtccctacaaacccatgattgtcagggaggtgccagttacagcaggtgattcagctacttgaggtcggtaacagaccttccattcctcactgaaggtggggtttgtgtttttgttttgccctgttactccactggtagtcatctggtgtttgtactataacaacagcaagaaaatctcatttatctttatatactctttgcacctcctttttttagtcgagatataaatatttgaggggagagaaatatctacaggtatatatggaaacaaataatgtggtctgctttataagatggccagatctacattaggaaaagtataagccccctccctaatggccgctggggggtgagggcggtgtgttgtatgtctttgggtgtttgtttttttataaagcatataataaaataatcgtgctactaa

SEQ ID NO: 351511 - DNA, 2289 bp, Homo sapiens
tgccatcttggactcgggctgagtaataaattccccccgcaccgaaacgcggtctttctctagacgcgtcttgctgggagagtgtccgttgcttcccgtccgtgtcgcggccctgcggttggcggcctcctcgtggagcggagcaagggtaggccccacgtggcgtctttgcccggctccaagatggacggcagcggggactgggaggctgctctgggggagcacgtggcgccctgctcgcctgctcccggggcagctgggatggtggcggagtccggaggcctcctgccgccgtcgggcagggaggccggcggaggcggggccgtggccgcccccgagaggcgcccaggcggcggcggcggcggcccagcttcttctttcctcgcacagccaggcggcccctgctcgagtcccgcgtcgccatggccgcggttcccgagttgctgcagcagcaggaggaggaccgcagcaagaccacactgcccacgtttcagagcccagagttttctgttacaaggcaacatgaagactttgtgtggctacatgacactcttattgaaacaacagactatgctgggcttattattccacctgctcctacgaagcccgactttgatggtcctcgagagaagatgcagaaactgggagaaggtgaagggtctatgaccaaagaagaatttgccaagatgaaacaagaactggaagctgagtatctcgctgtgtttaagaagactgtgtcctcccatgaagtctttcttcagcggctttcttctcaccctgttctcagtaaagatcgcaactttcatgttttcctggaatatgatcaggatctaagtgttaggcggaaaaatactaaagagatgtttggtggcttcttcaaaagtgtggtgaaaagtgctgatgaagtcctttttactggagttaaggaggtagatgacttctttgagcaagagaagaacttccttattaactattacaataggatcaaagattcttgtgtgaaagctgacaaaatgaccagatctcataaaaatgttgccgatgactatatccacaccgcagcctgcttacatagcctggctttagaagagcccacagtcatcaaaaagtacctattgaaggttgctgagctatttgaaaaactaaggaaagtagagggtcgagtttcatcagatgaagatttgaagctaacagagctcctccgatactacatgctcaacattgaagctgctaaggatctcttatacagacgcaccaaagccctcattgactatgagaactcaaacaaagctctggataaggcccggttaaagagcaaagacgtcaagttggctgaggcacaccagcaggagtgctgccagaaatttgaacaactttccgaatctgcaaaagaagaactgataaatttcaaacggaagagagtggcagcatttagaaagaatctaattgaaatgtctgaactggaaataaaacatgccaggaacaatgtctcccttttgcagagctgtattgacttgttcaagaataactgatatgccttcactcagaagaaaagaaatgaatgtgaaagaaagccaagcatcacttgcacttaaatcattaccacggaagatatattagcttcaactttagtttaaaattatgtgaataaatattttgatttctacaaatcttaacatttaaccatgttggtttaaaaatattattgcttgctacttggacataactaatttttccttgtgcatttaatacctctgggcagaatccaaatactgggttctcccgtagttcgtctttagttactaagaaagggtgtaggacacattagccttctggaaacaagtagaagccatcacctggcccatgtccctacaaacccatgattgtcagggaggtgccagttacagcaggtgattcagctacttgaggtcggtaacagaccttccattcctcactgaaggtggggtttgtgtttttgttttgccctgttactccactggtagtcatctggtgtttgtactataacaacagcaagaaaatctcatttatctttatatactctttgcacctcctttttttagtcgagatataaatatttgaggggagagaaatatctacaggtatatatggaaacaaataatgtggtctgctttataagatggccagatctacattaggaaaagtataagccccctccctaatggccgctggggggtgagggcggtgtgttgtatgtctttgggtgtttgtttttttataaagcatataataaaataatcgtgctactaa

SEQ ID NO: 351512 - DNA, 2493 bp, Homo sapiens
  misc_feature (2197)..(2197): n is a, c, g, or t
tgccatcttggactcgggctgagtaataaattccccccgcaccgaaacgcggtctttctctagacgcgtcttgctgggagagtgtccgttgcttcccgtccgtgtcgcggccctgcggttggcggcctcctcgtggagcggagcaaggccaggcggcccctgctcgagtcccgcgtcgccatggccgcggttcccgagttgctgcagcagcaggaggaggaccgcagcaagctgagatctgtatctgtggacctgaatgttgatccctcgcttcagattgacatacctgatgcgctcagtgagagagacaaagtcaaatttacagtgcacacaaagaccacactgcccacgtttcagagcccagagttttctgttacaaggcaacatgaagactttgtgtggctacatgacactcttattgaaacaacagactatgctgggcttattattccacctgctcctacgaagcccgactttgatggtcctcgagagaagatgcagaaactgggagaaggtgaagggtctatgaccaaagaagaatttgccaagatgaaacaagaactggaagctgagtatctcgctgtgtttaagaagactgtgtcctcccatgaagtctttcttcagcggctttcttctcaccctgttctcagtaaagatcgcaactttcatgttttcctggaatatgatcaggatctaagtgttaggcggaaaaatactaaagagatgtttggtggcttcttcaaaagtgtggtgaaaagtgctgatgaagtcctttttactggagttaaggaggtagatgacttctttgagcaagagaagaacttccttattaactattacaataggatcaaagattcttgtgtgaaagctgacaaaatgaccagatctcataaaaatgttgccgatgactatatccacaccgcagcctgcttacatagcctggctttagaagagcccacagtcatcaaaaagtacctattgaaggttgctgagctatttgaaaaactaaggaaagtagagggtcgagtttcatcagatgaagatttgaagctaacagagctcctccgatactacatgctcaacattgaagctgctaaggatctcttatacagacgcaccaaagccctcattgactatgagaactcaaacaaagctctggataaggcccggttaaagagcaaagacgtcaagttggctgaggcacaccagcaggagtgctgccagaaatttgaacaactttccgaatctgcaaaagaagaactgataaatttcaaacggaagagagtggcagcatttagaaagaatctaattgaaatgtctgaactggaaataaaacatgccaggaacaatgtctcccttttgcagagctgtattgacttgttcaagaataactgatatgccttcactcagaagaaaagaaatgaatgtgaaagaaagccaagcatcacttgcacttaaatcattaccacggaagatatattagcttcaactttagtttaaaattatgtgaataaatattttgatttctacaaatcttaacatttaaccatgttggtttaaaaatattattgcttgctacttggacataactaatttttccttgtgcatttaatacctctgggcagaatccaaatactgggttctcccgtagttcgtctttagttactaagaaagggtgtaggacacattagccttctggaaacaagtagaagccatcacctggcccatgtccctacaaacccatgattgtcagggaggtgccagttacagcaggtgattcagctacttgaggtcggtaacagaccttccattcctcactgaaggtggggtttgtgtttttgttttgccctgttactccactggtagtcatctggtgtttgtactataacaacagcaagaaaatctcatttatctttatatactctttgcacctcctttttttagtcgagatataaatatttgaggggagagaaatatctacaggtatatatggaaacaaataatgtggtctgctttataagatggccagatctacattaggaaaagtataagccccctccctaatggccgctggggggtgagggcggtgtgttgtatgtctttgggtgtttgtttttttataaagcatataataaaataatcgtgctactaaaaaaaaaaaaaaaaaaaaaaaaaaaaaaaaaaaaaaaaaaaaaanaaaaaaaaaaaaaaaaaaaaaaggggggggggggcaagaataaaccagtccgccgcgcggggggtccccacggcgaccgcaccgccccacagtgtattaaaaagagagtagaaagggaggaactcacaccgggagggaggtccaattaataaaagagcggggcagcggggcgcgtgagaacaaaaaaaaacggggagacacagggacacacacgccgcactccgtggaatttgagggagagaacacacacgcacgcggggagagaagacacgttcataggcggacaaccacacagg

SEQ ID NO: 351513 - DNA, 1545 bp, Homo sapiens
tgccatcttggactcgggctgagtaataaattccccccgcaccgaaacgcggtctttctctagacgcgtcttgctgggagagtgtccgttgcttcccgtccgtgtcgcggccctgcggttggcggcctcctcgtggagcggagcaaggccaggcggcccctgctcgagtcccgcgtcgccatggccgcggttcccgagttgctgcagcagcaggaggaggaccgcagcaagctgagatctgtatctgtggacctgaatgttgatccctcgcttcagattgacatacctgatgcgctcagtgagagagacaaagtcaaatttacagtgcacacaaagaccacactgcccacgtttcagagcccagagttttctgttacaaggcaacatgaagactttgtgtggctacatgacactcttattgaaacaacagactatgctgggcttattattccacctgctcctacgaagcccgactttgatggtcctcgagagaagatgcagaaactgggagaaggtgaagggtctatgaccaaagaagaatttgccaagatgaaacaagaactggaagctgagtatctcgctgtgtttaagaagactgtgtcctcccatgaagtctttcttcagcggctttcttctcaccctgttctcagtaaagatcgcaactttcatgttttcctggaatatgatcaggatctaagtgttaggcggaaaaatactaaagagatgtttggtggcttcttcaaaagtgtggtgaaaagtgctgatgaagtcctttttactggagttaaggaggtagatgacttctttgagcaagagaagaacttccttattaactattacaataggatcaaagattcttgtgtgaaagctgacaaaatgaccagatctcataaaaatgttgccgatgactatatccacaccgcagcctgcttacatagcctggctttagaagagcccacagtcatcaaaaagtacctattgaaggttgctgagctatttgaaaaactaaggaaagtagagggtcgagtttcatcagatgaagatttgaagctaacagagctcctccgatactacatgctcaacattgaagctgctaaggatctcttatacagacgcaccaaagccctcattgactatgagaactcaaacaaagctctggataaggcccggttaaagagcaaagacgtcaagttggctgaggcacaccagcaggagtgctgccagaaatttgaacaactttccgaatctgcaaaagaagaactgataaatttcaaacggaagagagtggcagcatttagaaagaatctaattgaaatgtctgaactggaaataaaacatgccaggaacaatgtctcccttttgcagagctgtattgacttgttcaagaataactgatatgccttcactcagaagaaaagaaatgaatgtgaaagaaagccaagcatcacttgcacttaaatcattaccacggaagatatattagcttcaactttagtttaaaattatgtgaataaatattttgatttctacaaatcttaacattta

SEQ ID NO: 351514 - DNA, 4400 bp, Homo sapiens
agtttatccattcgctgagtgcgctgcactgaccttcttccaagcctcagttcctgttctaggaacttgaggctatgtagcctgaaaatgccctgcagtctgcagtgttctactgtgaactgcttgtgtgttggcaggctaccggtaagaatggttggtgtcagcagggacggggccctctgagacccatctcacaaagatgagtggtgaaaatctgatcacttgctgcagccctttagttttttattaagccgatgcctgagtagctttaatagctattagctatgttagtagactgagatcttctgttagaagtctttagttctgttttccttgggggactaagaaattatattgcaggcctgaattacaggaaggggagaaccaatggctagggaatgagagccaatacctgtaaaagcagagttgggctgggcgcggtggctcacgcctgtaatcccaggactttgggaggctgaggcgggcagatcacgaggtcaggagttagagaccagcctgaccaacatggtgaaaccctgtctctactaaaaatacaaaaattagctgggtggggtggtgggcgcctgtaatcccagctactcaggaggctgaggcaggagtatctgggagaattgaaccccgggggtggaggtcgcggtgagctgagactgtgccactgcactccagcctgggcaacagagtgagactccgtctccaaaaaaaaaaaaaaaaagcagagttaatatattgcttatagttagttgaaccagttgtttctcacacaccagtgccataatctaaagctgagattgaacacagataggtacgtattagttatcttcaggatggcagagaatagtaacaattcggagcaccaatgggaacattgtttcctgagagttcaaacagtaacaaagtagcatgtgtttcctaaatatgtatcatgtgaatctttaatatttgtggacattaatacaaatctagagtgtgacagaacatctttgaattttatattctcacttaacaaatattggactaggcaaggtgtggatatctttccagctgaaaatctgatcaaggaggcaggcttcttggctccatgctaagaatcatcgatgatttgtcatattggccctcttgctggcaaaatcttagtttcttaggcagtggaatgaaacataacaaaacaaaatccctagaggctaggaacagatagtttgaaagagaagacactgtagcatgtgctgcttaagtacatatcttctgcttttggaatggaaactaggaagtcatttaaatagatatgtgtcttttttatcctatctgtagtaatttatgtgggatattcaaataggaaaatacaggctagcactgcatattgtatccatgtcttacattgtatacaaatgactattagatttaaatgactgttcaactagccccaatctaacagatcagagattgtggagtttcacttctttggactgtgtctttttcattttggcactgagtctgcagtcaccataaccacttagaaaaaactgtattttttctgttctcctggtgggttctgagttttagaatcttgccttttgtgttgttcagtcatccaggtgccctttgccctctgtaagccattaaaccttttgaagaggcagctttgctggtagagtcgtaagtgaaatttggaccaaaagtgagtttatgaagactggtgggcaggagctcaacagctgcagggttgtcctgcagccagtgtctgatgtgccccagctgggaagctgatgaataggtgaggaaatgcacagggattccgtaactacttttctccttttagagaagtgccttggctctcttaccaaaagcactgcgattttttaaaacagttgaaaatgtgctttccaaatgaagccgtgcttgtttaccgtgaaggctgattataatccgtattgtaaggattgacctggtagggaagtacatcatgaactgaaactttacctaaaactttggatacgtgatccagtagtttcaagggaaatctacaaaagtcaggtttttaaaaattttttaaaaattctgaaatagagatgaggtctcaccgttttgctcagcctgggcaacagagcaagattccgtctcaagaaaaaaaaaaaaaaggagtagatgaaaaggaagcatgccctaaagatcatcaagtaaacctgtcttgaatacgtgtagcagtttttcactgttttggatttaaaaatgttttaagttttatttttaatcgacaagtcattgtattgcatttgtggaatacagtgtgatgctttgcaggtacataatgtgaaattattagatcaagctaattaacatctttcatttttttcagtggtaatacatttgaaatttgctgtttcaatatatattattgactgtagtcaccctgttgtgcagtagatctcaaaatttattccttgagtttagctgcagccttctacccattctctttcccaccttccccagcaccccaccctcatcctctgataaccatcattctgttctctacttctaggagttcaacttaagattttacctgtaagtgagatcatgtaatgtttgtctttctgtgcctggtttattttatttggcataatgtcctctaagatccatccacattgtcccatatgagagaattttgttattttaaaaggccggatagtataatgtatctatactacattgtcttcatccactgatggataattctcaattgattttgtattttggctattgtaaataatgctgcagtgaacatggaagtacggatatcccattgagatactgatttcagttccttttatattcccagaagtgggtttgctggatcatatggtaattctatttttagttttttgaggaacctctataccattttccatggtggctgtactaatttacattcccagcaacggtgtagaagagttcacttttctctgcattgttgctaacactgatctttcatctatttgagaaaatgcattctagcaggtgtgaggtaatctcattgtggttttaatttgcatttccctaatggctagtgctgctgaacgttgtttgcatgaacctggtatgtcttcttttgagaagcattttcacaagccattggtgaagtatgtggctcaccaccacccatactccagccctgttcccagtcactggtacctagagggtgagagtgaggctgctcatcaacgtgttctccaagtcataagctgctgctctcccactcacgatgcttggtgattcagtgatgttttccacttaaagacagtgatagctgtatcaccacagttaatagatgtctgatgtgtcccagtcacagagataatacaaatgtgaggaaataatgctggtgcctgaaagcattggagaccatttgtaagaatgccatttggtagttaaagtgaacatgaaaattgtttagtttttcttggtttcataaacattttttcttcctgtagaactgataaatttcaaacggaagagagtggcagcatttagaaagaatctaattgaaatgtctgaactggaaataaaacatgccaggaacaatgtctcccttttgcagagctgtattgacttgttcaagaataactgatatgccttcactcagaagaaaagaaatgaatgtgaaagaaagccaagcatcacttgcacttaaatcattaccacggaagatatattagcttcaactttagtttaaaattatgtgaataaatattttgatttctacaaatcttaacatttaaccatgttggtttaaaaatattattgcttgctacttggacataactaatttttccttgtgcatttaatacctctgggcagaatccaaatactgggttctcccgtagttcgtctttagttactaagaaagggtgtaggacacattagccttctggaaacaagtagaagccatcacctggcccatgtccctacaaacccatgattgtcagggaggtgccagttacagcaggtgattcagctacttgaggtcggtaacagaccttccattcctcactgaaggtggggtttgtgtttttgttttgccctgttactccactggtagtcatctggtgtttgtactataacaacagcaagaaaatctcatttatctttatatactctttgcacctcctttttttagtcgagatataaatatttgaggggagagaaatatctacaggtatatatggaaacaaataatgtggtctgctttataagatggccagatctacattaggaaaagtataagccccctccctaatggccgctggggggtgagggcggtgtgttgtatgtctttgggtgtttgtttttttataaagcatataataaaataatcgtgctactaa

SEQ ID NO: 351515 - DNA, 2729 bp, Homo sapiens
cttgagcaccagcagaaggttgggtgatggtcaaagttttagtcaagtaaaactgcaagacagaacttgatgtcacaaattcaatgaaggaattagggcggacatgcatattcttggtttgttccaatttccaatgggtcattaatgccgaattctgatggcaataggagtagatgaaatgaaaaagggctgggtgcagtggctcacgcctgtaatcccagcactttgggaggctgaggcgggcggatcacgaggtcaggagatcgagaccatcctggctaacacagggaaaccccgtctctactaaaaatacaaaaaattagccgggtgtggtggcgggcgcctgtagtcccagctactcgggaggctgaggcaggagaatggcgtgaacccaggagtcagagcttgcagtgagccgagatcccgccactgcactccagcctgggcaacagagcaagattccgtctcaagaaaaaaaaaaaaaaggagtagatgaaaaggaagcatgccctaaagatcatcaagtaaacctgtcttgaatacgtgtagcagtttttcactgttttggatttaaaaatgttttaagttttatttttaatcgacaagtcattgtattgcatttgtggaatacagtgtgatgctttgcaggtacataatgtgaaattattagatcaagctaattaacatctttcatttttttcagtggtaatacatttgaaatttgctgtttcaatatatattattgactgtagtcaccctgttgtgcagtagatctcaaaatttattccttgagtttagctgcagccttctacccattctctttcccaccttccccagcaccccaccctcatcctctgataaccatcattctgttctctacttctaggagttcaacttaagattttacctgtaagtgagatcatgtaatgtttgtctttctgtgcctggtttattttatttggcataatgtcctctaagatccatccacattgtcccatatgagagaattttgttattttaaaaggccggatagtataatgtatctatactacattgtcttcatccactgatggataattctcaattgattttgtattttggctattgtaaataatgctgcagtgaacatggaagtacggatatcccattgagatactgatttcagttccttttatattcccagaagtgggtttgctggatcatatggtaattctatttttagttttttgaggaacctctataccattttccatggtggctgtactaatttacattcccagcaacggtgtagaagagttcacttttctctgcattgttgctaacactgatctttcatctatttgagaaaatgcattctagcaggtgtgaggtaatctcattgtggttttaatttgcatttccctaatggctagtgctgctgaacgttgtttgcatgaacctggtatgtcttcttttgagaagcattttcacaagccattggtgaagtatgtggctcaccaccacccatactccagccctgttcccagtcactggtacctagagggtgagagtgaggctgctcatcaacgtgttctccaagtcataagctgctgctctcccactcacgatgcttggtgattcagtgatgttttccacttaaagacagtgatagctgtatcaccacagttaatagatgtctgatgtgtcccagtcacagagataatacaaatgtgaggaaataatgctggtgcctgaaagcattggagaccatttgtaagaatgccatttggtagttaaagtgaacatgaaaattgtttagtttttcttggtttcataaacattttttcttcctgtagaactgataaatttcaaacggaagagagtggcagcatttagaaagaatctaattgaaatgtctgaactggaaataaaacatgccaggaacaatgtctcccttttgcagagctgtattgacttgttcaagaataactgatatgccttcactcagaagaaaagaaatgaatgtgaaagaaagccaagcatcacttgcacttaaatcattaccacggaagatatattagcttcaactttagtttaaaattatgtgaataaatattttgatttctacaaatcttaacatttaaccatgttggtttaaaaatattattgcttgctacttggacataactaatttttccttgtgcatttaatacctctgggcagaatccaaatactgggttctcccgtagttcgtctttagttactaagaaagggtgtaggacacattagccttctggaaacaagtagaagccatcacctggcccatgtccctacaaacccatgattgtcagggaggtgccagttacagcaggtgattcagctacttgaggtcggtaacagaccttccattcctcactgaaggtggggtttgtgtttttgttttgccctgttactccactggtagtcatctggtgtttgtactataacaacagcaagaaaatctcatttatctttatatactctttgcacctcctttttttagtcgagatataaatatttgaggggagagaaatatctacaggtatatatggaaacaaataatgtggtctgctttataagatggccagatctacattaggaaaagtataagccccctccctaatggccgctggggggtgagggcggtgtgttgtatgtctttgggtgtttgtttttttataaagcatataataaaataatcgtgctactaa

SEQ ID NO: 351516 - DNA, 1173 bp, Homo sapiens
atttctagcaacttttattcaatctttccaaggccctcgccttcatggaacaacgcactgatagtgtcttaagaagttacagtaagcaggatcacatttaggagcaagcaggtgagggcagaggtgctggagtgaacgtcggctctttggctggtagccttacccactgagggagaggagctgaaacatgaaatggggatgcgtggtacgttgcagttcacctgggatttgatgaagagaagggccagcttgctctggctgactttaaacctcccgtgaaaagccgtgttggtgtacttgagtcattccaggtatatggcaagttttaataattcactggtctgccttgccttttttccccacagaacaatgtctcccttttgcagagctgtattgacttgttcaagaataactgatatgccttcactcagaagaaaagaaatgaatgtgaaagaaagccaagcatcacttgcacttaaatcattaccacggaagatatattagcttcaactttagtttaaaattatgtgaataaatattttgatttctacaaatcttaacatttaaccatgttggtttaaaaatattattgcttgctacttggacataactaatttttccttgtgcatttaatacctctgggcagaatccaaatactgggttctcccgtagttcgtctttagttactaagaaagggtgtaggacacattagccttctggaaacaagtagaagccatcacctggcccatgtccctacaaacccatgattgtcagggaggtgccagttacagcaggtgattcagctacttgaggtcggtaacagaccttccattcctcactgaaggtggggtttgtgtttttgttttgccctgttactccactggtagtcatctggtgtttgtactataacaacagcaagaaaatctcatttatctttatatactctttgcacctcctttttttagtcgagatataaatatttgaggggagagaaatatctacaggtatatatggaaacaaataatgtggtctgctttataagatggccagatctacattaggaaaagtataagccccctccctaatggccgctggggggtgagggcggtgtgttgtatgtctttgggtgtttgtttttttataaagcatataataaaataatcgtgctactaa

SEQ ID NO: 351517 - DNA, 1013 bp, Homo sapiens
atttctagcaacttttattcaatctttccaaggccctcgccttcatggaacaacgcactgatagtgtcttaagaagttacagtaagcaggatcacatttaggagcaagcaggtgagggcagaggtgctggagtgaacgtcggctctttggctggtagccttacccactgagggagaggagctgaaacatgaaatggggatgcgtgaacaatgtctcccttttgcagagctgtattgacttgttcaagaataactgatatgccttcactcagaagaaaagaaatgaatgtgaaagaaagccaagcatcacttgcacttaaatcattaccacggaagatatattagcttcaactttagtttaaaattatgtgaataaatattttgatttctacaaatcttaacatttaaccatgttggtttaaaaatattattgcttgctacttggacataactaatttttccttgtgcatttaatacctctgggcagaatccaaatactgggttctcccgtagttcgtctttagttactaagaaagggtgtaggacacattagccttctggaaacaagtagaagccatcacctggcccatgtccctacaaacccatgattgtcagggaggtgccagttacagcaggtgattcagctacttgaggtcggtaacagaccttccattcctcactgaaggtggggtttgtgtttttgttttgccctgttactccactggtagtcatctggtgtttgtactataacaacagcaagaaaatctcatttatctttatatactctttgcacctcctttttttagtcgagatataaatatttgaggggagagaaatatctacaggtatatatggaaacaaataatgtggtctgctttataagatggccagatctacattaggaaaagtataagccccctccctaatggccgctggggggtgagggcggtgtgttgtatgtctttgggtgtttgtttttttataaagcatataataaaataatcgtgctactaa

SEQ ID NO: 351518 - DNA, 1524 bp, Homo sapiens
tgccatcttggactcgggctgagtaataaattccccccgcaccgaaacgcggtctttctctagacgcgtcttgctgggagagtgtccgttgcttcccgtccgtgtcgcggccctgcggttggcggcctcctcgtggagcggagcaaggccaggcggcccctgctcgagtcccgcgtcgccatggccgcggttcccgagttgctgcagcagcaggaggaggaccgcagcaagctgagatctgtatctgtggacctgaatgttgatccctcgcttcagattgacatacctgatgcgctcagtgagagagacaaagtcaaatttacagtgcacacaaagaccacactgcccacgtttcagagcccagagttttctgttacaaggcaacatgaagactttgtgtggctacatgacactcttattgaaacaacagactatgctgggcttattattccacctgctcctacgaagcccgactttgatggtcctcgagagaagatgcagaaactgggagaaggtgaagggtctatgaccaaagaagaatttgccaagatgaaacaagaactggaagctgagtatctcgctgtgtttaagaagactgtgtcctcccatgaagtctttcttcagcggctttcttctcaccctgttctcagtaaagatcgcaactttcatgttttcctggaatatgatcaggatctaagtgttaggcggaaaaatactaaagagatgtttggtggcttcttcaaaagtgtggtgaaaagtgctgatgaagtcctttttactggagttaaggaggtagatgacttctttgagcaagagaagaacttccttattaactattacaataggatcaaagattcttgtgtgaaagctgacaaaatgaccagatctcataaaaatgttgccgatgactatatccacaccgcagcctgcttacatagcctggctttagaagagcccacagtcatcaaaaagtacctattgaaggttgctgagctatttgaaaaactaaggaaagtagagggtcgagtttcatcagatgaagatttgaagctaacagagctcctccgatactacatgctcaacattgaagctgctaaggatctcttatacagacgcaccaaagccctcattgactatgagaactcaaacaaagctctggataaggcccggttaaagagcaaagacgtcaagttggctgaggcacaccagcaggagtgctgccagaaatttgaacaactttccgaatctgcaaaagaagaactgataaatttcaaacggaagagagtggcagcatttagaaagaatctaattgaaatgtctgaactggaaataaaacatgccaggagctgtattgacttgttcaagaataactgatatgccttcactcagaagaaaagaaatgaatgtgaaagaaagccaagcatcacttgcacttaaatcattaccacggaagatatattagcttcaactttagtttaaaattatgtgaataaatattttgatttctacaaatcttaacattta

SEQ ID NO: 351519 - DNA, 1525 bp, Homo sapiens
tgccatcttggactcgggctgagtaataaattccccccgcaccgaaacgcggtctttctctagacgcgtcttgctgggagagtgtccgttgcttcccgtccgtgtcgcggccctgcggttggcggcctcctcgtggagcggagcaaggccaggcggcccctgctcgagtcccgcgtcgccatggccgcggttcccgagttgctgcagcagcaggaggaggaccgcagcaagctgagatctgtatctgtggacctgaatgttgatccctcgcttcagattgacatacctgatgcgctcagtgagagagacaaagtcaaatttacagtgcacacaaagaccacactgcccacgtttcagagcccagagttttctgttacaaggcaacatgaagactttgtgtggctacatgacactcttattgaaacaacagactatgctgggcttattattccacctgctcctacgaagcccgactttgatggtcctcgagagaagatgcagaaactgggagaaggtgaagggtctatgaccaaagaagaatttgccaagatgaaacaagaactggaagctgagtatctcgctgtgtttaagaagactgtgtcctcccatgaagtctttcttcagcggctttcttctcaccctgttctcagtaaagatcgcaactttcatgttttcctggaatatgatcaggatctaagtgttaggcggaaaaatactaaagagatgtttggtggcttcttcaaaagtgtggtgaaaagtgctgatgaagtcctttttactggagttaaggaggtagatgacttctttgagcaagagaagaacttccttattaactattacaataggatcaaagattcttgtgtgaaagctgacaaaatgaccagatctcataaaaatgttgccgatgactatatccacaccgcagcctgcttacatagcctggctttagaagagcccacagtcatcaaaaagtacctattgaaggttgctgagctatttgaaaaactaaggaaagtagagggtcgagtttcatcagatgaagatttgaagctaacagagctcctccgatactacatgctcaacattgaagctgctaaggatctcttatacagacgcaccaaagccctcattgactatgagaactcaaacaaagctctggataaggcccggttaaagagcaaagacgtcaagttggctgaggcacaccagcaggagtgctgccagaaatttgaacaactttccgaatctgcaaaagaaggttgagcaggacattcttctttctgtactgtaatttgaaaataatttcaaacttagaaaagttctacaaatagtgcaaaaaacacccatgtatccttcacccagtgtcagcacttcacccctctgccttatcacttgcacatgcacagtcatcctcatggctttgcgtgcttacaaacgttacacacctggtttttctgtaccattggagattaagttgcatatgtcatgcttcttttagccctaaaaacgttgtggttatttccta

SEQ ID NO: 351520 - DNA, 1470 bp, Homo sapiens
tgccatcttggactcgggctgagtaataaattccccccgcaccgaaacgcggtctttctctagacgcgtcttgctgggagagtgtccgttgcttcccgtccgtgtcgcggccctgcggttggcggcctcctcgtggagcggagcaaggccaggcggcccctgctcgagtcccgcgtcgccatggccgcggttcccgagttgctgcagcagcaggaggaggaccgcagcaagctgagatctgtatctgtggacctgaatgttgatccctcgcttcagattgacatacctgatgcgctcagtgagagagacaaagtcaaatttacagtgcacacaaagaccacactgcccacgtttcagagcccagagttttctgttacaaggcaacatgaagactttgtgtggctacatgacactcttattgaaacaacagactatgctgggcttattattccacctgctcctacgaagcccgactttgatggtcctcgagagaagatgcagaaactgggagaaggtgaagggtctatgaccaaagaagaatttgccaagatgaaacaagaactggaagctgagtatctcgctgtgtttaagaagactgtgtcctcccatgaagtctttcttcagcggctttcttctcaccctgttctcagtaaagatcgcaactttcatgttttcctggaatatgatcaggatctaagtgttaggcggaaaaatactaaagagatgtttggtggcttcttcaaaagtgtggtgaaaagtgctgatgaagtcctttttactggagttaaggaggtagatgacttctttgagcaagagaagaacttccttattaactattacaataggatcaaagattcttgtgtgaaagctgacaaaatgaccagatctcataaaaatgttgccgatgactatatccacaccgcagcctgcttacatagcctggctttagaagagcccacagtcatcaaaaagtacctattgaaggttgctgagctatttgaaaaactaaggaaagtagagggtcgagtttcatcagatgaagatttgaagctaacagagctcctccgatactacatgctcaacattgaagctgctaaggatctcttatacagacgcaccaaagccctcattgactatgagaactcaaacaaagctctggataaggcccggttaaagagcaaagacgtcaagttggctgaggcacaccagcaggagtgctgccagaaatttgaacacttcggatttgaaagaagactgattaattcaacggagagagtggaggattagaaagattatggatgtgtgactggataaaatgcagaaaagttcctttgggagggatggtggtaaaatatgattgctctcgaagaagaagtggggggaagcgttggtaattaacggaatatgtcttgtaattgtgttttgtttccacaaaagtttggggggagagaggggggtgctggggggtag

SEQ ID NO: 351521 - DNA, 1490 bp, Homo sapiens
tgccatcttggactcgggctgagtaataaattccccccgcaccgaaacgcggtctttctctagacgcgtcttgctgggagagtgtccgttgcttcccgtccgtgtcgcggccctgcggttggcggcctcctcgtggagcggagcaaggccaggcggcccctgctcgagtcccgcgtcgccatggccgcggttcccgagttgctgcagcagcaggaggaggaccgcagcaagctgagatctgtatctgtggacctgaatgttgatccctcgcttcagattgacatacctgatgcgctcagtgagagagacaaagtcaaatttacagtgcacacaaagaccacactgcccacgtttcagagcccagagttttctgttacaaggcaacatgaagactttgtgtggctacatgacactcttattgaaacaacagactatgctgggcttattattccacctgctcctacgaagcccgactttgatggtcctcgagagaagatgcagaaactgggagaaggtgaagggtctatgaccaaagaagaatttgccaagatgaaacaagaactggaagctgagtatctcgctgtgtttaagaagactgtgtcctcccatgaagtctttcttcagcggctttcttctcaccctgttctcagtaaagatcgcaactttcatgttttcctggaatatgatcaggatctaagtgttaggcggaaaaatactaaagagatgtttggtggcttcttcaaaagtgtggtgaaaagtgctgatgaagtcctttttactggagttaaggaggtagatgacttctttgagcaagagaagaacttccttattaactattacaataggatcaaagattcttgtgtgaaagctgacaaaatgaccagatctcataaaaatgttgccgatgactatatccacaccgcagcctgcttacatagcctggctttagaagagcccacagtcatcaaaaaagtacctattggaaggttggttgagcctatttgaaaaacttaaggacagttagagggtcgagttttcatcacaatgacgcattgcaggttaaagaaggtccttccgatactacatggttcaacattgagagccgcgcaaggagcccatatatacagacgcccacacaggcgcgatagaggatagggaacccaacacaagagcccgggggcaaagagcccccgggtaaaaggacacagacgacgtcaaccgggtcgtggtaggaagcaccccccccgaggagggcgggctccccacacatgtgatgacacgcctgccggccaccgccgcaccaaaacgaacactattcaaccagcggaccagcgagcgggcaccaccgaacaacatgacagcgtcgcagggcggagcaacaaaacggcgagcaggaagacaccccggaaccgacgatatggtcgcacacaacgatctcttcccaaccacagagaaacagagcggctagcacggccatagatctcaccacg

SEQ ID NO: 351522 - DNA, 498 bp, Homo sapiens
agtacctcttaggacctaatctaaacctattacttcccaaaggtccacctctaagtagccatcacctggcccatgtccctacaaacccatgattgtcagggaggtgccagttacagcaggtgattcagctacttgaggtcggtaacagaccttccattcctcactgaaggtggggtttgtgtttttgttttgccctgttactccactggtagtcatctggtgtttgtactataacaacagcaagaaaatctcatttatctttatatactctttgcacctcctttttttagtcgagatataaatatttgaggggagagaaatatctacaggtatatatggaaacaaataatgtggtctgctttataagatggccagatctacattaggaaaagtataagccccctccctaatggccgctggggggtgagggcggtgtgttgtatgtctttgggtgtttgtttttttataaagcatataataaaataatcgtgctactaa

SEQ ID NO: 351523 - DNA, 2430 bp, Homo sapiens
agtttatccattcgctgagtgcgctgcactgaccttcttccaagcctcagttcctgttctaggaacttgaggctatgtagcctgaaaatgccctgcagtctgcagtgttctactgtgaactgcttgtgtgttggcaggctaccggtaagaatggttggtgtcagcagggacggggccctctgagacccatctcacaaagatgagtggtgaaaatctgatcacttgctgcagccctttagttttttattaagccgatgcctgagtagctttaatagctattagctatgttagtagactgagatcttctgttagaagtctttagttctgttttccttgggggactaagaaattatattgcaggcctgaattacaggaaggggagaaccaatggctagggaatgagagccaatacctgtaaaagcagagttgggctgggcgcggtggctcacgcctgtaatcccaggactttgggaggctgaggcgggcagatcacgaggtcaggagttagagaccagcctgaccaacatggtgaaaccctgtctctactaaaaatacaaaaattagctgggtggggtggtgggcgcctgtaatcccagctactcaggaggctgaggcaggagtatctgggagaattgaaccccgggggtggaggtcgcggtgagctgagactgtgccactgcactccagcctgggcaacagagtgagactccgtctccaaaaaaaaaaaaaaaaagcagagttaatatattgcttatagttagttgaaccagttgtttctcacacaccagtgccataatctaaagctgagattgaacacagataggtacgtattagttatcttcaggatggcagagaatagtaacaattcggagcaccaatgggaacattgtttcctgagagttcaaacagtaacaaagtagcatgtgtttcctaaatatgtatcatgtgaatctttaatatttgtggacattaatacaaatctagagtgtgacagaacatctttgaattttatattctcacttaacaaatattggactaggcaaggtgtggatatctttccagctgaaaatctgatcaaggaggcaggcttcttggctccatgctaagaatcatcgatgatttgtcatattggccctcttgctggcaaaatcttagtttcttaggcagtggaatgaaacataacaaaacaaaatccctagaggctaggaacagatagtttgaaagagaagacactgtagcatgtgctgcttaagtacatatcttctgcttttggaatggaaactaggaagtcatttaaatagatatgtgtcttttttatcctatctgtagtaatttatgtgggatattcaaataggaaaatacaggctagcactgcatattgtatccatgtcttacattgtatacaaatgactattagatttaaatgactgttcaactagccccaatctaacagatcagagattgtggagtttcacttctttggactgtgtctttttcattttggcactgagtctgcagtcaccataaccacttagaaaaaactgtattttttctgttctcctggtgggttctgagttttagaatcttgccttttgtgttgttcagtcatccaggtgccctttgccctctgtaagccattaaaccttttgaagaggcagctttgctggtagagtcgtaagtgaaatttggaccaaaagtgagtttatgaagactggtgggcaggagctcaacagctgcagggttgtcctgcagccagtgtctgatgtgccccagctgggaagctgatgaatagctgagatctgtatctgtggacctgaatgttgatccctcgcttcagattgacatacctgatgcgctcagtgagagagacaaagtcaaatttacagtgcacacaaagaccacactgcccacgtttcagagcccagagttttctgttacaaggcaacatgaagactttgtgtggctacatgacactcttattgaaacaacagactatgctgggcttattccacaggagtggagtggttgtctcctgtggaccattacagcaggtgattcagctacttgaggtcggtaacagaccttccattcctcactgaaggtggggtttgtgtttttgttttgccctgttactccactggtagtcatctggtgtttgtactataacaacagcaagaaaatctcatttatctttatatactctttgcacctcctttttttagtcgagatataaatatttgaggggagagaaatatctacaggtatatatggaaacaaataatgtggtctgctttataagatggccagatctacattaggaaaagtataagccccctccctaatggccgctggggggtgagggcggtgtgttgtatgtctttgggtgtttgtttttttataaagcatataataaaataatcgtgctactaa

SEQ ID NO: 351524 - DNA, 1912 bp, Homo sapiens
tgccatcttggactcgggctgagtaataaattccccccgcaccgaaacgcggtctttctctagacgcgtcttgctgggagagtgtccgttgcttcccgtccgtgtcgcggccctgcggttggcggcctcctcgtggagcggagcaagggtaggccccacgtggcgtctttgcccggctccaagatggacggcagcggggactgggaggctgctctgggggagcacgtggcgccctgctcgcctgctcccggggcagctgggatggtggcggagtccggaggcctcctgccgccgtcgggcagggaggccggcggaggcggggccgtggccgcccccgagaggcgcccaggcggcggcggcggcggcccagcttcttctttcctcgcacagccaggcggcccctgctcgagtcccgcgtcgccatggccgcggttcccgagttgctgcagcagcaggaggaggaccgcagcaaggtgaggtcctcccagcctcagactcctgggcgggcggccctgcgagctccggggtcgctgcattctttcccttgcgcgtccataggccgtggctgctcgccgccatccccagcgcgggaagcacccgtgagacccgggcggcccctctccctggtcttcactgaaggctgccccggggaatccctgtggatgtcccggattctattaggacagaaccagagacgcgggaccttagccccagctcaggcgccggtgccgagcggacttggagagatgatctctggagaccccggaatgttctttttaaaactttcctcggcttcgtggtgaccagtaggtgaacgtgaaattgacttaacatgcgacagaccagtttggtttgttgcccccaaaataccctccttccccccaccttttactgagaagacttttttgggggggggcccaaacaacttgggaaattgcatcaagcgtccgaacatgctgcttacaactttagaaacgcaaaatgcgttgttgtgggagttgtgtaatttttagtaggtgctcaaatacttgctgaacttggtgtctatttttaagtcttgcccattgatgtaaactgtccctaggtcacgtgtatcttgaggtctaaaagattatttatgcaataaattgaaattcccatagccaattaaagattcagacgagcctccactctttttcattggttctttaaatttgcctcggtagctttgcgatgcatggtttgcgagcaacctttcttgcagaatcgtcaacgtaagtttttctgaccgatgaaaaagaacctctaaaaatacaaggctctcttaaaatgtaatttggagccgtcttaacttacacatttcttgagaagttaaaggcacctccatagagaaacttgttcatctagtaagtaaataccagagtttcaaagcggctggattgttccaacaagggtatcattgcattaattattaaaatagagctttctatacaggagggtgttgtttagagtggttttttttttgaaagttctttattactaaaacaaagtggaaacttgagaccacgattctttgtaaaacattataaaggtacttttctccataaagggtagataatggattgggattttggtagcattttattttttctttctttctggtacattcttttagctgtcttgattcggagtcagctaggtaaaaggactcaattgcttcaccccactctctggtagtacagtatattgcagctggtttttaaaatgacttccaccaccctgatcctccagcaaaattggagaatggttatgaaggccatttcctgcctgttttagaggctacagaaactgtccgtatctgtagcgaagagagttacatgacattgttttcctttttacattacaggaataaagagacaataaaaataaataa

SEQ ID NO: 351525 - DNA, 523 bp, Homo sapiens
agctttgctggtagagtcgtaagtgaaatttggaccaaaagtgagtttatgaagactggtgggcaggagctcaacagctgcagggttgtcctgcagccagtgtctgatgtgccccagctgggaagctgatgaataggtgaggaaatgcacagggattccgtaactacttttctccttttagagaagtgccttggctctcttaccaaaagcactgcgattttttaaaacagttgaaaatgtgctttccaaatgaagccgtgcttgtttaccgtgaaggctgattataatccgtattgtaaggattgacctggtagggaagtacatcatgaactgaaactttacctaaaactttggatacgtgatccagtagtttcaagggaaatctacaaaagtcaggtttttaaaaattttttaaaaattctgaaatagagatgaggtctcaccgttttgctcaggctgggttgttgggtttgttttttatgtgtagtttttttttttttttttggagactcgctctgttgcc

SEQ ID NO: 351526 - DNA, 1151 bp, Homo sapiens
tgccatcttggactcgggctgagtaataaattccccccgcaccgaaacgcggtctttctctagacgcgtcttgctgggagagtgtccgttgcttcccgtccgtgtcgcggccctgcggttggcggcctcctcgtggagcggagcaagggtaggccccacgtggcgtctttgcccggctccaagatggacggcagcggggactgggaggctgctctgggggagcacgtggcgccctgctcgcctgctcccggggcagctgggatggtggcggagtccggaggcctcctgccgccgtcgggcagggaggccggcggaggcggggccgtggccgcccccgagaggcgcccaggcggcggcggcggcggcccagcttcttctttcctcgcacagccaggcggcccctgctcgagtcccgcgtcgccatggccgcggttcccgagttgctgcagcagcaggaggaggaccgcagcaaggtgaggtcctcccagcctcagactcctgggcgggcggccctgcgagctccggggtcgctgcattctttcccttgcgcgtccataggccgtggctgctcgccgccatccccagcgcgggaagcacccgtgagacccgggcggcccctctccctggtcttcactgaaggctgccccggggaatccctgtggatgtcccggattctattaggacagaaccagagacgcgggaccttagccccagctcaggcgccggtgccgagcggacttggagagatgatctctggagaccccggaatgttctttttaaaactttcctcggcttcgtggtgaccagtaggtgaacgtgaaattgacttaacatgcgacagaccagtttggtttgttgcccccaaaataccctccttccccccaccttttactgagaagacttttttgggggggggcccaaacaacttgggaaattgcatcaagcgtccgaacatgctgcttacaactttagaaacgcaaaatgcgttgttgtgggagttgtgtaatttttagtaggtgctcaaatacttgctgaacttggtgtctatttttaagtcttgcccattgatgtaaactgtccctaggtcacgtgtatcttgaggtctaaaagattatttatgcaataaattgaaattcccatagccaattaaa

SEQ ID NO: 351527 - DNA, 481 bp, Homo sapiens
taccccccgcccccaacaaaaaatggcaattttctatgtttcaacctaatagaaaaaaatggagttgtcaactgtgaaaatgcagaagaccgtgggaggagccaatttggaagagtggatgaacatgctgagcttgagagtctgcagtcctccaaacggtgccgtctcgtaggccagtggagatgagtctggttctcagagacctctgttctggggtgcttaaatccatgtgactgggttcgatcaccagggctgggagtgtagatagatgaaatcaagctcggatccttgaggcactctgacatttagaggggagaagagcagaaaactagctaaggagagtcagaagaaaagaaatgaatgtgaaagaaagccaagcatcacttgcacttaaatcattaccacggaagatatattagcttcaactttagtttaaaattatgtgaataaatattttgatttctacaaatcttaacattta

SEQ ID NO: 351528 - DNA, 3713 bp, Homo sapiens
agtttatccattcgctgagtgcgctgcactgaccttcttccaagcctcagttcctgttctaggaacttgaggctatgtagcctgaaaatgccctgcagtctgcagtgttctactgtgaactgcttgtgtgttggcaggctaccggtaagaatggttggtgtcagcagggacggggccctctgagacccatctcacaaagatgagtggtgaaaatctgatcacttgctgcagccctttagttttttattaagccgatgcctgagtagctttaatagctattagctatgttagtagactgagatcttctgttagaagtctttagttctgttttccttgggggactaagaaattatattgcaggcctgaattacaggaaggggagaaccaatggctagggaatgagagccaatacctgtaaaagcagagttgggctgggcgcggtggctcacgcctgtaatcccaggactttgggaggctgaggcgggcagatcacgaggtcaggagttagagaccagcctgaccaacatggtgaaaccctgtctctactaaaaatacaaaaattagctgggtggggtggtgggcgcctgtaatcccagctactcaggaggctgaggcaggagtatctgggagaattgaaccccgggggtggaggtcgcggtgagctgagactgtgccactgcactccagcctgggcaacagagtgagactccgtctccaaaaaaaaaaaaaaaaagcagagttaatatattgcttatagttagttgaaccagttgtttctcacacaccagtgccataatctaaagctgagattgaacacagataggtacgtattagttatcttcaggatggcagagaatagtaacaattcggagcaccaatgggaacattgtttcctgagagttcaaacagtaacaaagtagcatgtgtttcctaaatatgtatcatgtgaatctttaatatttgtggacattaatacaaatctagagtgtgacagaacatctttgaattttatattctcacttaacaaatattggactaggcaaggtgtggatatctttccagctgaaaatctgatcaaggaggcaggcttcttggctccatgctaagaatcatcgatgatttgtcatattggccctcttgctggcaaaatcttagtttcttaggcagtggaatgaaacataacaaaacaaaatccctagaggctaggaacagatagtttgaaagagaagacactgtagcatgtgctgcttaagtacatatcttctgcttttggaatggaaactaggaagtcatttaaatagatatgtgtcttttttatcctatctgtagtaatttatgtgggatattcaaataggaaaatacaggctagcactgcatattgtatccatgtcttacattgtatacaaatgactattagatttaaatgactgttcaactagccccaatctaacagatcagagattgtggagtttcacttctttggactgtgtctttttcattttggcactgagtctgcagtcaccataaccacttagaaaaaactgtattttttctgttctcctggtgggttctgagttttagaatcttgccttttgtgttgttcagtcatccaggtgccctttgccctctgtaagccattaaaccttttgaagaggcagctttgctggtagagtcgtaagtgaaatttggaccaaaagtgagtttatgaagactggtgggcaggagctcaacagctgcagggttgtcctgcagccagtgtctgatgtgccccagctgggaagctgatgaatagctgagatctgtatctgtggacctgaatgttgatccctcgcttcagattgacatacctgatgcgctcagtgagagagacaaagtcaaatttacagtgcacacaaagaccacactgcccacgtttcagagcccagagttttctgttacaaggcaacatgaagactttgtgtggctacatgacactcttattgaaacaacagactatgctgggcttattattccacctgctcctacgaagcccgactttgatggtcctcgagagaagatgcagaaactgggagaaggtgaagggtctatgaccaaagaagaatttgccaagatgaaacaagaactggaagctgagtatctcgctgtgtttaagaagactgtgtcctcccatgaagtctttcttcagcggctttcttctcaccctgttctcagtaaagatcgcaactttcatgttttcctggaatatgatcaggatctaagtgttaggcggaaaaatactaaagagatgtttggtggcttcttcaaaagtgtggtgaaaagtgctgatgaagtcctttttactggagttaaggaggtagatgacttctttgagcaagagaagaacttccttattaactattacaataggatcaaagattcttgtgtgaaagctgacaaaatgaccagatctcataaaaatgttgccgatgactatatccacaccgcagcctgcttacatagcctggctttagaagagcccacagtcatcaaaaagtacctattgaaggttgctgagctatttgaaaaactaaggaaagtagagggtcgagtttcatcagatgaagatttgaagctaacagagctcctccgatactacatgctcaacattgaagctgctaaggatctcttatacagacgcaccaaagccctcattgactatgagaactcaaacaaagctctggataaggcccggttaaagagcaaagacgtcaagttggctgaggcacaccagcaggagtgctgccagaaatttgaacaactttccgaatctgcaaaagaagaactgataaatttcaaacggaagagagtggcagcatttagaaagaatctaattgaaatgtctgaactggaaataaaacatgccaggaacaatgtctcccttttgcagagctgtattgacttgttcaagaataactgatatgccttcactcagaagaaaagaaatgaatgtgaaagaaagccaagcatcacttgcacttaaatcattaccacggaagatatattagcttcaactttagtttaaaattatgtgaataaatattttgatttctacaaatcttaacatttaaccatgttggtttaaaaatattattgcttgctacttggacataactaatttttccttgtgcatttaatacctctgggcagaatccaaatactgggttctcccgtagttcgtctttagttactaagaaagggtgtaggacacattagccttctggaaacaagtagaagccatcacctggcccatgtccctacaaacccatgattgtcagggaggtgccagttacagcaggtgattcagctacttgaggtcggtaacagaccttccattcctcactgaaggtggggtttgtgtttttgttttgccctgttactccactggtagtcatctggtgtttgtactataacaacagcaagaaaatctcatttatctttatatactctttgcacctcctttttttagtcgagatataaatatttgaggggagagaaatatctacaggtatatatggaaacaaataatgtggtctgctttataagatggccagatctacattaggaaaagtataagccccctccctaatggccgctggggggtgagggcggtgtgttgtatgtctttgggtgtttgtttttttataaagcatataataaaataatcgtgctactaa

SEQ ID NO: 351529 - DNA, 3825 bp, Homo sapiens
agtttatccattcgctgagtgcgctgcactgaccttcttccaagcctcagttcctgttctaggaacttgaggctatgtagcctgaaaatgccctgcagtctgcagtgttctactgtgaactgcttgtgtgttggcaggctaccggtaagaatggttggtgtcagcagggacggggccctctgagacccatctcacaaagatgagtggtgaaaatctgatcacttgctgcagccctttagttttttattaagccgatgcctgagtagctttaatagctattagctatgttagtagactgagatcttctgttagaagtctttagttctgttttccttgggggactaagaaattatattgcaggcctgaattacaggaaggggagaaccaatggctagggaatgagagccaatacctgtaaaagcagagttgggctgggcgcggtggctcacgcctgtaatcccaggactttgggaggctgaggcgggcagatcacgaggtcaggagttagagaccagcctgaccaacatggtgaaaccctgtctctactaaaaatacaaaaattagctgggtggggtggtgggcgcctgtaatcccagctactcaggaggctgaggcaggagtatctgggagaattgaaccccgggggtggaggtcgcggtgagctgagactgtgccactgcactccagcctgggcaacagagtgagactccgtctccaaaaaaaaaaaaaaaaagcagagttaatatattgcttatagttagttgaaccagttgtttctcacacaccagtgccataatctaaagctgagattgaacacagataggtacgtattagttatcttcaggatggcagagaatagtaacaattcggagcaccaatgggaacattgtttcctgagagttcaaacagtaacaaagtagcatgtgtttcctaaatatgtatcatgtgaatctttaatatttgtggacattaatacaaatctagagtgtgacagaacatctttgaattttatattctcacttaacaaatattggactaggcaaggtgtggatatctttccagctgaaaatctgatcaaggaggcaggcttcttggctccatgctaagaatcatcgatgatttgtcatattggccctcttgctggcaaaatcttagtttcttaggcagtggaatgaaacataacaaaacaaaatccctagaggctaggaacagatagtttgaaagagaagacactgtagcatgtgctgcttaagtacatatcttctgcttttggaatggaaactaggaagtcatttaaatagatatgtgtcttttttatcctatctgtagtaatttatgtgggatattcaaataggaaaatacaggctagcactgcatattgtatccatgtcttacattgtatacaaatgactattagatttaaatgactgttcaactagccccaatctaacagatcagagattgtggagtttcacttctttggactgtgtctttttcattttggcactgagtctgcagtcaccataaccacttagaaaaaactgtattttttctgttctcctggtgggttctgagttttagaatcttgccttttgtgttgttcagtcatccaggtgccctttgccctctgtaagccattaaaccttttgaagaggcagctttgctggtagagtcgtaagtgaaatttggaccaaaagtgagtttatgaagactggtgggcaggagctcaacagctgcagggttgtcctgcagccagtgtctgatgtgccccagctgggaagctgatgaatagctgagatctgtatctgtggacctgaatgttgatccctcgcttcagattgacatacctgatgcgctcagtgagagagacaaagtcaaatttacagtgcacacaaagaccacactgcccacgtttcagagcccagagttttctgttacaaggcaacatgaagactttgtgtggctacatgacactcttattgaaacaacagactatgctgggcttattccacaggagtggagtggttgtctcctgtggaccagcaagagtagaatgaggcaccaactagaaaacatcgctgctgggacaagaggctcatgagttcctgcctctgctgcagattccacctgctcctacgaagcccgactttgatggtcctcgagagaagatgcagaaactgggagaaggtgaagggtctatgaccaaagaagaatttgccaagatgaaacaagaactggaagctgagtatctcgctgtgtttaagaagactgtgtcctcccatgaagtctttcttcagcggctttcttctcaccctgttctcagtaaagatcgcaactttcatgttttcctggaatatgatcaggatctaagtgttaggcggaaaaatactaaagagatgtttggtggcttcttcaaaagtgtggtgaaaagtgctgatgaagtcctttttactggagttaaggaggtagatgacttctttgagcaagagaagaacttccttattaactattacaataggatcaaagattcttgtgtgaaagctgacaaaatgaccagatctcataaaaatgttgccgatgactatatccacaccgcagcctgcttacatagcctggctttagaagagcccacagtcatcaaaaagtacctattgaaggttgctgagctatttgaaaaactaaggaaagtagagggtcgagtttcatcagatgaagatttgaagctaacagagctcctccgatactacatgctcaacattgaagctgctaaggatctcttatacagacgcaccaaagccctcattgactatgagaactcaaacaaagctctggataaggcccggttaaagagcaaagacgtcaagttggctgaggcacaccagcaggagtgctgccagaaatttgaacaactttccgaatctgcaaaagaagaactgataaatttcaaacggaagagagtggcagcatttagaaagaatctaattgaaatgtctgaactggaaataaaacatgccaggaacaatgtctcccttttgcagagctgtattgacttgttcaagaataactgatatgccttcactcagaagaaaagaaatgaatgtgaaagaaagccaagcatcacttgcacttaaatcattaccacggaagatatattagcttcaactttagtttaaaattatgtgaataaatattttgatttctacaaatcttaacatttaaccatgttggtttaaaaatattattgcttgctacttggacataactaatttttccttgtgcatttaatacctctgggcagaatccaaatactgggttctcccgtagttcgtctttagttactaagaaagggtgtaggacacattagccttctggaaacaagtagaagccatcacctggcccatgtccctacaaacccatgattgtcagggaggtgccagttacagcaggtgattcagctacttgaggtcggtaacagaccttccattcctcactgaaggtggggtttgtgtttttgttttgccctgttactccactggtagtcatctggtgtttgtactataacaacagcaagaaaatctcatttatctttatatactctttgcacctcctttttttagtcgagatataaatatttgaggggagagaaatatctacaggtatatatggaaacaaataatgtggtctgctttataagatggccagatctacattaggaaaagtataagccccctccctaatggccgctggggggtgagggcggtgtgttgtatgtctttgggtgtttgtttttttataaagcatataataaaataatcgtgctactaa

SEQ ID NO: 351530 - DNA, 2506 bp, Homo sapiens
tgccatcttggactcgggctgagtaataaattccccccgcaccgaaacgcggtctttctctagacgcgtcttgctgggagagtgtccgttgcttcccgtccgtgtcgcggccctgcggttggcggcctcctcgtggagcggagcaagggtaggccccacgtggcgtctttgcccggctccaagatggacggcagcggggactgggaggctgctctgggggagcacgtggcgccctgctcgcctgctcccggggcagctgggatggtggcggagtccggaggcctcctgccgccgtcgggcagggaggccggcggaggcggggccgtggccgcccccgagaggcgcccaggcggcggcggcggcggcccagcttcttctttcctcgcacagccaggcggcccctgctcgagtcccgcgtcgccatggccgcggttcccgagttgctgcagcagcaggaggaggaccgcagcaagctgagatctgtatctgtggacctgaatgttgatccctcgcttcagattgacatacctgatgcgctcagtgagagagacaaagtcaaatttacagtgcacacaaagaccacactgcccacgtttcagagcccagagttttctgttacaaggcaacatgaagactttgtgtggctacatgacactcttattgaaacaacagactatgctgggcttattccacaggagtggagtggttgtctcctgtggaccagcaagagtagaatgaggcaccaactagaaaacatcgctgctgggacaagaggctcatgagttcctgcctctgctgcagattccacctgctcctacgaagcccgactttgatggtcctcgagagaagatgcagaaactgggagaaggtgaagggtctatgaccaaagaagaatttgccaagatgaaacaagaactggaagctgagtatctcgctgtgtttaagaagactgtgtcctcccatgaagtctttcttcagcggctttcttctcaccctgttctcagtaaagatcgcaactttcatgttttcctggaatatgatcaggatctaagtgttaggcggaaaaatactaaagagatgtttggtggcttcttcaaaagtgtggtgaaaagtgctgatgaagtcctttttactggagttaaggaggtagatgacttctttgagcaagagaagaacttccttattaactattacaataggatcaaagattcttgtgtgaaagctgacaaaatgaccagatctcataaaaatgttgccgatgactatatccacaccgcagcctgcttacatagcctggctttagaagagcccacagtcatcaaaaagtacctattgaaggttgctgagctatttgaaaaactaaggaaagtagagggtcgagtttcatcagatgaagatttgaagctaacagagctcctccgatactacatgctcaacattgaagctgctaaggatctcttatacagacgcaccaaagccctcattgactatgagaactcaaacaaagctctggataaggcccggttaaagagcaaagacgtcaagttggctgaggcacaccagcaggagtgctgccagaaatttgaacaactttccgaatctgcaaaagaagaactgataaatttcaaacggaagagagtggcagcatttagaaagaatctaattgaaatgtctgaactggaaataaaacatgccaggaacaatgtctcccttttgcagagctgtattgacttgttcaagaataactgatatgccttcactcagaagaaaagaaatgaatgtgaaagaaagccaagcatcacttgcacttaaatcattaccacggaagatatattagcttcaactttagtttaaaattatgtgaataaatattttgatttctacaaatcttaacatttaaccatgttggtttaaaaatattattgcttgctacttggacataactaatttttccttgtgcatttaatacctctgggcagaatccaaatactgggttctcccgtagttcgtctttagttactaagaaagggtgtaggacacattagccttctggaaacaagtagaagccatcacctggcccatgtccctacaaacccatgattgtcagggaggtgccagttacagcaggtgattcagctacttgaggtcggtaacagaccttccattcctcactgaaggtggggtttgtgtttttgttttgccctgttactccactggtagtcatctggtgtttgtactataacaacagcaagaaaatctcatttatctttatatactctttgcacctcctttttttagtcgagatataaatatttgaggggagagaaatatctacaggtatatatggaaacaaataatgtggtctgctttataagatggccagatctacattaggaaaagtataagccccctccctaatggccgctggggggtgagggcggtgtgttgtatgtctttgggtgtttgtttttttataaagcatataataaaataatcgtgctactaa

SEQ ID NO: 351531 - DNA, 3602 bp, Homo sapiens
agtttatccattcgctgagtgcgctgcactgaccttcttccaagcctcagttcctgttctaggaacttgaggctatgtagcctgaaaatgccctgcagtctgcagtgttctactgtgaactgcttgtgtgttggcaggctaccggtaagaatggttggtgtcagcagggacggggccctctgagacccatctcacaaagatgagtggtgaaaatctgatcacttgctgcagccctttagttttttattaagccgatgcctgagtagctttaatagctattagctatgttagtagactgagatcttctgttagaagtctttagttctgttttccttgggggactaagaaattatattgcaggcctgaattacaggaaggggagaaccaatggctagggaatgagagccaatacctgtaaaagcagagttgggctgggcgcggtggctcacgcctgtaatcccaggactttgggaggctgaggcgggcagatcacgaggtcaggagttagagaccagcctgaccaacatggtgaaaccctgtctctactaaaaatacaaaaattagctgggtggggtggtgggcgcctgtaatcccagctactcaggaggctgaggcaggagtatctgggagaattgaaccccgggggtggaggtcgcggtgagctgagactgtgccactgcactccagcctgggcaacagagtgagactccgtctccaaaaaaaaaaaaaaaaagcagagttaatatattgcttatagttagttgaaccagttgtttctcacacaccagtgccataatctaaagctgagattgaacacagataggtacgtattagttatcttcaggatggcagagaatagtaacaattcggagcaccaatgggaacattgtttcctgagagttcaaacagtaacaaagtagcatgtgtttcctaaatatgtatcatgtgaatctttaatatttgtggacattaatacaaatctagagtgtgacagaacatctttgaattttatattctcacttaacaaatattggactaggcaaggtgtggatatctttccagctgaaaatctgatcaaggaggcaggcttcttggctccatgctaagaatcatcgatgatttgtcatattggccctcttgctggcaaaatcttagtttcttaggcagtggaatgaaacataacaaaacaaaatccctagaggctaggaacagatagtttgaaagagaagacactgtagcatgtgctgcttaagtacatatcttctgcttttggaatggaaactaggaagtcatttaaatagatatgtgtcttttttatcctatctgtagtaatttatgtgggatattcaaataggaaaatacaggctagcactgcatattgtatccatgtcttacattgtatacaaatgactattagatttaaatgactgttcaactagccccaatctaacagatcagagattgtggagtttcacttctttggactgtgtctttttcattttggcactgagtctgcagtcaccataaccacttagaaaaaactgtattttttctgttctcctggtgggttctgagttttagaatcttgccttttgtgttgttcagtcatccaggtgccctttgccctctgtaagccattaaaccttttgaagaggcagctttgctggtagagtcgtaagtgaaatttggaccaaaagtgagtttatgaagactggtgggcaggagctcaacagctgcagggttgtcctgcagccagtgtctgatgtgccccagctgggaagctgatgaatagctgagatctgtatctgtggacctgaatgttgatccctcgcttcagattgacatacctgatgcgctcagtgagagagacaaagtcaaatttacagtgcacacaaagattccacctgctcctacgaagcccgactttgatggtcctcgagagaagatgcagaaactgggagaaggtgaagggtctatgaccaaagaagaatttgccaagatgaaacaagaactggaagctgagtatctcgctgtgtttaagaagactgtgtcctcccatgaagtctttcttcagcggctttcttctcaccctgttctcagtaaagatcgcaactttcatgttttcctggaatatgatcaggatctaagtgttaggcggaaaaatactaaagagatgtttggtggcttcttcaaaagtgtggtgaaaagtgctgatgaagtcctttttactggagttaaggaggtagatgacttctttgagcaagagaagaacttccttattaactattacaataggatcaaagattcttgtgtgaaagctgacaaaatgaccagatctcataaaaatgttgccgatgactatatccacaccgcagcctgcttacatagcctggctttagaagagcccacagtcatcaaaaagtacctattgaaggttgctgagctatttgaaaaactaaggaaagtagagggtcgagtttcatcagatgaagatttgaagctaacagagctcctccgatactacatgctcaacattgaagctgctaaggatctcttatacagacgcaccaaagccctcattgactatgagaactcaaacaaagctctggataaggcccggttaaagagcaaagacgtcaagttggctgaggcacaccagcaggagtgctgccagaaatttgaacaactttccgaatctgcaaaagaagaactgataaatttcaaacggaagagagtggcagcatttagaaagaatctaattgaaatgtctgaactggaaataaaacatgccaggaacaatgtctcccttttgcagagctgtattgacttgttcaagaataactgatatgccttcactcagaagaaaagaaatgaatgtgaaagaaagccaagcatcacttgcacttaaatcattaccacggaagatatattagcttcaactttagtttaaaattatgtgaataaatattttgatttctacaaatcttaacatttaaccatgttggtttaaaaatattattgcttgctacttggacataactaatttttccttgtgcatttaatacctctgggcagaatccaaatactgggttctcccgtagttcgtctttagttactaagaaagggtgtaggacacattagccttctggaaacaagtagaagccatcacctggcccatgtccctacaaacccatgattgtcagggaggtgccagttacagcaggtgattcagctacttgaggtcggtaacagaccttccattcctcactgaaggtggggtttgtgtttttgttttgccctgttactccactggtagtcatctggtgtttgtactataacaacagcaagaaaatctcatttatctttatatactctttgcacctcctttttttagtcgagatataaatatttgaggggagagaaatatctacaggtatatatggaaacaaataatgtggtctgctttataagatggccagatctacattaggaaaagtataagccccctccctaatggccgctggggggtgagggcggtgtgttgtatgtctttgggtgtttgtttttttataaagcatataataaaataatcgtgctactaa

SEQ ID NO: 351532 - DNA, 2181 bp, Homo sapiens
tgccatcttggactcgggctgagtaataaattccccccgcaccgaaacgcggtctttctctagacgcgtcttgctgggagagtgtccgttgcttcccgtccgtgtcgcggccctgcggttggcggcctcctcgtggagcggagcaaggctgagatctgtatctgtggacctgaatgttgatccctcgcttcagattgacatacctgatgcgctcagtgagagagacaaagtcaaatttacagtgcacacaaagaccacactgcccacgtttcagagcccagagttttctgttacaaggcaacatgaagactttgtgtggctacatgacactcttattgaaacaacagactatgctgggcttattccacaggagtggagtggttgtctcctgtggaccagcaagagtagaatgaggcaccaactagaaaacatcgctgctgggacaagaggctcatgagttcctgcctctgctgcagattccacctgctcctacgaagcccgactttgatggtcctcgagagaagatgcagaaactgggagaaggtgaagggtctatgaccaaagaagaatttgccaagatgaaacaagaactggaagctgagtatctcgctgtgtttaagaagactgtgtcctcccatgaagtctttcttcagcggctttcttctcaccctgttctcagtaaagatcgcaactttcatgttttcctggaatatgatcaggatctaagtgttaggcggaaaaatactaaagagatgtttggtggcttcttcaaaagtgtggtgaaaagtgctgatgaagtcctttttactggagttaaggaggtagatgacttctttgagcaagagaagaacttccttattaactattacaataggatcaaagattcttgtgtgaaagctgacaaaatgaccagatctcataaaaatgttgccgatgactatatccacaccgcagcctgcttacatagcctggctttagaagagcccacagtcatcaaaaagtacctattgaaggttgctgagctatttgaaaaactaaggaaagtagagggtcgagtttcatcagatgaagatttgaagctaacagagctcctccgatactacatgctcaacattgaagctgctaaggatctcttatacagacgcaccaaagccctcattgactatgagaactcaaacaaagctctggataaggcccggttaaagagcaaagacgtcaagttggctgaggcacaccagcaggagtgctgccagaaatttgaacaactttccgaatctgcaaaagaagaactgataaatttcaaacggaagagagtggcagcatttagaaagaatctaattgaaatgtctgaactggaaataaaacatgccaggaacaatgtctcccttttgcagagctgtattgacttgttcaagaataactgatatgccttcactcagaagaaaagaaatgaatgtgaaagaaagccaagcatcacttgcacttaaatcattaccacggaagatatattagcttcaactttagtttaaaattatgtgaataaatattttgatttctacaaatcttaacatttaaccatgttggtttaaaaatattattgcttgctacttggacataactaatttttccttgtgcatttaatacctctgggcagaatccaaatactgggttctcccgtagttcgtctttagttactaagaaagggtgtaggacacattagccttctggaaacaagtagaagccatcacctggcccatgtccctacaaacccatgattgtcagggaggtgccagttacagcaggtgattcagctacttgaggtcggtaacagaccttccattcctcactgaaggtggggtttgtgtttttgttttgccctgttactccactggtagtcatctggtgtttgtactataacaacagcaagaaaatctcatttatctttatatactctttgcacctcctttttttagtcgagatataaatatttgaggggagagaaatatctacaggtatatatggaaacaaataatgtggtctgctttataagatggccagatctacattaggaaaagtataagccccctccctaatggccgctggggggtgagggcggtgtgttgtatgtctttgggtgtttgtttttttataaagcatataataaaataatcgtgctactaa

SEQ ID NO: 351533 - DNA, 2131 bp, Homo sapiens
tgccatcttggactcgggctgagtaataaattccccccgcaccgaaacgcggtctttctctagacgcgtcttgctgggagagtgtccgttgcttcccgtccgtgtcgcggccctgcggttggcggcctcctcgtggagcggagcaaggccaggcggcccctgctcgagtcccgcgtcgccatggccgcggttcccgagttgctgcagcagcaggaggaggaccgcagcaagctgagatctgtatctgtggacctgaatgttgatccctcgcttcagattgacatacctgatgcgctcagtgagagagacaaagtcaaatttacagtgcacacaaagaccacactgcccacgtttcagagcccagagttttctgttacaaggcaacatgaagactttgtgtggctacatgacactcttattgaaacaacagactatgctgggcttattattccacctgctcctacgaagcccgactttgatggtcctcgagagaagatgcagaaactgggagaaggtgaagggtctatgaccaaagaagaatttgccaagatgaaacaagaactggaagctgagtatctcgctgtgtttaagaagactgtgtcctcccatgaagtctttcttcagcggctttcttctcaccctgttctcagtaaagatcgcaactttcatgttttcctggaatatgatcaggatctaagtgttaggcggaaaaatactaaagagatgtttggtggcttcttcaaaagtgtggtgaaaagtgctgatgaagtcctttttactggagttaaggaggtagatgacttctttgagcaagagaagaacttccttattaactattacaataggatcaaagattcttgtgtgaaagctgacaaaatgaccagatctcataaaaatgttgccgatgactatatccacaccgcagcctgcttacatagcctggctttagaagagcccacagtcatcaaaaagtacctattgaaggttgctgagctatttgaaaaactaaggaaagtagagggtcgagtttcatcagatgaagatttgaagctaacagagctcctccgatactacatgctcaacattgaagctgctaaggatctcttatacagacgcaccaaagccctcattgactatgagaactcaaacaaagctctggataaggcccggttaaagagcaaagacgtcaagttggctgaggcacaccagcaggagtgctgccagaaatttgaacaactttccgaatctgcaaaagaagaactgataaatttcaaacggaagagagtggcagcatttagaaagaatctaattgaaatgtctgaactggaaataaaacatgccaggagctgtattgacttgttcaagaataactgatatgccttcactcagaagaaaagaaatgaatgtgaaagaaagccaagcatcacttgcacttaaatcattaccacggaagatatattagcttcaactttagtttaaaattatgtgaataaatattttgatttctacaaatcttaacatttaaccatgttggtttaaaaatattattgcttgctacttggacataactaatttttccttgtgcatttaatacctctgggcagaatccaaatactgggttctcccgtagttcgtctttagttactaagaaagggtgtaggacacattagccttctggaaacaagtagaagccatcacctggcccatgtccctacaaacccatgattgtcagggaggtgccagttacagcaggtgattcagctacttgaggtcggtaacagaccttccattcctcactgaaggtggggtttgtgtttttgttttgccctgttactccactggtagtcatctggtgtttgtactataacaacagcaagaaaatctcatttatctttatatactctttgcacctcctttttttagtcgagatataaatatttgaggggagagaaatatctacaggtatatatggaaacaaataatgtggtctgctttataagatggccagatctacattaggaaaagtataagccccctccctaatggccgctggggggtgagggcggtgtgttgtatgtctttgggtgtttgtttttttataaagcatataataaaataatcgtgctactaa

SEQ ID NO: 351534 - DNA, 2175 bp, Homo sapiens
tgccatcttggactcgggctgagtaataaattccccccgcaccgaaacgcggtctttctctagacgcgtcttgctgggagagtgtccgttgcttcccgtccgtgtcgcggccctgcggttggcggcctcctcgtggagcggagcaaggccaggcggcccctgctcgagtcccgcgtcgccatggccgcggttcccgagttgctgcagcagcaggaggaggaccgcagcaagctgagatctgtatctgtggacctgaatgttgatccctcgcttcagattgacatacctgatgcgctcagtgagagagacaaagtcaaatttacagtgcacacaaagaccacactgcccacgtttcagagcccagagttttctgttacaaggcaacatgaagactttgtgtggctacatgacactcttattgaaacaacagactatgctgggcttattattccacctgctcctacgaagcccgactttgatggtcctcgagagaagatgcagaaactgggagaaggtgaagggtctatgaccaaagaagaatttgccaagatgaaacaagaactggaagctgagtatctcgctgtgtttaagaagactgtgtcctcccatgaagtctttcttcagcggctttcttctcaccctgttctcagtaaagatcgcaactttcatgttttcctggaatatgatcaggatctaagtgttaggcggaaaaatactaaagagatgtttggtggcttcttcaaaagtgtggtgaaaagtgctgatgaagtcctttttactggagttaaggaggtagatgacttctttgagcaagagaagaacttccttattaactattacaataggatcaaagattcttgtgtgaaagctgacaaaatgaccagatctcataaaaatgttgccgatgactatatccacaccgcagcctgcttacatagcctggctttagaagagcccacagtcatcaaaaagtacctattgaaggttgctgagctatttgaaaaactaaggaaagtagagggtcgagtttcatcagatgaagatttgaagctaacagagctcctccgatactacatgctcaacattgaagctgctaaggatctcttatacagacgcaccaaagccctcattgactatgagaactcaaacaaagctctggataaggcccggttaaagagcaaagacgtcaagttggctgaggcacaccagcaggagtgctgccagaaatttgaacaactttccgaatctgcaaaagaaggagttcaacttaagattttacctaactgataaatttcaaacggaagagagtggcagcatttagaaagaatctaattgaaatgtctgaactggaaataaaacatgccaggaacaatgtctcccttttgcagagctgtattgacttgttcaagaataactgatatgccttcactcagaagaaaagaaatgaatgtgaaagaaagccaagcatcacttgcacttaaatcattaccacggaagatatattagcttcaactttagtttaaaattatgtgaataaatattttgatttctacaaatcttaacatttaaccatgttggtttaaaaatattattgcttgctacttggacataactaatttttccttgtgcatttaatacctctgggcagaatccaaatactgggttctcccgtagttcgtctttagttactaagaaagggtgtaggacacattagccttctggaaacaagtagaagccatcacctggcccatgtccctacaaacccatgattgtcagggaggtgccagttacagcaggtgattcagctacttgaggtcggtaacagaccttccattcctcactgaaggtggggtttgtgtttttgttttgccctgttactccactggtagtcatctggtgtttgtactataacaacagcaagaaaatctcatttatctttatatactctttgcacctcctttttttagtcgagatataaatatttgaggggagagaaatatctacaggtatatatggaaacaaataatgtggtctgctttataagatggccagatctacattaggaaaagtataagccccctccctaatggccgctggggggtgagggcggtgtgttgtatgtctttgggtgtttgtttttttataaagcatataataaaataatcgtgctactaa

SEQ ID NO: 351535 - DNA, 2041 bp, Homo sapiens
tgccatcttggactcgggctgagtaataaattccccccgcaccgaaacgcggtctttctctagacgcgtcttgctgggagagtgtccgttgcttcccgtccgtgtcgcggccctgcggttggcggcctcctcgtggagcggagcaaggccaggcggcccctgctcgagtcccgcgtcgccatggccgcggttcccgagttgctgcagcagcaggaggaggaccgcagcaagctgagatctgtatctgtggacctgaatgttgatccctcgcttcagattgacatacctgatgcgctcagtgagagagacaaagtcaaatttacagtgcacacaaagattccacctgctcctacgaagcccgactttgatggtcctcgagagaagatgcagaaactgggagaaggtgaagggtctatgaccaaagaagaatttgccaagatgaaacaagaactggaagctgagtatctcgctgtgtttaagaagactgtgtcctcccatgaagtctttcttcagcggctttcttctcaccctgttctcagtaaagatcgcaactttcatgttttcctggaatatgatcaggatctaagtgttaggcggaaaaatactaaagagatgtttggtggcttcttcaaaagtgtggtgaaaagtgctgatgaagtcctttttactggagttaaggaggtagatgacttctttgagcaagagaagaacttccttattaactattacaataggatcaaagattcttgtgtgaaagctgacaaaatgaccagatctcataaaaatgttgccgatgactatatccacaccgcagcctgcttacatagcctggctttagaagagcccacagtcatcaaaaagtacctattgaaggttgctgagctatttgaaaaactaaggaaagtagagggtcgagtttcatcagatgaagatttgaagctaacagagctcctccgatactacatgctcaacattgaagctgctaaggatctcttatacagacgcaccaaagccctcattgactatgagaactcaaacaaagctctggataaggcccggttaaagagcaaagacgtcaagttggctgaggcacaccagcaggagtgctgccagaaatttgaacaactttccgaatctgcaaaagaagaactgataaatttcaaacggaagagagtggcagcatttagaaagaatctaattgaaatgtctgaactggaaataaaacatgccaggaacaatgtctcccttttgcagagctgtattgacttgttcaagaataactgatatgccttcactcagaagaaaagaaatgaatgtgaaagaaagccaagcatcacttgcacttaaatcattaccacggaagatatattagcttcaactttagtttaaaattatgtgaataaatattttgatttctacaaatcttaacatttaaccatgttggtttaaaaatattattgcttgctacttggacataactaatttttccttgtgcatttaatacctctgggcagaatccaaatactgggttctcccgtagttcgtctttagttactaagaaagggtgtaggacacattagccttctggaaacaagtagaagccatcacctggcccatgtccctacaaacccatgattgtcagggaggtgccagttacagcaggtgattcagctacttgaggtcggtaacagaccttccattcctcactgaaggtggggtttgtgtttttgttttgccctgttactccactggtagtcatctggtgtttgtactataacaacagcaagaaaatctcatttatctttatatactctttgcacctcctttttttagtcgagatataaatatttgaggggagagaaatatctacaggtatatatggaaacaaataatgtggtctgctttataagatggccagatctacattaggaaaagtataagccccctccctaatggccgctggggggtgagggcggtgtgttgtatgtctttgggtgtttgtttttttataaagcatataataaaataatcgtgctactaa

SEQ ID NO: 351536 - DNA, 2687 bp, Homo sapiens
tgccatcttggactcgggctgagtaataaattccccccgcaccgaaacgcggtctttctctagacgcgtcttgctgggagagtgtccgttgcttcccgtccgtgtcgcggccctgcggttggcggcctcctcgtggagcggagcaaggccaggcggcccctgctcgagtcccgcgtcgccatggccgcggttcccgagttgctgcagcagcaggaggaggaccgcagcaagctgagatctgtatctgtggacctgaatgttgatccctcgcttcagattgacatacctgatgcgctcagtgagagagacaaagtcaaatttacagtgcacacaaagaccacactgcccacgtttcagagcccagagttttctgttacaaggcaacatgaagactttgtgtggctacatgacactcttattgaaacaacagactatgctgggcttattattccacctgctcctacgaagcccgactttgatggtcctcgagagaagatgcagaaactgggagaaggtgaagggtctatgaccaaagaagaatttgccaagatgaaacaagaactggaagctgagtatctcgctgtgtttaagaagactgtgtcctcccatgaagtctttcttcagcggctttcttctcaccctgttctcagtaaagatcgcaactttcatgttttcctggaatatgatcaggatctaagtgttaggcggaaaaatactaaagagatgtttggtggcttcttcaaaagtgtggtgaaaagtgctgatgaagtcctttttactggagttaaggaggtagatgacttctttgagcaagagaagaacttccttattaactattacaataggatcaaagattcttgtgtgaaagctgacaaaatgaccagatctcataaaaatgttgccgatgactatatccacaccgcagcctgcttacatagcctggctttagaagagcccacagtcatcaaaaagtacctattgaaggttgctgagctatttgaaaaactaaggaaagtagagggtcgagtttcatcagatgaagatttgaagctaacagagctcctccgatactacatgctcaacattgaagctgctaaggatctcttatacagacgcaccaaagccctcattgactatgagaactcaaacaaagctctggataaggcccggttaaagagcaaagacgtcaagttggctgaggcacaccagcaggagtgctgccagaaatttgaacaactttccgaatctgcaaaagaagaactgataaatttcaaacggaagagagtggcagcatttagaaagaatctaattgaaatgtctgaactggaaataaaacatgccaggaacaatgtctcccttttgcagagctgtattgacttgttcaagaataactgatatgccttcactcagaagaaaagaaatgaatgtgaaagaaagccaagcatcacttgcacttaaatcattaccacggaagatatattagcttcaactttagtttaaaattatgtgaataaatattttgatttctacaaatcttaacatttaaccatgttggtttaaaaatattattgcttgctacttggacataactaatttttccttgtgcatttaatacctctgggcagaatccaaatactgggttctcccgtagttcgtctttagttactaagaaagggtgtaggacacattagccttctggaaacaagtagaagccatcacctggcccatgtccctacaaacccatgattgtcagggaggtgccagttacagcaggtgattcagctacttgaggtcggtaacagaccttccattcctcactgaaggtggggtttgtgtttttgttttgccctgttactccactggtagtcatctggtgtttgtactataacaacagcaagaaaatctcatttatctttatatactctttgcacctcctttttttagtcgagatataaatatttgaggggagagaaatatctacaggtatatatggaaacaaataatgtggtctgctttataagatggccagatctacattaggaaaagtataagccccctccctaatggccgctggggggtgagggcggtgtgttgtatgtctttgggtgtttgtttttttataaagcatataataaaataatcgtgctactaaaacaacaaaaaaaaaaaacttcgaaacaagtccaagcacacctgaggtgatcggtgaaaatggtccgcaatacacgtgtgaacccggaagataccccgcgcgaaatctgccaattcaggaaggtttccaatcttgcgtgatacacattataagaaaaccgtcgtgaacatgcatcaaggccacacagaggttcatgcatataaccacaaggccagcacagatttcttgacacaaatgctcagcttgaccaggaagcccaggaggttgtatacccaattcccagacgcgtgttacaccatggcggtacgcagttacgcgacacggtggatgacgcaagcgcacacagacctaactgcagggaccggacaccacaaggagctagcgcgcgggaccgccacagacagaaagggtccacgtggacaaaatcagcgaccaaggacaccagcggcccttaaaaaacccgcccagcggagaatacagtgccagcaccatacaaagcgcggagtcagaacataggaagaacacaccccacggg

SEQ ID NO: 351537 - DNA, 2121 bp, Homo sapiens
  misc_feature (2064)..(2064): n is a, c, g, or t
tgccatcttggactcgggctgagtaataaattccccccgcaccgaaacgcggtctttctctagacgcgtcttgctgggagagtgtccgttgcttcccgtccgtgtcgcggccctgcggttggcggcctcctcgtggagcggagcaaggccaggcggcccctgctcgagtcccgcgtcgccatggccgcggttcccgagttgctgcagcagcaggaggaggaccgcagcaagctgagatctgtatctgtggacctgaatgttgatccctcgcttcagattgacatacctgatgcgctcagtgagagagacaaagtcaaatttacagtgcacacaaagaccacactgcccacgtttcagagcccagagttttctgttacaaggcaacatgaagactttgtgtggctacatgacactcttattgaaacaacagactatgctgggcttattattccacctgctcctacgaagcccgactttgatggtcctcgagagaagatgcagaaactgggagaaggtgaagggtctatgaccaaagaagaatttgccaagatgaaacaagaactggaagctgagtatctcgctgtgtttaagaagactgtgtcctcccatgaagtctttcttcagcggctttcttctcaccctgttctcagtaaagatcgcaactttcatgttttcctggaatatgatcaggatctaagtgttaggcggaaaaatactaaagagatgtttggtggcttcttcaaaagtgtggtgaaaagtgctgatgaagtcctttttactggagttaaggaggtagatgacttctttgagcaagagaagaacttccttattaactattacaataggatcaaagattcttgtgtgaaagctgacaaaatgaccagatctcataaaaatgttgccgatgactatatccacaccgcagcctgcttacatagcctggctttagaagagcccacagtcatcaaaaagtacctattgaaggttgctgagctatttgaaaaactaaggaaagtagagggtcgagtttcatcagatgaagatttgaagctaacagagctcctccgatactacatgctcaacattgaagctgctaaggatctcttatacagacgcaccaaagccctcattgactatgagaactcaaacaaagctctggataaggcccggttaaagagcaaagacgtcaagttggctgaggcacaccagcaggagtgctgccagaaatttgaacaactttccgaatctgcaaaagaagaactgataaatttcaaacggaagagagtggcagcatttagaaagaatctaattgaaatgtctgaactggaaataaaacatgccaggaacaatgtctcccttttgcagagctgtattgacttgttcaagaataactgatatgccttcactcagaagaaaagaaatgaatgtgaaagaaagccaagcatcacttgcacttaaatcattaccacggaagatatattagcttcaactttagtttaaaattatgtgaataaatattttgatttctacaaatcttaacatttaaccatgttggtttaaaaatattattgcttgctacttggacataactaatttttccttgtgcatttaatacctctgggcagaatccaaatactgggttctcccgtagttcgtctttagttactaagaaagggtgtaggacacattagccttctggaaacaagtagaagccatcacctggcccatgtccctacaaacccatgattgtcagggaggtgccagttacagcaggtgattcagctacttgaggtcggtaacagaccttccattcctcactgaaggtggggtttgtgtttttgttttgccctgttactccactggtagtcatctggtgtttgtactataacaacagcaagaaaatctcatttatctttatatactctttgcacctcctttttttagtcgagatataaatatttgaggggagagaaatatctacaggtatatatggaaacaaataatgtggtctgctttataagatggccagatctacattaggaaaagtataagccccctccacancggaagacggggggcgagggaggcgcgccgcacgcacccgggcgcccgcccccccac

SEQ ID NO: 351538 - DNA, 2494 bp, Homo sapiens
tgccatcttggactcgggctgagtaataaattccccccgcaccgaaacgcggtctttctctagacgcgtcttgctgggagagtgtccgttgcttcccgtccgtgtcgcggccctgcggttggcggcctcctcgtggagcggagcaaggccaggcggcccctgctcgagtcccgcgtcgccatggccgcggttcccgagttgctgcagcagcaggaggaggaccgcagcaagctgagatctgtatctgtggacctgaatgttgatccctcgcttcagattgacatacctgatgcgctcagtgagagagacaaagtcaaatttacagtgcacacaaagaccacactgcccacgtttcagagcccagagttttctgttacaaggcaacatgaagactttgtgtggctacatgacactcttattgaaacaacagactatgctgggcttattattccacctgctcctacgaagcccgactttgatggtcctcgagagaagatgcagaaactgggagaaggtgaagggtctatgaccaaagaagaatttgccaagatgaaacaagaactggaagctgagtatctcgctgtgtttaagaagactgtgtcctcccatgaagtctttcttcagcggctttcttctcaccctgttctcagtaaagatcgcaactttcatgttttcctggaatatgatcaggatctaagtgttaggcggaaaaatactaaagagatgtttggtggcttcttcaaaagtgtggtgaaaagtgctgatgaagtcctttttactggagttaaggaggtagatgacttctttgagcaagagaagaacttccttattaactattacaataggatcaaagattcttgtgtgaaagctgacaaaatgaccagatctcataaaaatgttgccgatgactatatccacaccgcagcctgcttacatagcctggctttagaagagcccacagtcatcaaaaagtacctattgaaggttgctgagctatttgaaaaactaaggaaagtagagggtcgagtttcatcagatgaagatttgaagctaacagagctcctccgatactacatgctcaacattgaagctgctaaggatctcttatacagacgcaccaaagccctcattgactatgagaactcaaacaaagctctggataaggcccggttaaagagcaaagacgtcaagttggctgaggcacaccagcaggagtgctgccagaaatttgaacaactttccgaatctgcaaaagaaggagttcaacttaagattttacctgtaagtgagatcatgtaatgtttgtctttctgtgcctggtttattttatttggcataatgtcctctaagatccatccacattgtcccatatgagagaattttgttattttaaaaggccggatagtataatgtatctatactacattgtcttcatccactgatggataattctcaattgattttgtattttggctattgtaaataatgctgcagtgaacatggaagtacggatatcccattgagatactgatttcagttccttttatattcccagaagtgggtttgctggatcatatggtaattctatttttagttttttgaggaacctctataccattttccatggtggctgtactaatttacattcccagcaacggtgtagaagagttcacttttctctgcattgttgctaacactgatctttcatctatttgagaaaatgcattctagcaggtgtgaggtaatctcattgtggttttaatttgcatttccctaatggctagtgctgctgaacgttgtttgcatgaacctggtatgtcttcttttgagaagcattttcacaagccattggtgaagtatgtggctcaccaccacccatactccagccctgttcccagtcactggtacctagagggtgagagtgaggctgctcatcaacgtgttctccaagtcataagctgctgctctcccactcacgatgcttggtgattcagtgatgttttccacttaaagacagtgatagctgtatcaccacagttaatagatgtctgatgtgtcccagtcacagagataatacaaatgtgaggaaataatgctggtgcctgaaagcattggagaccatttgtaagaatgccatttggtagttaaagtgaacatgaaaattgtttagtttttcttggtttcataaacattttttcttcctgtagaactgataaatttcaaacggaagagagtggcagcatttagaaagaatctaattgaaatgtctgaactggaaataaaacatgccaggaacaatgtctcccttttgcagagctgtattgacttgttcaagaataactgatatgccttcactcagaagaaaagaaatgaatgtgaaagaaagccaagcatcacttgcacttaaatcattaccacggaagatatattagcttcaactttagtttaaaattatgtgaataaatattttgatttctacaaatcttaacattta

SEQ ID NO: 351539 - DNA, 2626 bp, Homo sapiens
tgccatcttggactcgggctgagtaataaattccccccgcaccgaaacgcggtctttctctagacgcgtcttgctgggagagtgtccgttgcttcccgtccgtgtcgcggccctgcggttggcggcctcctcgtggagcggagcaaggccaggcggcccctgctcgagtcccgcgtcgccatggccgcggttcccgagttgctgcagcagcaggaggaggaccgcagcaagctgagatctgtatctgtggacctgaatgttgatccctcgcttcagattgacatacctgatgcgctcagtgagagagacaaagtcaaatttacagtgcacacaaagaccacactgcccacgtttcagagcccagagttttctgttacaaggcaacatgaagactttgtgtggctacatgacactcttattgaaacaacagactatgctgggcttattattccacctgctcctacgaagcccgactttgatggtcctcgagagaagatgcagaaactgggagaaggtgaagggtctatgaccaaagaagaatttgccaagatgaaacaagaactggaagctgagtatctcgctgtgtttaagaagactgtgtcctcccatgaagtctttcttcagcggctttcttctcaccctgttctcagtaaagatcgcaactttcatgttttcctggaatatgatcaggatctaagtgttaggcggaaaaatactaaagagatgtttggtggcttcttcaaaagtgtggtgaaaagtgctgatgaagtcctttttactggagttaaggaggtagatgacttctttgagcaagagaagaacttccttattaactattacaataggatcaaagattcttgtgtgaaagctgacaaaatgaccagatctcataaaaatgttgccgatgactatatccacaccgcagcctgcttacatagcctggctttagaagagcccacagtcatcaaaaagtacctattgaaggttgctgagctatttgaaaaactaaggaaagtagagggtcgagtttcatcagatgaagatttgaagctaacagagctcctccgatactacatgctcaacattgaagctgctaaggatctcttatacagacgcaccaaagccctcattgactatgagaactcaaacaaagctctggataaggcccggttaaagagcaaagacgtcaagttggctgaggcacaccagcaggagtgctgccagaaatttgaacaactttccgaatctgcaaaagaaggagttcaacttaagattttacctgtaagtgagatcatgtaatgtttgtctttctgtgcctggtttattttatttggcataatgtcctctaagatccatccacattgtcccatatgagagaattttgttattttaaaaggccggatagtataatgtatctatactacattgtcttcatccactgatggataattctcaattgattttgtattttggctattgtaaataatgctgcagtgaacatggaagtacggatatcccattgagatactgatttcagttccttttatattcccagaagtgggtttgctggatcatatggtaattctatttttagttttttgaggaacctctataccattttccatggtggctgtactaatttacattcccagcaacggtgtagaagagttcacttttctctgcattgttgctaacactgatctttcatctatttgagaaaatgcattctagcaggtgtgaggtaatctcattgtggttttaatttgcatttccctaatggctagtgctgctgaacgttgtttgcatgaacctggtatgtcttcttttgagaagcattttcacaagccattggtgaagtatgtggctcaccaccacccatactccagccctgttcccagtcactggtacctagagggtgagagtgaggctgctcatcaacgtgttctccaagtcataagctgctgctctcccactcacgatgcttggtgattcagtgatgttttccacttaaagacagtgatagctgtatcaccacagttaatagatgtctgatgtgtcccagtcacagagataatacaaatgtgaggaaataatgctggtgcctgaaagcattggagaccatttgtaagaatgccatttggtagttaaagtgaacatgaaaattgtttagtttttcttggtttcataaacattttttcttcctgtagaactgataaatttcaaacggaagagagtggcagcatttagaaagaatctaattgaaatgtctgaactggaaataaaacatgccagggtaagtgttttctacagatgaagccaacatcttttatggttttttccaagttatttcccagtttactaacccattgtcatcaggcagttggggtggccttgtggtattaatcgtctgtagtacttagttgatgggagccactcattgtttatttgtagtcttgtttataatgtcacccatgactaatttttagcaactttttttttttttttttaatagagatggggtttcaccattttggccaggctggacttgaacccctgacctcaggtgatccacctgccttggcctcccaaagtgctgggattacaggtgtgagctaaagctcccagc

SEQ ID NO: 351540 - DNA, 1054 bp, Homo sapiens
tgccatcttggactcgggctgagtaataaattccccccgcaccgaaacgcggtctttctctagacgcgtcttgctgggagagtgtccgttgcttcccgtccgtgtcgcggccctgcggttggcggcctcctcgtggagcggagcaaggccaggcggcccctgctcgagtcccgcgtcgccatggccgcggttcccgagttgctgcagcagcaggaggaggaccgcagcaagctgagatctgtatctgtggacctgaatgttgatccctcgcttcagattgacatacctgatgcgctcagtgagagagacaaagtcaaatttacagtgcacacaaagaccacactgcccacgtttcagagcccagagttttctgttacaaggcaacatgaagactttgtgtggctacatgacactcttattgaaacaacagactatgctgggcttattattccacctgctcctacgaagcccgactttgatggtcctcgagagaagatgcagaaactgggagaaggtgaagggtctatgaccaaagaagaatttgccaagatgaaacaagaactggaagctgagtatctcgctgtgtttaagaagactgtgtcctcccatgaagtctttcttcagcggctttcttctcaccctgttctcagtaaagatcgcaactttcatgttttcctggaatatgatcaggatctaagtgttaggcggaaaaatactaaagagatgtttggtggcttcttcaaaagtgtggtgaaaagtgctgatgaagtcctttttactggagttaaggaggtagatgacttctttgagcaagagaagaacttccttattaactattacaataggatcaaagattcttgtgtgaaagctgacaaaatgaccagatctcataaaaatgttgccgatgactatatccacaccgcagcctgcttacatagcctggctttagaagagcccacagtcatcaaaaagtacctattgaaggttgctgagctatttgaaaaactaagggtaaggatttctgtgttggtcttcataatatatattttataat

SEQ ID NO: 351541 - DNA, 869 bp, Homo sapiens
tgccatcttggactcgggctgagtaataaattccccccgcaccgaaacgcggtctttctctagacgcgtcttgctgggagagtgtccgttgcttcccgtccgtgtcgcggccctgcggttggcggcctcctcgtggagcggagcaaggccaggcggcccctgctcgagtcccgcgtcgccatggccgcggttcccgagttgctgcagcagcaggaggaggaccgcagcaagctgagatctgtatctgtggacctgaatgttgatccctcgcttcagattgacatacctgatgcgctcagtgagagagacaaagtcaaatttacagtgcacacaaagaccacactgcccacgtttcagagcccagagttttctgttacaaggcaacatgaagactttgtgtggctacatgacactcttattgaaacaacagactatgctgggcttattattccacctgctcctacgaagcccgactttgatggtcctcgagagaagatgcagaaactgggagaaggtgaagggtctatgaccaaagaagaatttgccaagatgaaacaagaactggaagctgagtatctcgctgtgtttaagaagactgtgtcctcccatgaagtctttcttcagcggctttcttctcaccctgttctcagtaaagatcgcaactttcatgttttcctggaatatgatcaggatctaagtgttaggcggaaaaatactaaagagatgtttggtggcttcttcaaaagtgtggtgaaaagtgctgatgaagtcctttttactggagttaaggtaagtgacctttggctgttggagaaaattttttacttcatcgggaataggtgaccttttgtttctttgaaagagatact

SEQ ID NO: 351542 - DNA, 212 bp, Homo sapiens
ttttttttgagagatggtcttactctgccgcccaggctagagtgcagtgagtggcgcgtttcttcctcactgcagccccaaactcctgggctcaagcagtcctcctgtctcggcctcccaaagagttggcattacaggtgtgaaccatcacacctggccttatcgtggtatttctaaagcccaaatttctagcacctcttaaaaaactgggc

SEQ ID NO: 351543 - DNA, 577 bp, Homo sapiens
cactcatttaatcctccacagccccatgaggtcatatggtgatcccattttagagataggaagtctgaggcatggagttaagtaatttgccagccagtaagtggcaaagcaagaagcaaagtttctcagactaacttgagaaactttgctcttaactgccatgtttttctgcccactttctggctcaagttggcgaatatatttttcttattttggactttacacggtgtttatggtctgtcttttgccacccagaaatgcagaaaacctgtctgttctcttccttatagcttctgtgtttcatatcttccttaaaaagatcttcttagagaagcattcttctgtattttcacctactatttttactttcacaatgtttaaaatattttccatatttagatctgagtcttcccacctagaatatggtaatataaatatgtttttccattaatttttttagattttacagtttttcccatgttccatgttttccttgttccctcccatgcctagctggattgcagagttaagtttatgattatgaaataaaaactaaataacaattgtcctcgtttga

SEQ ID NO: 351544 - DNA, 4039 bp, Homo sapiens
cggccgcgcagccgctgccgcccacccgcacccgccgtcatgctccgggccgcgctgcccgcgctcctgctgccgttgctgggcctcgccgctgctgccgtcgcggactgtccttcatctacttggattcagttccaagacagttgttacatttttctccaagaagccatcaaagtagaaagcatagaggatgtcagaaatcagtgtactgaccatggagcggacatgataagcatacataatgaagaagaaaatgcttttatactggatactttgaaaaagcaatggaaaggcccagatgatatcctactaggcatgttttatgacacagatgatgcgagtttcaagtggtttgataattcaaatatgacatttgataagtggacagaccaagatgatgatgaggatttagttgacacctgtgcttttctgcacatcaagacaggtgaatggaaaaaaggaaattgtgaagtttcttctgtggaaggaacactatgcaaaacagctatcccatacaaaaggaaatatttatcagataaccacattttaatatcagcattggtgattgctagcacggtaattttgacagttttgggagcaatcatttggttcctgtacaaaaaacattctgattctcgtttcaccacagttttttcaaccgcaccccaatcaccttataatgaagactgtgttttggtagttggagaagaaaatgaatatcctgttcaatttgactaagtttttggtaatcttgcactaagacatcaacaaaatgccctggcagagataacttgggaaagattttaatataaaacttgacattggatattagagctttaatggtattccttattccagtaacatttttatgtactcatctgctgtgaaaagtctttaggttcattaaaaaaacaggttttagaaatgatcttagatctaatatagtgattttaagcatcccgtcaaaggcagaatctgtcacttgaatgaaggaaagcttaaagcccaagcagataaaaataaaagcccagcctatttgtcttgcctgctgtatcttccctatttagttgacccactttagtttatatgtttattagtaaacatgaaatggggaataagtgattttaagtacatcccatacatttaaatatctttgataattgttatttttttggcagataattcctctagaatgtgtatctttttatgatttagatgaagaaaattttacaacttttaacaccccacaccaattttagtttcattacttttacacacaccattttatcacaaatgactcaagttttaatgaatgtttataaattatttgaaacaaaatatgatcgctgtgtccaggatggcatagagaaagctggcaattaggttaacacttacatattatagtgcccctttaaggatttctctcttgccaccataccttttgtactttcccctatacaagatgtatctcattctcctcaagcatttataaatttttccttcaatgacatgaaaactgtgcaagcaaaaaccgaagaaaaacacttaagtacaactgtagtgacagtgatcaaagttttcagtgcatttattgtacattttaagaaaaaggtgaaaatcatttggggagtaaaaaaatgaaaaagctgaaacgagtaattttcctcaccatcaataaaccaaaaacaggaaagataaagaatgtataaatttcacgtaaattagtcacgtatcacttatcaatggggatacgttctaagaaatgcatagttagggaatcttctgtgaaaatcagcttgtatttacacaaacccagatggtagagcctattttgtcccaaacctacacagcatgttactgtgctgaatactgcagacaattgtaacacaatatttgtgtatctaaatatagaaaaggtacagtaaaaatatggtctactaaggaaacactgttctatatgtggtccattactgactgaagtatactgtctagaagtctgaggctcaaagaaaagtaatccctcttctgaatccacaccccatcaattatcttactttcttctggggagatagatagatatactatctcactagcttgactaatggcaacaaagttccagcttgtgtagtctctttttattgaccacatgaatcgaaaacactcatcacaattaatggcactatcattaatgagacatgagtaactaaaaagtgatagaaaactattaacagtgcggctacatggtactgaaaatgcaggcattacaccagctgttacacaagcacaagcatgctctgtaagagctttacatttctgagattttgtatagtgattgagatgtctattttattattgatagactattactaatgtcaatattgaacactaccctggaattcctgcctggttttcctacccaaattgtaccactccttgaagaactacaggcacagtaaaaaaaatatgggcgtattatgtgaactaaaagagttctaaaggagttcttaaaggagtggtagaatttgggtaggaaagtgattaagtccaacttaaaaccaacagtctcaaacgtctacaactacaatgtccaatgagccactagccacatgaggctatttaagtaaatttagtttaaaatccagttttcgaattacattagccacattgtcaagtgttcaaatcacaggtggttagtggctactgtactgggcaacatacattatagaacattttcattataggaagttttattgggcagtgctgctcttaaatcctaccttccactcaactcccatacaactttcttttgtacattttgatactttctacctaatggcagctcttccaaaatagctgctttaaactctgatttaattttcaatatttggtttcatttttcaacaggccaagaggcctctggtaatgaagtgctatatatatatatatatgacggagtctcactgtgctgcccaggctacagtgcagtggctcgatcttggctctctccaatctccgccttgcaggttttcaagcaattctcctgcctcagcctccttagtagctgggaccacagacatctgtcaccacacccagctaactttttgtatttttggtagagacggggtttcgccatattgactgggctggtctcaaactcctgacctcaagtgatccacccaccttggtctcccaaagtgctgggattacatgcgtgagccaccacacttggcctacattttttctttatataccagaacatctataacaggcaccttatctactcattagtgaagagataattggattacacaggcaggcttgtttactacatccagaatgtagaaactgctttcttcaacatcttggttctagctagtaataacaatataattctttggcagatattcagaataacattttaaactacattttcttagaaaattgcattcttgtagtgagcagtgtatggtctcttttgttcagaatttaaaactgataaccaatgaaagccttttctcttattcctctaccgtcatttacatgataatctgaagctaatatgacaatatttaaatactaagtggtactagggaactacaagaatactgtaaagcttaagccattgttatcactgtcatttagcatttaataacaaaactatacagaattatgtgcataccaatgaatgttttgtaccatctagttaaattttttaaataaagttttatgggttaagcagaagacaactgtcatactgaattttattaaaagtatatatacttcaaattcaaagcatcccttaggacccacagaatatattaaaactaccacccttaaattttatatttttgctttaagacagacaatgcaaaggtaactggcaagaggtgagcaaatgttttagaacatttatattattgcttaaaatgagatttgaaattgtaataaaattcttggttatgaagtctgatgtcttctttgagcaccagtttaaaaggaaacatttcaaacagtaaaataaatcagtgtgtactttatt

SEQ ID NO: 351545 - DNA, 4266 bp, Homo sapiens
  misc_feature (4266)..(4266): n is a, c, g, or t
cggccgcgcagccgctgccgcccacccgcacccgccgtcatgctccgggccgcgctgcccgcgctcctgctgccgttgctgggcctcgccgctgctgccgtcgcggactgtccttcatctacttggattcagttccaagacagttgttacatttttctccaagaagccatcaaagtagaaagcatagaggatgtcagaaatcagtgtactgaccatggagcggacatgataagcatacataatgaagaagaaaatgcttttatactggatactttgaaaaagcaatggaaaggcccagatgatatcctactaggcatgttttatgacacagatgatgcgagtttcaagtggtttgataattcaaatatgacatttgataagtggacagaccaagatgatgatgaggatttagttgacacctgtgcttttctgcacatcaagacaggtgaatggaaaaaaggaaattgtgaagtttcttctgtggaaggaacactatgcaaaacagctatcccatacaaaaggaaatatttatcagataaccacattttaatatcagcattggtgattgctagcacggtaattttgacagttttgggagcaatcatttggttcctgtacaaaaaacattctgattctcgtttcaccacagttttttcaaccgcaccccaatcaccttataatgaagactgtgttttggtagttggagaagaaaatgaatatcctgttcaatttgactaagtttttggtaatcttgcactaagacatcaacaaaatgccctggcagagataacttgggaaagattttaatataaaacttgacattggatattagagctttaatggtattccttattccagtaacatttttatgtactcatctgctgtgaaaagtctttaggttcattaaaaaaacaggttttagaaatgatcttagatctaatatagtgattttaagcatcccgtcaaaggcagaatctgtcacttgaatgaaggaaagcttaaagcccaagcagataaaaataaaagcccagcctatttgtcttgcctgctgtatcttccctatttagttgacccactttagtttatatgtttattagtaaacatgaaatggggaataagtgattttaagtacatcccatacatttaaatatctttgataattgttatttttttggcagataattcctctagaatgtgtatctttttatgatttagatgaagaaaattttacaacttttaacaccccacaccaattttagtttcattacttttacacacaccattttatcacaaatgactcaagttttaatgaatgtttataaattatttgaaacaaaatatgatcgctgtgtccaggatggcatagagaaagctggcaattaggttaacacttacatattatagtgcccctttaaggatttctctcttgccaccataccttttgtactttcccctatacaagatgtatctcattctcctcaagcatttataaatttttccttcaatgacatgaaaactgtgcaagcaaaaaccgaagaaaaacacttaagtacaactgtagtgacagtgatcaaagttttcagtgcatttattgtacattttaagaaaaaggtgaaaatcatttggggagtaaaaaaatgaaaaagctgaaacgagtaattttcctcaccatcaataaaccaaaaacaggaaagataaagaatgtataaatttcacgtaaattagtcacgtatcacttatcaatggggatacgttctaagaaatgcatagttagggaatcttctgtgaaaatcagcttgtatttacacaaacccagatggtagagcctattttgtcccaaacctacacagcatgttactgtgctgaatactgcagacaattgtaacacaatatttgtgtatctaaatatagaaaaggtacagtaaaaatatggtctactaaggaaacactgttctatatgtggtccattactgactgaagtatactgtctagaagtctgaggctcaaagaaaagtaatccctcttctgaatccacaccccatcaattatcttactttcttctggggagatagatagatatactatctcactagcttgactaatggcaacaaagttccagcttgtgtagtctctttttattgaccacatgaatcgaaaacactcatcacaattaatggcactatcattaatgagacatgagtaactaaaaagtgatagaaaactattaacagtgcggctacatggtactgaaaatgcaggcattacaccagctgttacacaagcacaagcatgctctgtaagagctttacatttctgagattttgtatagtgattgagatgtctattttattattgatagactattactaatgtcaatattgaacactaccctggaattcctgcctggttttcctacccaaattgtaccactccttgaagaactacaggcacagtaaaaaaaatatgggcgtattatgtgaactaaaagagttctaaaggagttcttaaaggagtggtagaatttgggtaggaaagtgattaagtccaacttaaaaccaacagtctcaaacgtctacaactacaatgtccaatgagccactagccacatgaggctatttaagtaaatttagtttaaaatccagttttcgaattacattagccacattgtcaagtgttcaaatcacaggtggttagtggctactgtactgggcaacatacattatagaacattttcattataggaagttttattgggcagtgctgctcttaaatcctaccttccactcaactcccatacaactttcttttgtacattttgatactttctacctaatggcagctcttccaaaatagctgctttaaactctgatttaattttcaatatttggtttcatttttcaacaggccaagaggcctctggtaatgaagtgctatatatatatatatatgacggagtctcactgtgctgcccaggctacagtgcagtggctcgatcttggctctctccaatctccgccttgcaggttttcaagcaattctcctgcctcagcctccttagtagctgggaccacagacatctgtcaccacacccagctaactttttgtatttttggtagagacggggtttcgccatattgactgggctggtctcaaactcctgacctcaagtgatccacccaccttggtctcccaaagtgctgggattacatgcgtgagccaccacacttggcctacattttttctttatataccagaacatctataacaggcaccttatctactcattagtgaagagataattggattacacaggcaggcttgtttactacatccagaatgtagaaactgctttcttcaacatcttggttctagctagtaataacaatataattctttggcagatattcagaataacattttaaactacattttcttagaaaattgcattcttgtagtgagcagtgtatggtctcttttgttcagaatttaaaactgataaccaatgaaagccttttctcttattcctctaccgtcatttacatgataatctgaagctaatatgacaatatttaaatactaagtggtactagggaactacaagaatactgtaaagcttaagccattgttatcactgtcatttagcatttaataacaaaactatacagaattatgtgcataccaatgaatgttttgtaccatctagttaaattttttaaataaagttttatgggttaagcagaaaaaaaaaaaaaaaaaaaaaaaaaaaaaaaaaaaaaaaaaaaaaaaaaaaaaaaagagggggggccccgcccaaaaaaatcccccgccgggggccccaccaaccccccccccccgcgttcttggcacagaggggcccccaaaagaggggcccattataaaaccaagagcacacgggcccgcacgcttcaacacaacaagccgctcgaagagccggggaacaacacatcgcagacgcggagacatccatctctgggaggagagaaccccccatcctacgtgggggggggggagcaaccaatgttggcgccagacaaatattcccctcccaagcagaaataatttaagacagcccccagagacgggaccaattatataatcacatttcacgcaggtgtaataacgaggtggtgacaacaccacagccgggaatatgagcgctgcgacgcatgagaaacaaattgcgggctcacgcgtgatatgactatttgagaacacttttttacgcgagagacaatcgtaaatacn

SEQ ID NO: 351546 - DNA, 3985 bp, Homo sapiens
cggccgcgcagccgctgccgcccacccgcacccgccgtcatgctccgggccgcgctgcccgcgctcctgctgccgttgctgggcctcgccgctgctgccgtcgcggactgtccttcatctacttggattcagttccaagacagttgttacatttttctccaagaagccatcaaagtagaaagcatagaggatgtcagaaatcagtgtactgaccatggagcggacatgataagcatacataatgaagaagaaaatgcttttatactggatactttgaaaaagcaatggaaaggcccagatgatatcctactaggcatgttttatgacacagatgatgcgagtttcaagtggtttgataattcaaatatgacatttgataagtggacagaccaagatgatgatgaggatttagttgacacctgtgcttttctgcacatcaagacaggtgaatggaaaaaaggaaattgtgaagtttcttctgtggaaggaacactatgcaaaacagctatcccatacaaaaggaaatatttatcagataaccacattttaatatcagcattggtgattgctagcacggtaattttgacagttttgggagcaatcatttggttcctgtacaaaaaacattctgattctcgtttcaccacagttttttcaaccgcaccccaatcaccttataatgaagactgtgttttggtagttggagaagaaaatgaatatcctgttcaatttgactaagtttttggtaatcttgcactaagacatcaacaaaatgccctggcagagataacttgggaaagattttaatataaaacttgacattggatattagagctttaatggtattccttattccagtaacatttttatgtactcatctgctgtgaaaagtctttaggttcattaaaaaaacaggttttagaaatgatcttagatctaatatagtgattttaagcatcccgtcaaaggcagaatctgtcacttgaatgaaggaaagcttaaagcccaagcagataaaaataaaagcccagcctatttgtcttgcctgctgtatcttccctatttagttgacccactttagtttatatgtttattagtaaacatgaaatggggaataagtgattttaagtacatcccatacatttaaatatctttgataattgttatttttttggcagataattcctctagaatgtgtatctttttatgatttagatgaagaaaattttacaacttttaacaccccacaccaattttagtttcattacttttacacacaccattttatcacaaatgactcaagttttaatgaatgtttataaattatttgaaacaaaatatgatcgctgtgtccaggatggcatagagaaagctggcaattaggttaacacttacatattatagtgcccctttaaggatttctctcttgccaccataccttttgtactttcccctatacaagatgtatctcattctcctcaagcatttataaatttttccttcaatgacatgaaaactgtgcaagcaaaaaccgaagaaaaacacttaagtacaactgtagtgacagtgatcaaagttttcagtgcatttattgtacattttaagaaaaaggtgaaaatcatttggggagtaaaaaaatgaaaaagctgaaacgagtaattttcctcaccatcaataaaccaaaaacaggaaagataaagaatgtataaatttcacgtaaattagtcacgtatcacttatcaatggggatacgttctaagaaatgcatagttagggaatcttctgtgaaaatcagcttgtatttacacaaacccagatggtagagcctattttgtcccaaacctacacagcatgttactgtgctgaatactgcagacaattgtaacacaatatttgtgtatctaaatatagaaaaggtacatgaagtatactgtctagaagtctgaggctcaaagaaaagtaatccctcttctgaatccacaccccatcaattatcttactttcttctggggagatagatagatatactatctcactagcttgactaatggcaacaaagttccagcttgtgtagtctctttttattgaccacatgaatcgaaaacactcatcacaattaatggcactatcattaatgagacatgagtaactaaaaagtgatagaaaactattaacagtgcggctacatggtactgaaaatgcaggcattacaccagctgttacacaagcacaagcatgctctgtaagagctttacatttctgagattttgtatagtgattgagatgtctattttattattgatagactattactaatgtcaatattgaacactaccctggaattcctgcctggttttcctacccaaattgtaccactccttgaagaactacaggcacagtaaaaaaaatatgggcgtattatgtgaactaaaagagttctaaaggagttcttaaaggagtggtagaatttgggtaggaaagtgattaagtccaacttaaaaccaacagtctcaaacgtctacaactacaatgtccaatgagccactagccacatgaggctatttaagtaaatttagtttaaaatccagttttcgaattacattagccacattgtcaagtgttcaaatcacaggtggttagtggctactgtactgggcaacatacattatagaacattttcattataggaagttttattgggcagtgctgctcttaaatcctaccttccactcaactcccatacaactttcttttgtacattttgatactttctacctaatggcagctcttccaaaatagctgctttaaactctgatttaattttcaatatttggtttcatttttcaacaggccaagaggcctctggtaatgaagtgctatatatatatatatatgacggagtctcactgtgctgcccaggctacagtgcagtggctcgatcttggctctctccaatctccgccttgcaggttttcaagcaattctcctgcctcagcctccttagtagctgggaccacagacatctgtcaccacacccagctaactttttgtatttttggtagagacggggtttcgccatattgactgggctggtctcaaactcctgacctcaagtgatccacccaccttggtctcccaaagtgctgggattacatgcgtgagccaccacacttggcctacattttttctttatataccagaacatctataacaggcaccttatctactcattagtgaagagataattggattacacaggcaggcttgtttactacatccagaatgtagaaactgctttcttcaacatcttggttctagctagtaataacaatataattctttggcagatattcagaataacattttaaactacattttcttagaaaattgcattcttgtagtgagcagtgtatggtctcttttgttcagaatttaaaactgataaccaatgaaagccttttctcttattcctctaccgtcatttacatgataatctgaagctaatatgacaatatttaaatactaagtggtactagggaactacaagaatactgtaaagcttaagccattgttatcactgtcatttagcatttaataacaaaactatacagaattatgtgcataccaatgaatgttttgtaccatctagttaaattttttaaataaagttttatgggttaagcagaagacaactgtcatactgaattttattaaaagtatatatacttcaaattcaaagcatcccttaggacccacagaatatattaaaactaccacccttaaattttatatttttgctttaagacagacaatgcaaaggtaactggcaagaggtgagcaaatgttttagaacatttatattattgcttaaaatgagatttgaaattgtaataaaattcttggttatgaagtctgatgtcttctttgagcaccagtttaaaaggaaacatttcaaacagtaaaataaatcagtgtgtactttatt

SEQ ID NO: 351547 - DNA, 3985 bp, Homo sapiens
cggccgcgcagccgctgccgcccacccgcacccgccgtcatgctccgggccgcgctgcccgcgctcctgctgccgttgctgggcctcgccgctgctgccgtcgcggactgtccttcatctacttggattcagttccaagacagttgttacatttttctccaagaagccatcaaagtagaaagcatagaggatgtcagaaatcagtgtactgaccatggagcggacatgataagcatacataatgaagaagaaaatgcttttatactggatactttgaaaaagcaatggaaaggcccagatgatatcctactaggcatgttttatgacacagatgatgcgagtttcaagtggtttgataattcaaatatgacatttgataagtggacagaccaagatgatgatgaggatttagttgacacctgtgcttttctgcacatcaagacaggtgaatggaaaaaaggaaattgtgaagtttcttctgtggaaggaacactatgcaaaacagctatcccatacaaaaggaaatatttatcagataaccacattttaatatcagcattggtgattgctagcacggtaattttgacagttttgggagcaatcatttggttcctgtacaaaaaacattctgattctcgtttcaccacagttttttcaaccgcaccccaatcaccttataatgaagactgtgttttggtagttggagaagaaaatgaatatcctgttcaatttgactaagtttttggtaatcttgcactaagacatcaacaaaatgccctggcagagataacttgggaaagattttaatataaaacttgacattggatattagagctttaatggtattccttattccagtaacatttttatgtactcatctgctgtgaaaagtctttaggttcattaaaaaaacaggttttagaaatgatcttagatctaatatagtgattttaagcatcccgtcaaaggcagaatctgtcacttgaatgaaggaaagcttaaagcccaagcagataaaaataaaagcccagcctatttgtcttgcctgctgtatcttccctatttagttgacccactttagtttatatgtttattagtaaacatgaaatggggaataagtgattttaagtacatcccatacatttaaatatctttgataattgttatttttttggcagataattcctctagaatgtgtatctttttatgatttagatgaagaaaattttacaacttttaacaccccacaccaattttagtttcattacttttacacacaccattttatcacaaatgactcaagttttaatgaatgtttataaattatttgaaacaaaatatgatcgctgtgtccaggatggcatagagaaagctggcaattaggttaacacttacatattatagtgcccctttaaggatttctctcttgccaccataccttttgtactttcccctatacaagatgtatctcattctcctcaagcatttataaatttttccttcaatgacatgaaaactgtgcaagcaaaaaccgaagaaaaacacttaagtacaactgtagtgacagtgatcaaagttttcagtgcatttattgtacattttaagaaaaaggtgaaaatcatttggggagtaaaaaaatgaaaaagctgaaacgagtaattttcctcaccatcaataaaccaaaaacaggaaagataaagaatgtataaatttcacgtaaattagtcacgtatcacttatcaatggggatacgttctaagaaatgcatagttagggaatcttctgtgaaaatcagcttgtatttacacaaacccagatggtagagcctattttgtcccaaacctacacagcatgttactgtgctgaatactgcagacaattgtaacacaatatttgtgtatctaaatatagaaaaggtacagtaaaaatatggtctactaaggaaacactgttctatatgtggtccattactgactgaagtatactgtctagaagtctgaggctcaaaggggagatagatagatatactatctcactagcttgactaatggcaacaaagttccagcttgtgtagtctctttttattgaccacatgaatcgaaaacactcatcacaattaatggcactatcattaatgagacatgagtaactaaaaagtgatagaaaactattaacagtgcggctacatggtactgaaaatgcaggcattacaccagctgttacacaagcacaagcatgctctgtaagagctttacatttctgagattttgtatagtgattgagatgtctattttattattgatagactattactaatgtcaatattgaacactaccctggaattcctgcctggttttcctacccaaattgtaccactccttgaagaactacaggcacagtaaaaaaaatatgggcgtattatgtgaactaaaagagttctaaaggagttcttaaaggagtggtagaatttgggtaggaaagtgattaagtccaacttaaaaccaacagtctcaaacgtctacaactacaatgtccaatgagccactagccacatgaggctatttaagtaaatttagtttaaaatccagttttcgaattacattagccacattgtcaagtgttcaaatcacaggtggttagtggctactgtactgggcaacatacattatagaacattttcattataggaagttttattgggcagtgctgctcttaaatcctaccttccactcaactcccatacaactttcttttgtacattttgatactttctacctaatggcagctcttccaaaatagctgctttaaactctgatttaattttcaatatttggtttcatttttcaacaggccaagaggcctctggtaatgaagtgctatatatatatatatatgacggagtctcactgtgctgcccaggctacagtgcagtggctcgatcttggctctctccaatctccgccttgcaggttttcaagcaattctcctgcctcagcctccttagtagctgggaccacagacatctgtcaccacacccagctaactttttgtatttttggtagagacggggtttcgccatattgactgggctggtctcaaactcctgacctcaagtgatccacccaccttggtctcccaaagtgctgggattacatgcgtgagccaccacacttggcctacattttttctttatataccagaacatctataacaggcaccttatctactcattagtgaagagataattggattacacaggcaggcttgtttactacatccagaatgtagaaactgctttcttcaacatcttggttctagctagtaataacaatataattctttggcagatattcagaataacattttaaactacattttcttagaaaattgcattcttgtagtgagcagtgtatggtctcttttgttcagaatttaaaactgataaccaatgaaagccttttctcttattcctctaccgtcatttacatgataatctgaagctaatatgacaatatttaaatactaagtggtactagggaactacaagaatactgtaaagcttaagccattgttatcactgtcatttagcatttaataacaaaactatacagaattatgtgcataccaatgaatgttttgtaccatctagttaaattttttaaataaagttttatgggttaagcagaagacaactgtcatactgaattttattaaaagtatatatacttcaaattcaaagcatcccttaggacccacagaatatattaaaactaccacccttaaattttatatttttgctttaagacagacaatgcaaaggtaactggcaagaggtgagcaaatgttttagaacatttatattattgcttaaaatgagatttgaaattgtaataaaattcttggttatgaagtctgatgtcttctttgagcaccagtttaaaaggaaacatttcaaacagtaaaataaatcagtgtgtactttatt

SEQ ID NO: 351548 - DNA, 3985 bp, Homo sapiens
cggccgcgcagccgctgccgcccacccgcacccgccgtcatgctccgggccgcgctgcccgcgctcctgctgccgttgctgggcctcgccgctgctgccgtcgcggactgtccttcatctacttggattcagttccaagacagttgttacatttttctccaagaagccatcaaagtagaaagcatagaggatgtcagaaatcagtgtactgaccatggagcggacatgataagcatacataatgaagaagaaaatgcttttatactggatactttgaaaaagcaatggaaaggcccagatgatatcctactaggcatgttttatgacacagatgatgcgagtttcaagtggtttgataattcaaatatgacatttgataagtggacagaccaagatgatgatgaggatttagttgacacctgtgcttttctgcacatcaagacaggtgaatggaaaaaaggaaattgtgaagtttcttctgtggaaggaacactatgcaaaacagctatcccatacaaaaggaaatatttatcagataaccacattttaatatcagcattggtgattgctagcacggtaattttgacagttttgggagcaatcatttggttcctgtacaaaaaacattctgattctcgtttcaccacagttttttcaaccgcaccccaatcaccttataatgaagactgtgttttggtagttggagaagaaaatgaatatcctgttcaatttgactaagtttttggtaatcttgcactaagacatcaacaaaatgccctggcagagataacttgggaaagattttaatataaaacttgacattggatattagagctttaatggtattccttattccagtaacatttttatgtactcatctgctgtgaaaagtctttaggttcattaaaaaaacaggttttagaaatgatcttagatctaatatagtgattttaagcatcccgtcaaaggcagaatctgtcacttgaatgaaggaaagcttaaagcccaagcagataaaaataaaagcccagcctatttgtcttgcctgctgtatcttccctatttagttgacccactttagtttatatgtttattagtaaacatgaaatggggaataagtgattttaagtacatcccatacatttaaatatctttgataattgttatttttttggcagataattcctctagaatgtgtatctttttatgatttagatgaagaaaattttacaacttttaacaccccacaccaattttagtttcattacttttacacacaccattttatcacaaatgactcaagttttaatgaatgtttataaattatttgaaacaaaatatgatcgctgtgtccaggatggcatagagaaagctggcaattaggttaacacttacatattatagtgcccctttaaggatttctctcttgccaccataccttttgtactttcccctatacaagatgtatctcattctcctcaagcatttataaatttttccttcaatgacatgaaaactgtgcaagcaaaaaccgaagaaaaacacttaagtacaactgtagtgacagtgatcaaagttttcagtgcatttattgtacattttaagaaaaaggtgaaaatcatttggggagtaaaaaaatgaaaaagctgaaacgagtaattttcctcaccatcaataaaccaaaaacaggaaagataaagaatgtataaatttcacgtaaattagtcacgtatcacttatcaatggggatacgttctaagaaatgcatagttagggaatcttctgtgaaaatcagcttgtatttacacaaacccagatggtagagcctattttgtcccaaacctacacagcatgttactgtgctgaatactgcagacaattgtaacacaatatttgtgtatctaaatatagaaaaggtacagtaaaaatatggtctactaaggaaacactgttctatatgtggtccattactgactgaagtatactgtctagaagtctgaggctcaaagaaaagtaatccctcttctgaatccacaccccatcaattatcttactttcttctggggagatagatagatatactatctcactagcttgactaatggcaacaaagttccagcttgtgtagtctctttttattgaccacatgaatcgaaaacactcatcacaattaatggcactatcattaatgagacatgagtaactaaaaagtgatagaaaactattaacagtgcggctacatggtactgaaaatgcaggcattacaccagctgttacacaagcacaagcatgctctgtaagagctttacatttctgagattttgtatagtgattgagatgtctattttattattgatagactattactaatgtcaatattgaacactaccctggaattcctgcctggttttcctacccaaattgtaccactccttgaagaactacaggcacagtaaaaaaaatatgggcgtattatgtgaactaaaagagttctaaaggagttcttaaaggagtggtagaatttgggtaggaaagtgattaagtccaacttaaaaccaacagtctcaaacgtctacaactacaatgtccaatgagccactagccacatgaggctatttaagtaaatttagtttaaaatccagttttcgaattacattagccacattgtcaagtgttcaaatcacaggtggttagtggctactgtactgggcaacatacattatagaacattttcattataggaagttttattgggcagtgctgctcttaaatcctaccttccactcaactcccatacaactttcttttgtacattttgatactttctacctaatggcagctcttccaaaggccaagaggcctctggtaatgaagtgctatatatatatatatatgacggagtctcactgtgctgcccaggctacagtgcagtggctcgatcttggctctctccaatctccgccttgcaggttttcaagcaattctcctgcctcagcctccttagtagctgggaccacagacatctgtcaccacacccagctaactttttgtatttttggtagagacggggtttcgccatattgactgggctggtctcaaactcctgacctcaagtgatccacccaccttggtctcccaaagtgctgggattacatgcgtgagccaccacacttggcctacattttttctttatataccagaacatctataacaggcaccttatctactcattagtgaagagataattggattacacaggcaggcttgtttactacatccagaatgtagaaactgctttcttcaacatcttggttctagctagtaataacaatataattctttggcagatattcagaataacattttaaactacattttcttagaaaattgcattcttgtagtgagcagtgtatggtctcttttgttcagaatttaaaactgataaccaatgaaagccttttctcttattcctctaccgtcatttacatgataatctgaagctaatatgacaatatttaaatactaagtggtactagggaactacaagaatactgtaaagcttaagccattgttatcactgtcatttagcatttaataacaaaactatacagaattatgtgcataccaatgaatgttttgtaccatctagttaaattttttaaataaagttttatgggttaagcagaagacaactgtcatactgaattttattaaaagtatatatacttcaaattcaaagcatcccttaggacccacagaatatattaaaactaccacccttaaattttatatttttgctttaagacagacaatgcaaaggtaactggcaagaggtgagcaaatgttttagaacatttatattattgcttaaaatgagatttgaaattgtaataaaattcttggttatgaagtctgatgtcttctttgagcaccagtttaaaaggaaacatttcaaacagtaaaataaatcagtgtgtactttatt

SEQ ID NO: 351549 - DNA, 1022 bp, Homo sapiens
cggccgcgcagccgctgccgcccacccgcacccgccgtcatgctccgggccgcgctgcccgcgctcctgctgccgttgctgggcctcgccgctgctgccgtcgcggactgtccttcatctacttggattcagttccaagacagttgttacatttttctccaagaagccatcaaagtagaaagcatagaggatgtcagaaatcagtgtactgaccatggagcggacatgataagcatacataatgaagaagaaaatgcttttatactggatactttgaaaaagcaatggaaaggcccagatgatatcctactaggcatgttttatgacacagatgatgcgagtttcaagtggtttgataattcaaatatgacatttgataagtggacagaccaagatgatgatgaggatttagttgacacctgtgcttttctgcacatcaagacaggcgtactgacaaacggacagggggctgtttatttagacgagggtgcactatgccctatcaggctccctggccacctgcgtcgcctctctgctcctcctctcttactgttgcctacaatttttatcatctttttaccgttcaccttcctcttcctcccctttctacctctcgcctccctctctccttttcctatcctctcattcccactcataatgtacgtggtcctcattgtcacgcgggccctcgctagacgctggcgtgcgcggttagcggttcatgtgatccgtgacttcactttcgtgttgcctgtgtgcctcactaattcgtaatctcttattgttctctttgttcttgttttgttctttttagttctccgtctgttcttattttcagcgctcgggcccagtcactccgtcctctcttccgcctcttcttccctccacctagtttcccgtcagctttcaatcactatatgtttcctcctcactccccccgtcatctcttttatctctgaaggtccgcttctttctttcattatgctcgatatctctctatcacttcgccgtccctactccct

SEQ ID NO: 351550 - DNA, 730 bp, Homo sapiens
actataacttcaaaacatcagaaatagtgagtacatccatactaaggtagttagggtcacagttgtttaattttatgacatttgttttctagactctccaaccagaatcctcttttttcctttacctcattattgtcttttcctcaagatcccgtattcttttccaccaaccaagctaatgcatgttgttagccctctacatctttctttaaaaactaagttcaaaatagacaacagagacaactaatgaggcaaagaaatatggattttaggctatgaatatattgatattaagctactaataaaagggtttatttttaatgattgtgaacatgtttaaagtcaatcctataataaagcataattaaattctaatttttattttcttttgtattttagtcccatacaaaaggaaatatttatcaggtaagtaatgatttggtctttaaatttttcccacaattaaaaatatatcaaaattctggcatattaaaatacattacagatccctttttaaaattatgtaatataaagtagaacaatttttataagaatgtagaaaggtctcttagtaataagactcaacattttaaatatattctacaatatgtagttttgtctggcttcttttactcgggaatatttttttagattcatctgtgttgtgcacattcactgaattttttccctaagtgtcataatactttataaatatatcatatattgtcca

SEQ ID NO: 351551 - DNA, 993 bp, Homo sapiens
cggccgcgcagccgctgccgcccacccgcacccgccgtcatgctccgggccgcgctgcccgcgctcctgctgccgttgctgggcctcgccgctgctgccgtcgcgggtaagcccttacgtagtccctcgccgggaccgtgcgcgaccgccttcgcccccttcccaacgcacgctcttcgtccccgcgcacccgagggcggccgcagacgcaacacccggccggacatcccgcccttccctgcacgcccgtcccccgtgggtcctggctccgggtcacctctcacccgcctgccctcggggaggggaggtggccgagaataagggagggctctgtcttcctcggagtccacatcctcaccgcagaccccactccgcggggagggaacccccaaattaggccagttggccggagaactgagggacttggagtcgcacgacgggcgccgtttcagggcaatttcgggctgaaatgagaagcggggacgttggtggcgatttcccctgctggtgcgcggccggagtggggttgctgggatgggggtgggggccggaggaagtaggccctcttttgcaagcagcgctgtttgtctagttggttggtgttcaagttgtttaaacaggaaaacagttcagcgcaaataacccctggatggaagaggaacgggaataggcaaagcttggatttcactgaaatcaaggagttttaaagttctagtctgctgttgtgcaagtgacatctgaaaaatcacacacgtgatcattcatttacaaaacgactcgtgaggaaaatgcacaattctattgaccgtggtctttatttttaaaaaatttccatacaagcatgtcaaaaatatgtggatggggagactctggagaacacagacttccaaaaacaccactgactgaataattccaggaattaaagagcaaaataaacaagaactaaatgagtacttgtgtgggcttaaataaagtgcaagagatttaaataaa

SEQ ID NO: 351552 - DNA, 3986 bp, Homo sapiens
cggccgcgcagccgctgccgcccacccgcacccgccgtcatgctccgggccgcgctgcccgcgctcctgctgccgttgctgggcctcgccgctgctgccgtcgcggactgtccttcatctacttggattcagttccaagacagttgttacatttttctccaagaagccatcaaagtagaaagcatagaggatgtcagaaatcagtgtactgaccatggagcggacatgataagcatacataatgaagaagaaaatgcttttatactggatactttgaaaaagcaatggaaaggcccagatgatatcctactaggcatgttttatgacacagatgatgcgagtttcaagtggtttgataattcaaatatgacatttgataagtggacagaccaagatgatgatgaggatttagttgacacctgtgcttttctgcacatcaagacaggtgaatggaaaaaaggaaattgtgaagtttcttctgtggaaggaacactatgcaaaacagctatcccatacaaaaggaaatatttatcagataaccacattttaatatcagcattggtgattgctagcacggtaattttgacagttttgggagcaatcatttggttcctgtacaaaaaacattctgattctcgtttcaccacagttttttcaaccgcaccccaatcaccttataatgaagactgtgttttggtagttggagaagaaaatgaatatcctgttcaatttgactaagtttttggtaatcttgcactaagacatcaacaaaatgccctggcagagataacttgggaaagattttaatataaaacttgacattggatattagagctttaatggtattccttattccagtaacatttttatgtactcatctgctgtgaaaagtctttaggttcattaaaaaaacaggttttagaaatgatcttagatctaatatagtgattttaagcatcccgtcaaaggcagaatctgtcacttgaatgaaggaaagcttaaagcccaagcagataaaaataaaagcccagcctatttgtcttgcctgctgtatcttccctatttagttgacccactttagtttatatgtttattagtaaacatgaaatggggaataagtgattttaagtacatcccatacatttaaatatctttgataattgttatttttttggcagataattcctctagaatgtgtatctttttatgatttagatgaagaaaattttacaacttttaacaccccacaccaattttagtttcattacttttacacacaccattttatcacaaatgactcaagttttaatgaatgtttataaattatttgaaacaaaatatgatcgctgtgtccaggatggcatagagaaagctggcaattaggttaacacttacatattatagtgcccctttaaggatttctctcttgccaccataccttttgtactttcccctatacaagatgtatctcattctcctcaagcatttataaatttttccttcaatgacatgaaaactgtgcaagcaaaaaccgaagaaaaacacttaagtacaactgtagtgacagtgatcaaagttttcagtgcatttattgtacattttaagaaaaaggtgaaaatcatttggggagtaaaaaaatgaaaaagctgaaacgagtaattttcctcaccatcaataaaccaaaaacaggaaagataaagaatgtataaatttcacgtaaattagtcacgtatcacttatcaatggggatacgttctaagaaatgcatagttagggaatcttctgtgaaaatcagcttgtatttacacaaacccagatggtagagcctattttgtcccaaacctacacagcatgttactgtgctgaatactgcagacaattgtaacacaatatttgtgtatctaaatatagaaaaggtacagtaaaaatatggtctactaaggaaacactgttctatatgtggtccattactgactgaagtatactgtctagaagtctgaggctcaaagaaaagtaatccctcttctgaatccacaccccatcaattatcttactttcttctggggagatagatagatatactatctcactagcttgactaatggcaacaaagttccagcttgtgtagtctctttttattgaccacatgaatcgaaaacactcatcacaattaatggcactatcattaatgagacatgagtaactaaaaagtgatagaaaactattaacagtgcggctacatggtactgaaaatgcaggcattacaccagctgttacacaagcacaagcatgctctgtaagagctttacatttctgagattttgtatagtgattgagatgtctattttattattgatagactattactaatgtcaatattgaacactaccctggaattcctgcctggttttcctacccaaattgtaccactccttgaagaactacaggcacagtaaaaaaaatatgggcgtattatgtgaactaaaagagttctaaaggagttcttaaaggagtggtagaatttgggtaggaaagtgattaagtccaacttaaaaccaacagtctcaaacgtctacaactacaatgtccaatgagccactagccacatgaggctatttaagtaaatttagtttgtggttagtggctactgtactgggcaacatacattatagaacattttcattataggaagttttattgggcagtgctgctcttaaatcctaccttccactcaactcccatacaactttcttttgtacattttgatactttctacctaatggcagctcttccaaaatagctgctttaaactctgatttaattttcaatatttggtttcatttttcaacaggccaagaggcctctggtaatgaagtgctatatatatatatatatgacggagtctcactgtgctgcccaggctacagtgcagtggctcgatcttggctctctccaatctccgccttgcaggttttcaagcaattctcctgcctcagcctccttagtagctgggaccacagacatctgtcaccacacccagctaactttttgtatttttggtagagacggggtttcgccatattgactgggctggtctcaaactcctgacctcaagtgatccacccaccttggtctcccaaagtgctgggattacatgcgtgagccaccacacttggcctacattttttctttatataccagaacatctataacaggcaccttatctactcattagtgaagagataattggattacacaggcaggcttgtttactacatccagaatgtagaaactgctttcttcaacatcttggttctagctagtaataacaatataattctttggcagatattcagaataacattttaaactacattttcttagaaaattgcattcttgtagtgagcagtgtatggtctcttttgttcagaatttaaaactgataaccaatgaaagccttttctcttattcctctaccgtcatttacatgataatctgaagctaatatgacaatatttaaatactaagtggtactagggaactacaagaatactgtaaagcttaagccattgttatcactgtcatttagcatttaataacaaaactatacagaattatgtgcataccaatgaatgttttgtaccatctagttaaattttttaaataaagttttatgggttaagcagaagacaactgtcatactgaattttattaaaagtatatatacttcaaattcaaagcatcccttaggacccacagaatatattaaaactaccacccttaaattttatatttttgctttaagacagacaatgcaaaggtaactggcaagaggtgagcaaatgttttagaacatttatattattgcttaaaatgagatttgaaattgtaataaaattcttggttatgaagtctgatgtcttctttgagcaccagtttaaaaggaaacatttcaaacagtaaaataaatcagtgtgtactttatt

SEQ ID NO: 351553 - DNA, 229 bp, Homo sapiens
gcggccgcctactactactactgctcgaattcaagcttctaacgatgtacggggacatgatttctacctccaaagtgtgaagacaagtaaaacaatgtttctaaattgtcttattttgttggcggagaagattacaatggctattagtgctacatttggtcaaatgtaatcacttaaatagcttcttgtcaccttaaactaaagcagaataaaaagtatcctttgaaat

SEQ ID NO: 351554 - DNA, 244 bp, Homo sapiens
ccacctcggcctcccaaagtgttgggattataggcgtgacccagttctaggtcccaattctactgcaaatagtatcatggcatcttatcagcaacagaagacttcggttcctgttcttggttagtattttttctcatttaatattacaatactaagcagaaggactatctttctgtaagtattgagaagatcagcagtataaggagagattggatacaatttttcactacaaaaaattgactac

SEQ ID NO: 351555 - DNA, 6040 bp, Homo sapiens
cgtgcgcacgcgcgctgctctcaggtccgcaggttccacccccccccccgccccccccaattacagtgctttggggttcgacatcaaaacagagatcaaatacaaaagtttgggcagatgggcaagagggcagagggacaggggacgcggccaatgtagctcctctacctctacggtgccaggcctacaaagaaggccggccgccgtaagtgaccagaagcgggcccggcctcgccccctccgcctggtgacgtcactcccgcgccgcactcccagtgctgcggctgcctagttgacgcacccattgagtcgctggcttctttgcagcgcttcagcgttttcccctggagggcgcctccatccttggaggcctagtgccgtcggagagagagcgggagccgcggacagagacgcgtgcgcaattcggagccgactctgggtgcggactgtgggagctgactctgggtagccggctgcgcgtggctggggaggcgaggccggacgcacctctgtttgggggtcctcaggggacggtgctcattggttcagaacatggcctgatagaagtagaccctgtctcaagagaagtgaaaaatgaagtttctttggtggcagaaggctttctcccagaggatggaagtggccgcattgttggtgttcaggacttgctggatcaggagtctgtgtgtgtggccacagcctctggagacgtcatactctgcagtctcagcacacaacagctggagtgtgttgggagtgtagccagtggtatctctgttatgagttggagtcctgaccaagagctggtgcttcttgccacaggtcaacagaccctgattatgatgacaaaagattttgagccaatcctggagcagcagatccatcaggatgattttggtgaaagcaagtttatcactgttggatggggtaggaaggagacacagttccatggatcagaaggcagacaagcagcttttcagatgcaaatgcatgagtctgctttgccctgggatgaccatagaccacaagttacctggcggggggatggacagttttttgctgtgagtgttgtttgcccagaaacaggggctcggaaggtcagagtgtggaaccgagagtttgctttgcagtcaaccagtgagcctgtggcaggactgggaccagccctggcttggaaaccctcaggcagtttgattgcatctacacaagataaacccaaccagcaggatattgtgttttttgagaaaaatggactccttcatggacactttacacttcccttccttaaagatgaggttaaggtaaatgacttgctctggaatgcagattcctctgtgcttgcagtctggctggaagaccttcagagagaagaaagctccattccgaaaacctgtgttcagctctggactgttggaaactatcactggtatctcaagcaaagtttatccttcagcacctgtgggaagagcaagattgtgtctctgatgtgggaccctgtgaccccataccggctgcatgttctctgtcagggctggcattacctcgcctatgattggcactggacgactgaccggagcgtgggagataattcaagtgacttgtccaatgtggctgtcattgatggaaacagggtgttggtgacagtcttccggcagactgtggttccgcctcccatgtgcacctaccaactgctgttcccacaccctgtgaatcaagtcacattcttagcacaccctcaaaagagtaatgaccttgctgttctagatgccagtaaccagatttctgtttataaatgtggtgattgtccaagtgctgaccctacagtgaaactgggagctgtgggtggaagtggatttaaagtttgccttagaactcctcatttggaaaagagatacaaaatccagtttgagaataatgaagatcaagatgtaaacccgctgaaactaggccttctcacttggattgaagaagacgtcttcctggctgtaagccacagtgagttcagcccccggtctgtcattcaccatttgactgcagcttcttctgagatggatgaagagcatggacagctcaatgtcagttcatctgcagcggtggatggggtcataatcagtctatgttgcaattccaagaccaagtcagtagtattacagctggctgatggccagatatttaagtacctttgggagtcaccttctctggctattaaaccatggaagaactctggtggatttcctgttcggtttccttatccatgcacccagaccgaattggccatgattggagaagaggaatgtgtccttggtctgactgacaggtgtcgctttttcatcaatgacattgaggttgcgtcaaatatcacgtcatttgcagtatatgatgagtttttattgttgacaacccattcccatacctgccagtgtttttgcctgagggatgcttcatttaaaacattacaggccggcctgagcagcaatcatgtgtcccatggggaagttctgcggaaagtggagaggggttcacggattgtcactgttgtgccccaggacacaaagcttgtattacagatgccaaggggaaacttagaagttgttcatcatcgagccctggttttagctcagattcggaagtggttggacaaacttatgtttaaagaggcatttgaatgcatgagaaagctgagaatcaatctcaatctgatttatgatcataaccctaaggtgtttcttggaaatgtggaaaccttcattaaacagatagattctgtgaatcatattaacttgttttttacagaattgaaagaagaagatgtcacgaagaccatgtaccctgcaccagttaccagcagtgtctacctgtccagggatcctgacgggaataaaatagaccttgtctgcgatgctatgagagcagtcatggagagcataaatcctcataaatactgcctatccatacttacatctcatgtaaagaagacaaccccagaactggaaattgtactgcaaaaagtacacgagcttcaaggaaatgctccctctgatcctgatgctgtgagtgctgaagaggccttgaaatatttgctgcatctggtagatgttaatgaattatatgatcattctcttggcacctatgactttgatttggtcctcatggtagctgagaagtcacagaaggatcccaaagaatatcttccatttcttaatacacttaagaaaatggaaactaattatcagcggtttactatagacaaatacttgaaacgatatgaaaaagccattggccacctcagcaaatgtggacctgagtacttcccagaatgcttaaacttgataaaagataaaaacttgtataacgaagctctgaagttatattcaccaagctcacaacagtaccaggatatcagcattgcttatggggagcacctgatgcaggagcacatgtatgagccagcggggctcatgtttgcccgttgcggtgcccacgagaaagctctctcagcctttctgacatgtggcaactggaagcaagccctctgtgtggcagcccagcttaactttaccaaagaccagctggtgggcctcggcagaactctggcaggaaagctggttgagcagaggaagcacattgatgcggccatggttttggaagagtgtgcccaggattatgaagaagctgtgctcttgctgttagaaggagctgcctgggaagaagctttgaggctggtatacaaatataacagactggatattatagaaaccaacgtaaagccttccattttagaagcccagaaaaattatatggcatttctggactctcagacagccacattcagtcgccacaagaaacgtttattggtagttcgagagctcaaggagcaagcccagcaggcaggtctggatgatgaggtaccccacgggcaagagtcagacctcttctctgaaactagcagtgtcgtgagtggcagtgagatgagtggcaaatactcccatagtaactccaggatatcagcgagatcatccaagaatcgccgaaaagcggagcggaagaagcacagcctcaaagaaggcagtccgctggaggacctggccctcctggaggcactgagtgaagtggtgcagaacactgaaaacctgaaagatgaagtataccatattttaaaggtactctttctctttgagtttgatgaacaaggaagggaattacagaaggcctttgaagatacgctgcagttgatggaaaggtcacttccagaaatttggactcttacttaccagcagaattcagctaccccggttctaggtcccaattctactgcaaatagtatcatggcatcttatcagcaacagaagacttcggttcctgttcttgatgctgagctttttataccaccaaagatcaacagaagaacccagtggaagctgagcctgctagactgagtgactgcagttaggagggatccgacagagaagaccatttccactcattcctgttgtcctaccaccccttgctctttgagggctggctattgagaactggaaagagtaaaatgataacttaccttagcattgccaagaacttcagcagacaacaagcaattctatttattttatgttgtgtatacatcttgatcattagcaagacattaagctttaaccattatggcaccattttgtgagaatgattgttctttcacttgggctgtttgagagcataattatggtaatcatgagattaatgtttcatgatttctacctccaaagtgtgaagacaagtaaaacaatgtttctaaattgtcttattttgttggcggagaagattacaatggctattagtgctacatttggtcaaatgtaatcacttaaatagcttcttgtcaccttaaactaaagcagaataaaaagtatcctttgaaattataagccctcctttgctgacagctattattttgtaacatcttaccaggtcatgtgctttcagttataactgggctgagcctcctataattacaatgtctatagggactgttttactgcctgtgtattttctgctagagagttagcaatgttagagctagaacagattagaatttctaaacagtatcatgcacagttggtgtgagtgatcagtgtgcattgtatggcatgcatggttgtgaattattctctgttctccaaatactgtttctttaactcagatatttttgttagtgtctaggccacttcatttatttttcgtcatggtactttactgacttctctttattcaattctccacgccctcaccaaaaaaaactgtctcaaaatgagaatattttattttcatggtgagtctagaaaacgcccacttcattctgattaaaaattcttccatgttttaaatatcagaaccagacctttcttactgtgtatcttagcccatttgtgtctctataacaacaaccagctttcaaaggaactaatagagtgaaaactcactcattaccacgaggatggcacaagcgattcacgtaggatctgcccctgtgaccaaaacacctcccattgggccccacttccaacactggtgatcacatttcaacatgaggtttagggaaacaaatgcctaaactacagcactgtacataaactaacaggaaatgctgcttttgatcctcaaagaagtgatatagccaaaattgtaatttaagaagcctttgtcagtatagcaagatgttaactatagaatcaatctaggagtattcactgtaaaattcaacttttctgtatgtttgaacattttcacaatctcataggagtttttaaaaagaagagaaagaagatatactttgctttggagaaatctactttttgacttacatgggtttgctgtaattaagtgcccaatattgaaaggctgcaagtactttgtaatcactctttggcatgggtaaataagcatggtaacttatattgaaatatagtgctcttgctttggataactgtaaagggacccatgctgatagactggaaatagaagtaaatgtgtttattgataaaaaaaa

SEQ ID NO: 351556 - DNA, 3478 bp, Homo sapiens
aggtggatcttagaggtccctccctatgagacatcacatcgagccctggtatagctcagatacggaagtggttggaccaacttatgtttaaagaggcatttgaatgcatgagaaagctgagaatcaatctcaatctgatttatgatcataaccctaaggtgtttcttggaaatgtggaaaccttcattaaacagatagattctgtgaatcatattaacttgttttttacagaattgaaagaagaagatgtcacgaagaccatgtaccctgcaccagttaccagcagtgtctacctgtccagggatcctgacgggaataaaatagaccttgtctgcgatgctatgagagcagtcatggagagcataaatcctcataaatactgcctatccatacttacatctcatgtaaagaagacaaccccagaactggaaattgtactgcaaaaagtacacgagcttcaaggaaatgctccctctgatcctgatgctgtgagtgctgaagaggccttgaaatatttgctgcatctggtagatgttaatgaattatatgatcattctcttggcacctatgactttgatttggtcctcatggtagctgagaagtcacagaaggatcccaaagaatatcttccatttcttaatacacttaagaaaatggaaactaattatcagcggtttactatagacaaatacttgaaacgatatgaaaaagccattggccacctcagcaaatgtggacctgagtacttcccagaatgcttaaacttgataaaagataaaaacttgtataacgaagctctgaagttatattcaccaagctcacaacagtaccaggatatcagcattgcttatggggagcacctgatgcaggagcacatgtatgagccagcggggctcatgtttgcccgttgcggtgcccacgagaaagctctctcagcctttctgacatgtggcaactggaagcaagccctctgtgtggcagcccagcttaactttaccaaagaccagctggtgggcctcggcagaactctggcaggaaagctggttgagcagaggaagcacattgatgcggccatggttttggaagagtgtgcccaggattatgaagaagctgtgctcttgctgttagaaggagctgcctgggaagaagctttgaggctggtatacaaatataacagactggatattatagaaaccaacgtaaagccttccattttagaagcccagaaaaattatatggcatttctggactctcagacagccacattcagtcgccacaagaaacgtttattggtagttcgagagctcaaggagcaagcccagcaggcaggtctggatgatgaggtaccccacgggcaagagtcagacctcttctctgaaactagcagtgtcgtgagtggcagtgagatgagtggcaaatactcccatagtaactccaggatatcagcgagatcatccaagaatcgccgaaaagcggagcggaagaagcacagcctcaaagaaggcagtccgctggaggacctggccctcctggaggcactgagtgaagtggtgcagaacactgaaaacctgaaagatgaagtataccatattttaaaggtactctttctctttgagtttgatgaacaaggaagggaattacagaaggcctttgaagatacgctgcagttgatggaaaggtcacttccagaaatttggactcttacttaccagcagaattcagctaccccggttctaggtcccaattctactgcaaatagtatcatggcatcttatcagcaacagaagacttcggttcctgttcttgatgctgagctttttataccaccaaagatcaacagaagaacccagtggaagctgagcctgctagactgagtgactgcagttaggagggatccgacagagaagaccatttccactcattcctgttgtcctaccaccccttgctctttgagggctggctattgagaactggaaagagtaaaatgataacttaccttagcattgccaagaacttcagcagacaacaagcaattctatttattttatgttgtgtatacatcttgatcattagcaagacattaagctttaaccattatggcaccattttgtgagaatgattgttctttcacttgggctgtttgagagcataattatggtaatcatgagattaatgtttcatgatttctacctccaaagtgtgaagacaagtaaaacaatgtttctaaattgtcttattttgttggcggagaagattacaatggctattagtgctacatttggtcaaatgtaatcacttaaatagcttcttgtcaccttaaactaaagcagaataaaaagtatcctttgaaattataagccctcctttgctgacagctattattttgtaacatcttaccaggtcatgtgctttcagttataactgggctgagcctcctataattacaatgtctatagggactgttttactgcctgtgtattttctgctagagagttagcaatgttagagctagaacagattagaatttctaaacagtatcatgcacagttggtgtgagtgatcagtgtgcattgtatggcatgcatggttgtgaattattctctgttctccaaatactgtttctttaactcagatatttttgttagtgtctaggccacttcatttatttttcgtcatggtactttactgacttctctttattcaattctccacgccctcaccaaaaaaaactgtctcaaaatgagaatattttattttcatggtgagtctagaaaacgcccacttcattctgattaaaaattcttccatgttttaaatatcagaaccagacctttcttactgtgtatcttagcccatttgtgtctctataacaacaaccagctttcaaaggaactaatagagtgaaaactcactcattaccacgaggatggcacaagcgattcacgtaggatctgcccctgtgaccaaaacacctcccattgggccccacttccaacactggtgatcacatttcaacatgaggtttagggaaacaaatgcctaaactacagcactgtacataaactaacaggaaatgctgcttttgatcctcaaagaagtgatatagccaaaattgtaatttaagaagcctttgtcagtatagcaagatgttaactatagaatcaatctaggagtattcactgtaaaattcaacttttctgtatgtttgaacattttcacaatctcataggagtttttaaaaagaagagaaagaagatatactttgctttggagaaatctactttttgacttacatgggtttgctgtaattaagtgcccaatattgaaaggctgcaagtactttgtaatcactctttggcatgggtaaataagcatggtaacttatattgaaatatagtgctcttgctttggataactgtaaagggacccatgctgatagactggaaatagaagtaaatgtgtttattgataaaaaaaa

SEQ ID NO: 351557 - DNA, 6129 bp, Homo sapiens
cgtgcgcacgcgcgctgctctcaggtccgcaggttccacccccccccccgccccccccaattacagtgctttggggttcgacatcaaaacagagatcaaatacaaaagtttgggcagatgggcaagagggcagagggacaggggacgcggccaatgtagctcctctacctctacggtgccaggcctacaaagaaggccggccgccgtaagtgaccagaagcgggcccggcctcgccccctccgcctggtgacgtcactcccgcgccgcactcccagtgctgcggctgcctagttgacgcacccattgagtcgctggcttctttgcagcgcttcagcgttttcccctggagggcgcctccatccttggaggcctagtgccgtcggagagagagcgggagccgcggacagagacgcgtgcgcaattcggagccgactctgggtgcggactgtgggagctgactctgggtagccggctgcgcgtggctggggaggcgaggccggacgcacctctgtttgggggtcctcagagattaatgattcatcaagggatagttgtacttgtctcgtgggaatcacttcatcatgcgaaatctgaaattatttcggaccctggagttcagggatattcaaggtccagggaatcctcagtgcttctctctccgaactgaacaggggacggtgctcattggttcagaacatggcctgatagaagtagaccctgtctcaagagaagtgaaaaatgaagtttctttggtggcagaaggctttctcccagaggatggaagtggccgcattgttggtgttcaggacttgctggatcaggagtctgtgtgtgtggccacagcctctggagacgtcatactctgcagtctcagcacacaacagctggagtgtgttgggagtgtagccagtggtatctctgttatgagttggagtcctgaccaagagctggtgcttcttgccacaggtcaacagaccctgattatgatgacaaaagattttgagccaatcctggagcagcagatccatcaggatgattttggtgaaagcaagtttatcactgttggatggggtaggaaggagacacagttccatggatcagaaggcagacaagcagcttttcagatgcaaatgcatgagtctgctttgccctgggatgaccatagaccacaagttacctggcggggggatggacagttttttgctgtgagtgttgtttgcccagaaacaggggctcggaaggtcagagtgtggaaccgagagtttgctttgcagtcaaccagtgagcctgtggcaggactgggaccagccctggcttggaaaccctcaggcagtttgattgcatctacacaagataaacccaaccagcaggatattgtgttttttgagaaaaatggactccttcatggacactttacacttcccttccttaaagatgaggttaaggtaaatgacttgctctggaatgcagattcctctgtgcttgcagtctggctggaagaccttcagagagaagaaagctccattccgaaaacctgtgttcagctctggactgttggaaactatcactggtatctcaagcaaagtttatccttcagcacctgtgggaagagcaagattgtgtctctgatgtgggaccctgtgaccccataccggctgcatgttctctgtcagggctggcattacctcgcctatgattggcactggacgactgaccggagcgtgggagataattcaagtgacttgtccaatgtggctgtcattgatggaaacagggtgttggtgacagtcttccggcagactgtggttccgcctcccatgtgcacctaccaactgctgttcccacaccctgtgaatcaagtcacattcttagcacaccctcaaaagagtaatgaccttgctgttctagatgccagtaaccagatttctgtttataaatgtggtgattgtccaagtgctgaccctacagtgaaactgggagctgtgggtggaagtggatttaaagtttgccttagaactcctcatttggaaaagagatacaaaatccagtttgagaataatgaagatcaagatgtaaacccgctgaaactaggccttctcacttggattgaagaagacgtcttcctggctgtaagccacagtgagttcagcccccggtctgtcattcaccatttgactgcagcttcttctgagatggatgaagagcatggacagctcaatgtcagttcatctgcagcggtggatggggtcataatcagtctatgttgcaattccaagaccaagtcagtagtattacagctggctgatggccagatatttaagtacctttgggagtcaccttctctggctattaaaccatggaagaactctggtggatttcctgttcggtttccttatccatgcacccagaccgaattggccatgattggagaagaggaatgtgtccttggtctgactgacaggtgtcgctttttcatcaatgacattgaggttgcgtcaaatatcacgtcatttgcagtatatgatgagtttttattgttgacaacccattcccatacctgccagtgtttttgcctgagggatgcttcatttaaaacattacaggccggcctgagcagcaatcatgtgtcccatggggaagttctgcggaaagtggagaggggttcacggattgtcactgttgtgccccaggacacaaagcttgtattacagatgccaaggggaaacttagaagttgttcatcatcgagccctggttttagctcagattcggaagtggttggacaaacttatgtttaaagaggcatttgaatgcatgagaaagctgagaatcaatctcaatctgatttatgatcataaccctaaggtgtttcttggaaatgtggaaaccttcattaaacagatagattctgtgaatcatattaacttgttttttacagaattgaaagaagaagatgtcacgaagaccatgtaccctgcaccagttaccagcagtgtctacctgtccagggatcctgacgggaataaaatagaccttgtctgcgatgctatgagagcagtcatggagagcataaatcctcataaatactgcctatccatacttacatctcatgtaaagaagacaaccccagaactggaaattgtactgcaaaaagtacacgagcttcaaggaaatgctccctctgatcctgatgctgtgagtgctgaagaggccttgaaatatttgctgcatctggtagatgttaatgaattatatgatcattctcttggcacctatgactttgatttggtcctcatggtagctgagaagtcacagaaggatcccaaagaatatcttccatttcttaatacacttaagaaaatggaaactaattatcagcggtttactatagacaaatacttgaaacgatatgaaaaagccattggccacctcagcaaatgtggacctgagtacttcccagaatgcttaaacttgataaaagatagatatcagcattgcttatggggagcacctgatgcaggagcacatgtatgagccagcggggctcatgtttgcccgttgcggtgcccacgagaaagctctctcagcctttctgacatgtggcaactggaagcaagccctctgtgtggcagcccagcttaactttaccaaagaccagctggtgggcctcggcagaactctggcaggaaagctggttgagcagaggaagcacattgatgcggccatggttttggaagagtgtgcccaggattatgaagaagctgtgctcttgctgttagaaggagctgcctgggaagaagctttgaggctggtatacaaatataacagactggatattatagaaaccaacgtaaagccttccattttagaagcccagaaaaattatatggcatttctggactctcagacagccacattcagtcgccacaagaaacgtttattggtagttcgagagctcaaggagcaagcccagcaggcaggtctggatgatgaggtaccccacgggcaagagtcagacctcttctctgaaactagcagtgtcgtgagtggcagtgagatgagtggcaaatactcccatagtaactccaggatatcagcgagatcatccaagaatcgccgaaaagcggagcggaagaagcacagcctcaaagaaggcagtccgctggaggacctggccctcctggaggcactgagtgaagtggtgcagaacactgaaaacctgaaagatgaagtataccatattttaaaggtactctttctctttgagtttgatgaacaaggaagggaattacagaaggcctttgaagatacgctgcagttgatggaaaggtcacttccagaaatttggactcttacttaccagcagaattcagctaccccggttctaggtcccaattctactgcaaatagtatcatggcatcttatcagcaacagaagacttcggttcctgttcttgatgctgagctttttataccaccaaagatcaacagaagaacccagtggaagctgagcctgctagactgagtgactgcagttaggagggatccgacagagaagaccatttccactcattcctgttgtcctaccaccccttgctctttgagggctggctattgagaactggaaagagtaaaatgataacttaccttagcattgccaagaacttcagcagacaacaagcaattctatttattttatgttgtgtatacatcttgatcattagcaagacattaagctttaaccattatggcaccattttgtgagaatgattgttctttcacttgggctgtttgagagcataattatggtaatcatgagattaatgtttcatgatttctacctccaaagtgtgaagacaagtaaaacaatgtttctaaattgtcttattttgttggcggagaagattacaatggctattagtgctacatttggtcaaatgtaatcacttaaatagcttcttgtcaccttaaactaaagcagaataaaaagtatcctttgaaattataagccctcctttgctgacagctattattttgtaacatcttaccaggtcatgtgctttcagttataactgggctgagcctcctataattacaatgtctatagggactgttttactgcctgtgtattttctgctagagagttagcaatgttagagctagaacagattagaatttctaaacagtatcatgcacagttggtgtgagtgatcagtgtgcattgtatggcatgcatggttgtgaattattctctgttctccaaatactgtttctttaactcagatatttttgttagtgtctaggccacttcatttatttttcgtcatggtactttactgacttctctttattcaattctccacgccctcaccaaaaaaaactgtctcaaaatgagaatattttattttcatggtgagtctagaaaacgcccacttcattctgattaaaaattcttccatgttttaaatatcagaaccagacctttcttactgtgtatcttagcccatttgtgtctctataacaacaaccagctttcaaaggaactaatagagtgaaaactcactcattaccacgaggatggcacaagcgattcacgtaggatctgcccctgtgaccaaaacacctcccattgggccccacttccaacactggtgatcacatttcaacatgaggtttagggaaacaaatgcctaaactacagcactgtacataaactaacaggaaatgctgcttttgatcctcaaagaagtgatatagccaaaattgtaatttaagaagcctttgtcagtatagcaagatgttaactatagaatcaatctaggagtattcactgtaaaattcaacttttctgtatgtttgaacattttcacaatctcataggagtttttaaaaagaagagaaagaagatatactttgctttggagaaatctactttttgacttacatgggtttgctgtaattaagtgcccaatattgaaaggctgcaagtactttgtaatcactctttggcatgggtaaataagcatggtaacttatattgaaatatagtgctcttgctttggataactgtaaagggacccatgctgatagactggaaatagaagtaaatgtgtttattgataaaaaaaa

SEQ ID NO: 351558 - DNA, 2715 bp, Homo sapiens
atgaatacttcagagcttcgttatacaagtttttatcttttatcaagtttaagcattctgggaaggtaccgatatcagcattgcttatggggagcacctgatgcaggagcacatgtatgagccagcggggctcatgtttgcccgttgcggtgcccacgagaaagctctctcagcctttctgacatgtggcaactggaagcaagccctctgtgtggcagcccagcttaactttaccaaagaccagctggtgggcctcggcagaactctggcaggaaagctggttgagcagaggaagcacattgatgcggccatggttttggaagagtgtgcccaggattatgaagaagctgtgctcttgctgttagaaggagctgcctgggaagaagctttgaggctggtatacaaatataacagactggatattatagaaaccaacgtaaagccttccattttagaagcccagaaaaattatatggcatttctggactctcagacagccacattcagtcgccacaagaaacgtttattggtagttcgagagctcaaggagcaagcccagcaggcaggtctggatgatgaggtaccccacgggcaagagtcagacctcttctctgaaactagcagtgtcgtgagtggcagtgagatgagtggcaaatactcccatagtaactccaggatatcagcgagatcatccaagaatcgccgaaaagcggagcggaagaagcacagcctcaaagaaggcagtccgctggaggacctggccctcctggaggcactgagtgaagtggtgcagaacactgaaaacctgaaagatgaagtataccatattttaaaggtactctttctctttgagtttgatgaacaaggaagggaattacagaaggcctttgaagatacgctgcagttgatggaaaggtcacttccagaaatttggactcttacttaccagcagaattcagctaccccggttctaggtcccaattctactgcaaatagtatcatggcatcttatcagcaacagaagacttcggttcctgttcttgatgctgagctttttataccaccaaagatcaacagaagaacccagtggaagctgagcctgctagactgagtgactgcagttaggagggatccgacagagaagaccatttccactcattcctgttgtcctaccaccccttgctctttgagggctggctattgagaactggaaagagtaaaatgataacttaccttagcattgccaagaacttcagcagacaacaagcaattctatttattttatgttgtgtatacatcttgatcattagcaagacattaagctttaaccattatggcaccattttgtgagaatgattgttctttcacttgggctgtttgagagcataattatggtaatcatgagattaatgtttcatgatttctacctccaaagtgtgaagacaagtaaaacaatgtttctaaattgtcttattttgttggcggagaagattacaatggctattagtgctacatttggtcaaatgtaatcacttaaatagcttcttgtcaccttaaactaaagcagaataaaaagtatcctttgaaattataagccctcctttgctgacagctattattttgtaacatcttaccaggtcatgtgctttcagttataactgggctgagcctcctataattacaatgtctatagggactgttttactgcctgtgtattttctgctagagagttagcaatgttagagctagaacagattagaatttctaaacagtatcatgcacagttggtgtgagtgatcagtgtgcattgtatggcatgcatggttgtgaattattctctgttctccaaatactgtttctttaactcagatatttttgttagtgtctaggccacttcatttatttttcgtcatggtactttactgacttctctttattcaattctccacgccctcaccaaaaaaaactgtctcaaaatgagaatattttattttcatggtgagtctagaaaacgcccacttcattctgattaaaaattcttccatgttttaaatatcagaaccagacctttcttactgtgtatcttagcccatttgtgtctctataacaacaaccagctttcaaaggaactaatagagtgaaaactcactcattaccacgaggatggcacaagcgattcacgtaggatctgcccctgtgaccaaaacacctcccattgggccccacttccaacactggtgatcacatttcaacatgaggtttagggaaacaaatgcctaaactacagcactgtacataaactaacaggaaatgctgcttttgatcctcaaagaagtgatatagccaaaattgtaatttaagaagcctttgtcagtatagcaagatgttaactatagaatcaatctaggagtattcactgtaaaattcaacttttctgtatgtttgaacattttcacaatctcataggagtttttaaaaagaagagaaagaagatatactttgctttggagaaatctactttttgacttacatgggtttgctgtaattaagtgcccaatattgaaaggctgcaagtactttgtaatcactctttggcatgggtaaataagcatggtaacttatattgaaatatagtgctcttgctttggataactgtaaagggacccatgctgatagactggaaatagaagtaaatgtgtttattgataaaaaaaa

SEQ ID NO: 351559 - DNA, 2472 bp, Homo sapiens
gatccatcaaactgctaaagcctttttttccaagctccttcaacagtgaaccaaccctcatgtctgtgtggatccagctgactcttgactagattatgaagaagctgtgctcttgctgttagaaggagctgcctgggaagaagctttgaggctggtatacaaatataacagactggatattatagaaaccaacgtaaagccttccattttagaagcccagaaaaattatatggcatttctggactctcagacagccacattcagtcgccacaagaaacgtttattggtagttcgagagctcaaggagcaagcccagcaggcaggtctggatgatgaggtaccccacgggcaagagtcagacctcttctctgaaactagcagtgtcgtgagtggcagtgagatgagtggcaaatactcccatagtaactccaggatatcagcgagatcatccaagaatcgccgaaaagcggagcggaagaagcacagcctcaaagaaggcagtccgctggaggacctggccctcctggaggcactgagtgaagtggtgcagaacactgaaaacctgaaagatgaagtataccatattttaaaggtactctttctctttgagtttgatgaacaaggaagggaattacagaaggcctttgaagatacgctgcagttgatggaaaggtcacttccagaaatttggactcttacttaccagcagaattcagctaccccggttctaggtcccaattctactgcaaatagtatcatggcatcttatcagcaacagaagacttcggttcctgttcttgatgctgagctttttataccaccaaagatcaacagaagaacccagtggaagctgagcctgctagactgagtgactgcagttaggagggatccgacagagaagaccatttccactcattcctgttgtcctaccaccccttgctctttgagggctggctattgagaactggaaagagtaaaatgataacttaccttagcattgccaagaacttcagcagacaacaagcaattctatttattttatgttgtgtatacatcttgatcattagcaagacattaagctttaaccattatggcaccattttgtgagaatgattgttctttcacttgggctgtttgagagcataattatggtaatcatgagattaatgtttcatgatttctacctccaaagtgtgaagacaagtaaaacaatgtttctaaattgtcttattttgttggcggagaagattacaatggctattagtgctacatttggtcaaatgtaatcacttaaatagcttcttgtcaccttaaactaaagcagaataaaaagtatcctttgaaattataagccctcctttgctgacagctattattttgtaacatcttaccaggtcatgtgctttcagttataactgggctgagcctcctataattacaatgtctatagggactgttttactgcctgtgtattttctgctagagagttagcaatgttagagctagaacagattagaatttctaaacagtatcatgcacagttggtgtgagtgatcagtgtgcattgtatggcatgcatggttgtgaattattctctgttctccaaatactgtttctttaactcagatatttttgttagtgtctaggccacttcatttatttttcgtcatggtactttactgacttctctttattcaattctccacgccctcaccaaaaaaaactgtctcaaaatgagaatattttattttcatggtgagtctagaaaacgcccacttcattctgattaaaaattcttccatgttttaaatatcagaaccagacctttcttactgtgtatcttagcccatttgtgtctctataacaacaaccagctttcaaaggaactaatagagtgaaaactcactcattaccacgaggatggcacaagcgattcacgtaggatctgcccctgtgaccaaaacacctcccattgggccccacttccaacactggtgatcacatttcaacatgaggtttagggaaacaaatgcctaaactacagcactgtacataaactaacaggaaatgctgcttttgatcctcaaagaagtgatatagccaaaattgtaatttaagaagcctttgtcagtatagcaagatgttaactatagaatcaatctaggagtattcactgtaaaattcaacttttctgtatgtttgaacattttcacaatctcataggagtttttaaaaagaagagaaagaagatatactttgctttggagaaatctactttttgacttacatgggtttgctgtaattaagtgcccaatattgaaaggctgcaagtactttgtaatcactctttggcatgggtaaataagcatggtaacttatattgaaatatagtgctcttgctttggataactgtaaagggacccatgctgatagactggaaatagaagtaaatgtgtttattgataaaaaaaa

SEQ ID NO: 351560 - DNA, 2483 bp, Homo sapiens
ttactgttaagggacgaagtggtttagtgagagataccaggaaagctggttgagcagaggaagcacattgatgcggccatggttttggaagagtgtgcccaggattatgaagaagctgtgctcttgctgttagaaggagctgcctgggaagaagctttgaggctggtatacaaatataacagactggatattatagaaaccaacgtaaagccttccattttagaagcccagaaaaattatatggcatttctggactctcagacagccacattcagtcgccacaagaaacgtttattggtagttcgagagctcaaggagcaagcccagcaggcaggtctggatgatgaggtaccccacgggcaagagtcagacctcttctctgaaactagcagtgtcgtgagtggcagtgagatgagtggcaaatactcccatagtaactccaggatatcagcgagatcatccaagaatcgccgaaaagcggagcggaagaagcacagcctcaaagaaggcagtccgctggaggacctggccctcctggaggcactgagtgaagtggtgcagaacactgaaaacctgaaagatgaagtataccatattttaaaggtactctttctctttgagtttgatgaacaaggaagggaattacagaaggcctttgaagatacgctgcagttgatggaaaggtcacttccagaaatttggactcttacttaccagcagaattcagctaccccggttctaggtcccaattctactgcaaatagtatcatggcatcttatcagcaacagaagacttcggttcctgttcttgatgctgagctttttataccaccaaagatcaacagaagaacccagtggaagctgagcctgctagactgagtgactgcagttaggagggatccgacagagaagaccatttccactcattcctgttgtcctaccaccccttgctctttgagggctggctattgagaactggaaagagtaaaatgataacttaccttagcattgccaagaacttcagcagacaacaagcaattctatttattttatgttgtgtatacatcttgatcattagcaagacattaagctttaaccattatggcaccattttgtgagaatgattgttctttcacttgggctgtttgagagcataattatggtaatcatgagattaatgtttcatgatttctacctccaaagtgtgaagacaagtaaaacaatgtttctaaattgtcttattttgttggcggagaagattacaatggctattagtgctacatttggtcaaatgtaatcacttaaatagcttcttgtcaccttaaactaaagcagaataaaaagtatcctttgaaattataagccctcctttgctgacagctattattttgtaacatcttaccaggtcatgtgctttcagttataactgggctgagcctcctataattacaatgtctatagggactgttttactgcctgtgtattttctgctagagagttagcaatgttagagctagaacagattagaatttctaaacagtatcatgcacagttggtgtgagtgatcagtgtgcattgtatggcatgcatggttgtgaattattctctgttctccaaatactgtttctttaactcagatatttttgttagtgtctaggccacttcatttatttttcgtcatggtactttactgacttctctttattcaattctccacgccctcaccaaaaaaaactgtctcaaaatgagaatattttattttcatggtgagtctagaaaacgcccacttcattctgattaaaaattcttccatgttttaaatatcagaaccagacctttcttactgtgtatcttagcccatttgtgtctctataacaacaaccagctttcaaaggaactaatagagtgaaaactcactcattaccacgaggatggcacaagcgattcacgtaggatctgcccctgtgaccaaaacacctcccattgggccccacttccaacactggtgatcacatttcaacatgaggtttagggaaacaaatgcctaaactacagcactgtacataaactaacaggaaatgctgcttttgatcctcaaagaagtgatatagccaaaattgtaatttaagaagcctttgtcagtatagcaagatgttaactatagaatcaatctaggagtattcactgtaaaattcaacttttctgtatgtttgaacattttcacaatctcataggagtttttaaaaagaagagaaagaagatatactttgctttggagaaatctactttttgacttacatgggtttgctgtaattaagtgcccaatattgaaaggctgcaagtactttgtaatcactctttggcatgggtaaataagcatggtaacttatattgaaatatagtgctcttgctttggataactgtaaagggacccatgctgatagactggaaatagaagtaaatgtgtttattgataaaaaaaa

SEQ ID NO: 351561 - DNA, 2318 bp, Homo sapiens
actggcgcctttactgacgcgatattattgaaaccaacgtagaggccattccatttagaagcccagaaaaattatatggcatttctggactctcagacagccacattcagtcgccacaagaaacgtttattggtagttcgagagctcaaggagcaagcccagcaggcaggtctggatgatgaggtaccccacgggcaagagtcagacctcttctctgaaactagcagtgtcgtgagtggcagtgagatgagtggcaaatactcccatagtaactccaggatatcagcgagatcatccaagaatcgccgaaaagcggagcggaagaagcacagcctcaaagaaggcagtccgctggaggacctggccctcctggaggcactgagtgaagtggtgcagaacactgaaaacctgaaagatgaagtataccatattttaaaggtactctttctctttgagtttgatgaacaaggaagggaattacagaaggcctttgaagatacgctgcagttgatggaaaggtcacttccagaaatttggactcttacttaccagcagaattcagctaccccggttctaggtcccaattctactgcaaatagtatcatggcatcttatcagcaacagaagacttcggttcctgttcttgatgctgagctttttataccaccaaagatcaacagaagaacccagtggaagctgagcctgctagactgagtgactgcagttaggagggatccgacagagaagaccatttccactcattcctgttgtcctaccaccccttgctctttgagggctggctattgagaactggaaagagtaaaatgataacttaccttagcattgccaagaacttcagcagacaacaagcaattctatttattttatgttgtgtatacatcttgatcattagcaagacattaagctttaaccattatggcaccattttgtgagaatgattgttctttcacttgggctgtttgagagcataattatggtaatcatgagattaatgtttcatgatttctacctccaaagtgtgaagacaagtaaaacaatgtttctaaattgtcttattttgttggcggagaagattacaatggctattagtgctacatttggtcaaatgtaatcacttaaatagcttcttgtcaccttaaactaaagcagaataaaaagtatcctttgaaattataagccctcctttgctgacagctattattttgtaacatcttaccaggtcatgtgctttcagttataactgggctgagcctcctataattacaatgtctatagggactgttttactgcctgtgtattttctgctagagagttagcaatgttagagctagaacagattagaatttctaaacagtatcatgcacagttggtgtgagtgatcagtgtgcattgtatggcatgcatggttgtgaattattctctgttctccaaatactgtttctttaactcagatatttttgttagtgtctaggccacttcatttatttttcgtcatggtactttactgacttctctttattcaattctccacgccctcaccaaaaaaaactgtctcaaaatgagaatattttattttcatggtgagtctagaaaacgcccacttcattctgattaaaaattcttccatgttttaaatatcagaaccagacctttcttactgtgtatcttagcccatttgtgtctctataacaacaaccagctttcaaaggaactaatagagtgaaaactcactcattaccacgaggatggcacaagcgattcacgtaggatctgcccctgtgaccaaaacacctcccattgggccccacttccaacactggtgatcacatttcaacatgaggtttagggaaacaaatgcctaaactacagcactgtacataaactaacaggaaatgctgcttttgatcctcaaagaagtgatatagccaaaattgtaatttaagaagcctttgtcagtatagcaagatgttaactatagaatcaatctaggagtattcactgtaaaattcaacttttctgtatgtttgaacattttcacaatctcataggagtttttaaaaagaagagaaagaagatatactttgctttggagaaatctactttttgacttacatgggtttgctgtaattaagtgcccaatattgaaaggctgcaagtactttgtaatcactctttggcatgggtaaataagcatggtaacttatattgaaatatagtgctcttgctttggataactgtaaagggacccatgctgatagactggaaatagaagtaaatgtgtttattgataaaaaaaa

SEQ ID NO: 351562 - DNA, 2419 bp, Homo sapiens
gatccatcaaactgctaaagcctttttttccaagctccttcaacagtgaaccaaccctcatgtctgtgtggatccagctgactcttgactagattatgaagaagctgtgctcttgctgttagaaggagctgcctgggaagaagctttgaggctggtatacaaatataacagactggatattatagaaaccaacgtaaagccttccattttagaagcacaagaaacgtttattggtagttcgagagctcaaggagcaagcccagcaggcaggtctggatgatgaggtaccccacgggcaagagtcagacctcttctctgaaactagcagtgtcgtgagtggcagtgagatgagtggcaaatactcccatagtaactccaggatatcagcgagatcatccaagaatcgccgaaaagcggagcggaagaagcacagcctcaaagaaggcagtccgctggaggacctggccctcctggaggcactgagtgaagtggtgcagaacactgaaaacctgaaagatgaagtataccatattttaaaggtactctttctctttgagtttgatgaacaaggaagggaattacagaaggcctttgaagatacgctgcagttgatggaaaggtcacttccagaaatttggactcttacttaccagcagaattcagctaccccggttctaggtcccaattctactgcaaatagtatcatggcatcttatcagcaacagaagacttcggttcctgttcttgatgctgagctttttataccaccaaagatcaacagaagaacccagtggaagctgagcctgctagactgagtgactgcagttaggagggatccgacagagaagaccatttccactcattcctgttgtcctaccaccccttgctctttgagggctggctattgagaactggaaagagtaaaatgataacttaccttagcattgccaagaacttcagcagacaacaagcaattctatttattttatgttgtgtatacatcttgatcattagcaagacattaagctttaaccattatggcaccattttgtgagaatgattgttctttcacttgggctgtttgagagcataattatggtaatcatgagattaatgtttcatgatttctacctccaaagtgtgaagacaagtaaaacaatgtttctaaattgtcttattttgttggcggagaagattacaatggctattagtgctacatttggtcaaatgtaatcacttaaatagcttcttgtcaccttaaactaaagcagaataaaaagtatcctttgaaattataagccctcctttgctgacagctattattttgtaacatcttaccaggtcatgtgctttcagttataactgggctgagcctcctataattacaatgtctatagggactgttttactgcctgtgtattttctgctagagagttagcaatgttagagctagaacagattagaatttctaaacagtatcatgcacagttggtgtgagtgatcagtgtgcattgtatggcatgcatggttgtgaattattctctgttctccaaatactgtttctttaactcagatatttttgttagtgtctaggccacttcatttatttttcgtcatggtactttactgacttctctttattcaattctccacgccctcaccaaaaaaaactgtctcaaaatgagaatattttattttcatggtgagtctagaaaacgcccacttcattctgattaaaaattcttccatgttttaaatatcagaaccagacctttcttactgtgtatcttagcccatttgtgtctctataacaacaaccagctttcaaaggaactaatagagtgaaaactcactcattaccacgaggatggcacaagcgattcacgtaggatctgcccctgtgaccaaaacacctcccattgggccccacttccaacactggtgatcacatttcaacatgaggtttagggaaacaaatgcctaaactacagcactgtacataaactaacaggaaatgctgcttttgatcctcaaagaagtgatatagccaaaattgtaatttaagaagcctttgtcagtatagcaagatgttaactatagaatcaatctaggagtattcactgtaaaattcaacttttctgtatgtttgaacattttcacaatctcataggagtttttaaaaagaagagaaagaagatatactttgctttggagaaatctactttttgacttacatgggtttgctgtaattaagtgcccaatattgaaaggctgcaagtactttgtaatcactctttggcatgggtaaataagcatggtaacttatattgaaatatagtgctcttgctttggataactgtaaagggacccatgctgatagactggaaatagaagtaaatgtgtttattgataaaaaaaa

SEQ ID NO: 351563 - DNA, 5162 bp, Homo sapiens
  misc_feature (4496)..(4496): n is a, c, g, or t
cgtgcgcacgcgcgctgctctcaggtccgcaggttccacccccccccccgccccccccaattacagtgctttggggttcgacatcaaaacagagatcaaatacaaaagtttgggcagatgggcaagagggcagagggacaggggacgcggccaatgtagctcctctacctctacggtgccaggcctacaaagaaggccggccgccgtaagtgaccagaagcgggcccggcctcgccccctccgcctggtgacgtcactcccgcgccgcactcccagtgctgcggctgcctagttgacgcacccattgagtcgctggcttctttgcagcgcttcagcgttttcccctggagggcgcctccatccttggaggcctagtgccgtcggagagagagcgggagccgcggacagagacgcgtgcgcaattcggagccgactctgggtgcggactgtgggagctgactctgggtagccggctgcgcgtggctggggaggcgaggccggacgcacctctgtttgggggtcctcagagattaatgattcatcaagggatagttgtacttgtctcgtgggaatcacttcatcatgcgaaatctgaaattatttcggaccctggagttcagggatattcaaggtccagggaatcctcagtgcttctctctccgaactgaacaggggacggtgctcattggttcagaacatggcctgatagaagtagaccctgtctcaagagaagtgaaaaatgaagtttctttggtggcagaaggctttctcccagaggatggaagtggccgcattgttggtgttcaggacttgctggatcaggagtctgtgtgtgtggccacagcctctggagacgtcatactctgcagtctcagcacacaacagctggagtgtgttgggagtgtagccagtggtatctctgttatgagttggagtcctgaccaagagctggtgcttcttgccacaggtcaacagaccctgattatgatgacaaaagattttgagccaatcctggagcagcagatccatcaggatgattttggtgaaagcaagtttatcactgttggatggggtaggaaggagacacagttccatggatcagaaggcagacaagcagcttttcagatgcaaatgcatgagtctgctttgccctgggatgaccatagaccacaagttacctggcggggggatggacagttttttgctgtgagtgttgtttgcccagaaacaggggctcggaaggtcagagtgtggaaccgagagtttgctttgcagtcaaccagtgagcctgtggcaggactgggaccagccctggcttggaaaccctcaggcagtttgattgcatctacacaagataaacccaaccagcaggatattgtgttttttgagaaaaatggactccttcatggacactttacacttcccttccttaaagatgaggttaaggtaaatgacttgctctggaatgcagattcctctgtgcttgcagtctggctggaagaccttcagagagaagaaagctccattccgaaaacctgtgttcagctctggactgttggaaactatcactggtatctcaagcaaagtttatccttcagcacctgtgggaagagcaagattgtgtctctgatgtgggaccctgtgaccccataccggctgcatgttctctgtcagggctggcattacctcgcctatgattggcactggacgactgaccggagcgtgggagataattcaagtgacttgtccaatgtggctgtcattgatggaaacagggtgttggtgacagtcttccggcagactgtggttccgcctcccatgtgcacctaccaactgctgttcccacaccctgtgaatcaagtcacattcttagcacaccctcaaaagagtaatgaccttgctgttctagatgccagtaaccagatttctgtttataaatgtggtgattgtccaagtgctgaccctacagtgaaactgggagctgtgggtggaagtggatttaaagtttgccttagaactcctcatttggaaaagagatacaaaatccagtttgagaataatgaagatcaagatgtaaacccgctgaaactaggccttctcacttggattgaagaagacgtcttcctggctgtaagccacagtgagttcagcccccggtctgtcattcaccatttgactgcagcttcttctgagatggatgaagagcatggacagctcaatgtcagttcatctgcagcggtggatggggtcataatcagtctatgttgcaattccaagaccaagtcagtagtattacagctggctgatggccagatatttaagtacctttgggagtcaccttctctggctattaaaccatggaagaactctggtggatttcctgttcggtttccttatccatgcacccagaccgaattggccatgattggagaagaggaatgtgtccttggtctgactgacaggtgtcgctttttcatcaatgacattgaggttgcgtcaaatatcacgtcatttgcagtatatgatgagtttttattgttgacaacccattcccatacctgccagtgtttttgcctgagggatgcttcatttaaaacattacaggccggcctgagcagcaatcatgtgtcccatggggaagttctgcggaaagtggagaggggttcacggattgtcactgttgtgccccaggacacaaagcttgtattacagatgccaaggggaaacttagaagttgttcatcatcgagccctggttttagctcagattcggaagtggttggacaaacttatgtttaaagaggcatttgaatgcatgagaaagctgagaatcaatctcaatctgatttatgatcataaccctaaggtgtttcttggaaatgtggaaaccttcattaaacagatagattctgtgaatcatattaacttgttttttacagaattgaaagaagaagatgtcacgaagaccatgtaccctgcaccagttaccagcagtgtctacctgtccagggatcctgacgggaataaaatagaccttgtctgcgatgctatgagagcagtcatggagagcataaatcctcataaatactgcctatccatacttacatctcatgtaaagaagacaaccccagaactggaaattgtactgcaaaaagtacacgagcttcaaggaaatgctccctctgatcctgatgctgtgagtgctgaagaggccttgaaatatttgctgcatctggtagatgttaatgaattatatgatcattctcttggcacctatgactttgatttggtcctcatggtagctgagaagtcacagaaggatcccaaagaatatcttccatttcttaatacacttaagaaaatggaaactaattatcagcggtttactatagacaaatacttgaaacgatatgaaaaagccattggccacctcagcaaatgtggacctgagtacttcccagaatgcttaaacttgataaaagataaaaacttgtataacgaagctctgaagttatattcaccaagctcacaacagtaccaggatatcagcattgcttatggggagcacctgatgcaggagcacatgtatgagccagcggggctcatgtttgcccgttgcggtgcccacgagaaagctctctcagcctttctgacatgtggcaactggaagcaagccctctgtgtggcagcccagcttaactttaccaaagaccagctggtgggcctcggcagaactctggcaggaaagctggttgagcagaggaagcacattgatgcggccatggttttggaagagtgtgcccaggattatgaagaagctgtgctcttgctgttagaaggagctgcctgggaagaagctttgaggctggtatacaaatataacagactggatattatagaaaccaacgtaaagccttccattttagaagcccagaaaaattatatggcatttctggactctcagacagccacattcagtcgccacaagaaacgtttattggtagttcgagagctcaaggagcaagcccagcaggcaggtctggatgatgaggtaccccacgggcaagagtcagacctcttctctgaaactagcagtgtcgtgagtggcagtgagatgagtggcaaatactcccatagtaactccaggatatcagcgagatcatccaagaatcgccgaaaagcggagcggaagaagcacagcctcaaagaaggcagtccgctggaggacctggccctcctggaggcactgagtgaagtggtgcagaacactgaaaacctgaaagatgaagtataccatattttaaaggtactctttctctttgagtttgatgaacaaggaagggaattacagaaggcctttgaagatacgctgcagttgatggaaaggtcacttccagaaatttggactcttacttaccagcagaattcagctaccccgacatggggagagggagtcttgctgtgttgcccaagctggtcttgaactcctggcctcangtgatcctcctgccttggcctcccaaagtgctgagattacaggtgttctaggtcccaattctactgcaaatagtatcatggcatcttatcagcaacagaagacttcggttcctgttcttgatgctgagctttttataccaccaaagatcaacagaagaacccagtggaagctgagcctgctagactgagtgactgcagttaggagggatccgacagagaagaccatttccactcattcctgttgtcctaccaccccttgctctttgagggctggctattgagaactggaaagagtaaaatgataacttaccttagcattgccaagaacttcagcagacaacaagcaattctatttattttatgttgtgtatacatcttgatcattagcaagacattaagctttaaccattatggcaccattttgtgagaatgattgttctttcacttgggctgtttgagagcataattatggtaatcatgagattaatgtttcatgatttctacctccaaagtgtgaagacaagtaaaacaatgtttctaaattgtcttattttgttggcggagaagattacaatggctattagtgctacatttggtcaaatgtaatcacttaaatagcttcttgtcaccttaaactaaagcagaataaaaagtatcctttgaaat

SEQ ID NO: 351564 - DNA, 6129 bp, Homo sapiens
cgtgcgcacgcgcgctgctctcaggtccgcaggttccacccccccccccgccccccccaattacagtgctttggggttcgacatcaaaacagagatcaaatacaaaagtttgggcagatgggcaagagggcagagggacaggggacgcggccaatgtagctcctctacctctacggtgccaggcctacaaagaaggccggccgccgtaagtgaccagaagcgggcccggcctcgccccctccgcctggtgacgtcactcccgcgccgcactcccagtgctgcggctgcctagttgacgcacccattgagtcgctggcttctttgcagcgcttcagcgttttcccctggagggcgcctccatccttggaggcctagtgccgtcggagagagagcgggagccgcggacagagacgcgtgcgcaattcggagccgactctgggtgcggactgtgggagctgactctgggtagccggctgcgcgtggctggggaggcgaggccggacgcacctctgtttgggggtcctcagagattaatgattcatcaagggatagttgtacttgtctcgtgggaatcacttcatcatgcgaaatctgaaattatttcggaccctggagttcagggatattcaaggtccagggaatcctcagtgcttctctctccgaactgaacaggggacggtgctcattggttcagaacatggcctgatagaagtagaccctgtctcaagagaagtgaaaaatgaagtttctttggtggcagaaggctttctcccagaggatggaagtggccgcattgttggtgttcaggacttgctggatcaggagtctgtgtgtgtggccacagcctctggagacgtcatactctgcagtctcagcacacaacagctggagtgtgttgggagtgtagccagtggtatctctgttatgagttggagtcctgaccaagagctggtgcttcttgccacaggtcaacagaccctgattatgatgacaaaagattttgagccaatcctggagcagcagatccatcaggatgattttggtgaaagcaagtttatcactgttggatggggtaggaaggagacacagttccatggatcagaaggcagacaagcagcttttcagatgcaaatgcatgagtctgctttgccctgggatgaccatagaccacaagttacctggcggggggatggacagttttttgctgtgagtgttgtttgcccagaaacaggggctcggaaggtcagagtgtggaaccgagagtttgctttgcagtcaaccagtgagcctgtggcaggactgggaccagccctggcttggaaaccctcaggcagtttgattgcatctacacaagataaacccaaccagcaggatattgtgttttttgagaaaaatggactccttcatggacactttacacttcccttccttaaagatgaggttaaggtaaatgacttgctctggaatgcagattcctctgtgcttgcagtctggctggaagaccttcagagagaagaaagctccattccgaaaacctgtgttcagctctggactgttggaaactatcactggtatctcaagcaaagtttatccttcagcacctgtgggaagagcaagattgtgtctctgatgtgggaccctgtgaccccataccggctgcatgttctctgtcagggctggcattacctcgcctatgattggcactggacgactgaccggagcgtgggagataattcaagtgacttgtccaatgtggctgtcattgatggaaacagggtgttggtgacagtcttccggcagactgtggttccgcctcccatgtgcacctaccaactgctgttcccacaccctgtgaatcaagtcacattcttagcacaccctcaaaagagtaatgaccttgctgttctagatgccagtaaccagatttctgtttataaatgtggtgattgtccaagtgctgaccctacagtgaaactgggagctgtgggtggaagtggatttaaagtttgccttagaactcctcatttggaaaagagatacaaaatccagtttgagaataatgaagatcaagatgtaaacccgctgaaactaggccttctcacttggattgaagaagacgtcttcctggctgtaagccacagtgagttcagcccccggtctgtcattcaccatttgactgcagcttcttctgagatggatgaagagcatggacagctcaatgtcagttcatctgcagcggtggatggggtcataatcagtctatgttgcaattccaagaccaagtcagtagtattacagctggctgatggccagatatttaagtacctttgggagtcaccttctctggctattaaaccatggaagaactctggtggatttcctgttcggtttccttatccatgcacccagaccgaattggccatgattggagaagaggaatgtgtccttggtctgactgacaggtgtcgctttttcatcaatgacattgaggttgcgtcaaatatcacgtcatttgcagtatatgatgagtttttattgttgacaacccattcccatacctgccagtgtttttgcctgagggatgcttcatttaaaacattacaggccggcctgagcagcaatcatgtgtcccatggggaagttctgcggaaagtggagaggggttcacggattgtcactgttgtgccccaggacacaaagcttgtattacagatgccaaggggaaacttagaagttgttcatcatcgagccctggttttagctcagattcggaagtggttggacaaacttatgtttaaagaggcatttgaatgcatgagaaagctgagaatcaatctcaatctgatttatgatcataaccctaaggtgtttcttggaaatgtggaaaccttcattaaacagatagattctgtgaatcatattaacttgttttttacagaattgaaagaagaagatgtcacgaagaccatgtaccctgcaccagttaccagcagtgtctacctgtccagggatcctgacgggaataaaatagaccttgtctgcgatgctatgagagcagtcatggagagcataaatcctcataaatactgcctatccatacttacatctcatgtaaagaagacaaccccagaactggaaattgtactgcaaaaagtacacgagcttcaaggaaatgctccctctgatcctgatgctgtgagtgctgaagaggccttgaaatatttgctgcatctggtagatgttaatgaattatatgatcattctcttggcacctatgactttgatttggtcctcatggtagctgagaagtcacagaaggatcccaaagaatatcttccatttcttaatacacttaagaaaatggaaactaattatcagcggtttactatagacaaatacttgaaacgatatgaaaaagccattggccacctcagcaaatgtggacctgagtacttcccagaatgcttaaacttgataaaagataaaaacttgtataacgaagctctgaagttatattcaccaagctcacaacagtaccaggatatcagcattgcttatggggagcacctgatgcaggagcacatgtatgagccagcggggctcatgtttgcccgttgcggtgcccacgagaaagctctctcagcctttctgacatgtggcaactggaagcaagccctctgtgtggcagcccagcttaactttaccaaagaccagctggtgggcctcggcagaactctggcaggaaagctggttgagcagaggaagcacattgatgcggccatggttttggaagagtgtgcccaggattatgaagaagctgtgctcttgctgttagaaggagctgcctgggaagaagctttgaggctggtatacaaatataacagactggatattatagaaaccaacgtaaagccttccattttagaagcccagaaaaattatatggcatttctggactctcagacagccacattcagtcgccacaagaaacgtttattggtagttcgagagctcaaggagcaagcccagcaggcaggtctggatgatgaggtaccccacgggcaagagtcagacctcttctctgaaactagcagtgtcgtgagtggcagtgagatgagtggcaaatactcccatagtaactccaggatatcagcgagatcatccaagaatcgccgaaaagcggagcggaagaagcacagcctcaaagaaggcagtccgctggaggacctggccctcctggaggcactgagtgaagtggtgcagaacactgaaaacctgaaagatgaagtataccatattttaaaggtactctttctctttgagtttgatgaacaaggaagggaattacagaaggcctttgaagatacgctgcagttgatggaaaggtcacttccagaaatttggactcttacttaccagcagaattcagctaccccggttctaggtcccaattctactgcaaatagtatcatggcatcttatcagcaacagaagacttcggttcctgttcttgatgctgagctttttataccaccaaagatcaacagaagaacccagtggaagctgagcctgctagactgagtgactgcagttaggagggatccgacagagaagaccatttccactcattcctgttgtcctaccaccccttgctctttgagggctggctattgagaactggaaagagtaaaatgataacttaccttagcattgccaagaacttcagcagacaacaagcaattctatttattttatgttgtgtatacatcttgatcattagcaagacattaagctttaaccattatggcaccattttgtgagaatgattgttctttcacttgggctgtttgagagcataattatggtaatcatgagattaatgtttcatgatttctacctccaaagtgtgaagacaagtaaatgctacatttggtcaaatgtaatcacttaaatagcttcttgtcaccttaaactaaagcagaataaaaagtatcctttgaaattataagccctcctttgctgacagctattattttgtaacatcttaccaggtcatgtgctttcagttataactgggctgagcctcctataattacaatgtctatagggactgttttactgcctgtgtattttctgctagagagttagcaatgttagagctagaacagattagaatttctaaacagtatcatgcacagttggtgtgagtgatcagtgtgcattgtatggcatgcatggttgtgaattattctctgttctccaaatactgtttctttaactcagatatttttgttagtgtctaggccacttcatttatttttcgtcatggtactttactgacttctctttattcaattctccacgccctcaccaaaaaaaactgtctcaaaatgagaatattttattttcatggtgagtctagaaaacgcccacttcattctgattaaaaattcttccatgttttaaatatcagaaccagacctttcttactgtgtatcttagcccatttgtgtctctataacaacaaccagctttcaaaggaactaatagagtgaaaactcactcattaccacgaggatggcacaagcgattcacgtaggatctgcccctgtgaccaaaacacctcccattgggccccacttccaacactggtgatcacatttcaacatgaggtttagggaaacaaatgcctaaactacagcactgtacataaactaacaggaaatgctgcttttgatcctcaaagaagtgatatagccaaaattgtaatttaagaagcctttgtcagtatagcaagatgttaactatagaatcaatctaggagtattcactgtaaaattcaacttttctgtatgtttgaacattttcacaatctcataggagtttttaaaaagaagagaaagaagatatactttgctttggagaaatctactttttgacttacatgggtttgctgtaattaagtgcccaatattgaaaggctgcaagtactttgtaatcactctttggcatgggtaaataagcatggtaacttatattgaaatatagtgctcttgctttggataactgtaaagggacccatgctgatagactggaaatagaagtaaatgtgtttattgataaaaaaaa

SEQ ID NO: 351565 - DNA, 2421 bp, Homo sapiens
gatccatcaaactgctaaagcctttttttccaagctccttcaacagtgaaccaaccctcatgtctgtgtggatccagctgactcttgactagattatgaagaagctgtgctcttgctgttagaaggagctgcctgggaagaagctttgaggctggtatacaaatataacagactggatattatagaaaccaacgtaaagccttccattttagaagcccagaaaaattatatggcatttctggactctcagacagccacattcagtcgccacaagaaacgtttattggtagttcgagagctcaaggagcaagcccagcaggcaggtctggatgatgaggtaccccacgggcaagagtcagacctcttctctgaaactagcagtgtcgtgagtggcagtgagatgagtggcaaatactcccatagtaactccaggatatcagcgtacgtatcacattgattcgacctggccctcctggaggcactgagtgaagtggtgcagaacactgaaaacctgaaagatgaagtataccatattttaaaggtactctttctctttgagtttgatgaacaaggaagggaattacagaaggcctttgaagatacgctgcagttgatggaaaggtcacttccagaaatttggactcttacttaccagcagaattcagctaccccggttctaggtcccaattctactgcaaatagtatcatggcatcttatcagcaacagaagacttcggttcctgttcttgatgctgagctttttataccaccaaagatcaacagaagaacccagtggaagctgagcctgctagactgagtgactgcagttaggagggatccgacagagaagaccatttccactcattcctgttgtcctaccaccccttgctctttgagggctggctattgagaactggaaagagtaaaatgataacttaccttagcattgccaagaacttcagcagacaacaagcaattctatttattttatgttgtgtatacatcttgatcattagcaagacattaagctttaaccattatggcaccattttgtgagaatgattgttctttcacttgggctgtttgagagcataattatggtaatcatgagattaatgtttcatgatttctacctccaaagtgtgaagacaagtaaaacaatgtttctaaattgtcttattttgttggcggagaagattacaatggctattagtgctacatttggtcaaatgtaatcacttaaatagcttcttgtcaccttaaactaaagcagaataaaaagtatcctttgaaattataagccctcctttgctgacagctattattttgtaacatcttaccaggtcatgtgctttcagttataactgggctgagcctcctataattacaatgtctatagggactgttttactgcctgtgtattttctgctagagagttagcaatgttagagctagaacagattagaatttctaaacagtatcatgcacagttggtgtgagtgatcagtgtgcattgtatggcatgcatggttgtgaattattctctgttctccaaatactgtttctttaactcagatatttttgttagtgtctaggccacttcatttatttttcgtcatggtactttactgacttctctttattcaattctccacgccctcaccaaaaaaaactgtctcaaaatgagaatattttattttcatggtgagtctagaaaacgcccacttcattctgattaaaaattcttccatgttttaaatatcagaaccagacctttcttactgtgtatcttagcccatttgtgtctctataacaacaaccagctttcaaaggaactaatagagtgaaaactcactcattaccacgaggatggcacaagcgattcacgtaggatctgcccctgtgaccaaaacacctcccattgggccccacttccaacactggtgatcacatttcaacatgaggtttagggaaacaaatgcctaaactacagcactgtacataaactaacaggaaatgctgcttttgatcctcaaagaagtgatatagccaaaattgtaatttaagaagcctttgtcagtatagcaagatgttaactatagaatcaatctaggagtattcactgtaaaattcaacttttctgtatgtttgaacattttcacaatctcataggagtttttaaaaagaagagaaagaagatatactttgctttggagaaatctactttttgacttacatgggtttgctgtaattaagtgcccaatattgaaaggctgcaagtactttgtaatcactctttggcatgggtaaataagcatggtaacttatattgaaatatagtgctcttgctttggataactgtaaagggacccatgctgatagactggaaatagaagtaaatgtgtttattgataaaaaaaa

SEQ ID NO: 351566 - DNA, 2431 bp, Homo sapiens
gatccatcaaactgctaaagcctttttttccaagctccttcaacagtgaaccaaccctcatgtctgtgtggatccagctgactcttgactagattatgaagaagctgtgctcttgctgttagaaggagctgcctgggaagaagctttgaggctggtatacaaatataacagactggatattatagaaaccaacgtaaagccttccattttagaagcccagaaaaattatatggcatttctggactctcagacagccacattcagtcgccacaagaaacgtttattggtagttcgagagctcaaggagcaagcccagcaggcaggtctggatgatgaggtaccccacgggcaagagtcagacctcttctctgaaactagcagtgtcgtgagtggcagtgagatgagtggcaaatactcccatagtaactccaggatatcagcgagatcatccaagaatcgccgaaaagcggagcggaagaagcacagcctcaaagaaggcagtccgctggaggacctggccctcctggaggcactgagtgaagtggtgcagaacactgaaaacctgaaagtttgatgaacaaggaagggaattacagaaggcctttgaagatacgctgcagttgatggaaaggtcacttccagaaatttggactcttacttaccagcagaattcagctaccccggttctaggtcccaattctactgcaaatagtatcatggcatcttatcagcaacagaagacttcggttcctgttcttgatgctgagctttttataccaccaaagatcaacagaagaacccagtggaagctgagcctgctagactgagtgactgcagttaggagggatccgacagagaagaccatttccactcattcctgttgtcctaccaccccttgctctttgagggctggctattgagaactggaaagagtaaaatgataacttaccttagcattgccaagaacttcagcagacaacaagcaattctatttattttatgttgtgtatacatcttgatcattagcaagacattaagctttaaccattatggcaccattttgtgagaatgattgttctttcacttgggctgtttgagagcataattatggtaatcatgagattaatgtttcatgatttctacctccaaagtgtgaagacaagtaaaacaatgtttctaaattgtcttattttgttggcggagaagattacaatggctattagtgctacatttggtcaaatgtaatcacttaaatagcttcttgtcaccttaaactaaagcagaataaaaagtatcctttgaaattataagccctcctttgctgacagctattattttgtaacatcttaccaggtcatgtgctttcagttataactgggctgagcctcctataattacaatgtctatagggactgttttactgcctgtgtattttctgctagagagttagcaatgttagagctagaacagattagaatttctaaacagtatcatgcacagttggtgtgagtgatcagtgtgcattgtatggcatgcatggttgtgaattattctctgttctccaaatactgtttctttaactcagatatttttgttagtgtctaggccacttcatttatttttcgtcatggtactttactgacttctctttattcaattctccacgccctcaccaaaaaaaactgtctcaaaatgagaatattttattttcatggtgagtctagaaaacgcccacttcattctgattaaaaattcttccatgttttaaatatcagaaccagacctttcttactgtgtatcttagcccatttgtgtctctataacaacaaccagctttcaaaggaactaatagagtgaaaactcactcattaccacgaggatggcacaagcgattcacgtaggatctgcccctgtgaccaaaacacctcccattgggccccacttccaacactggtgatcacatttcaacatgaggtttagggaaacaaatgcctaaactacagcactgtacataaactaacaggaaatgctgcttttgatcctcaaagaagtgatatagccaaaattgtaatttaagaagcctttgtcagtatagcaagatgttaactatagaatcaatctaggagtattcactgtaaaattcaacttttctgtatgtttgaacattttcacaatctcataggagtttttaaaaagaagagaaagaagatatactttgctttggagaaatctactttttgacttacatgggtttgctgtaattaagtgcccaatattgaaaggctgcaagtactttgtaatcactctttggcatgggtaaataagcatggtaacttatattgaaatatagtgctcttgctttggataactgtaaagggacccatgctgatagactggaaatagaagtaaatgtgtttattgataaaaaaaa

SEQ ID NO: 351567 - DNA, 2978 bp, Homo sapiens
cgtgcgcacgcgcgctgctctcaggtccgcaggttccacccccccccccgccccccccaattacagtgctttggggttcgacatcaaaacagagatcaaatacaaaagtttgggcagatgggcaagagggcagagggacaggggacgcggccaatgtagctcctctacctctacggtgccaggcctacaaagaaggccggccgccgtaagtgaccagaagcgggcccggcctcgccccctccgcctggtgacgtcactcccgcgccgcactcccagtgctgcggctgcctagttgacgcacccattgagtcgctggcttctttgcagcgcttcagcgttttcccctggagggcgcctccatccttggaggcctagtgccgtcggagagagagcgggagccgcggacagagacgcgtgcgcaattcggagccgactctgggtgcggactgtgggagctgactctgggtagccggctgcgcgtggctggggaggcgaggccggacgcacctctgtttgggggtcctcagagattaatgattcatcaagggatagttgtacttgtctcgtgggaatcacttcatcatgcgaaatctgaaattatttcggaccctggagttcagggatattcaaggtccagggaatcctcagtgcttctctctccgaactgaacaggggacggtgctcattggttcagaacatggcctgatagaagtagaccctgtctcaagagaagtgaaaaatgaagtttctttggtggcagaaggctttctcccagaggatggaagtggccgcattgttggtgttcaggacttgctggatcaggagtctgtgtgtgtggccacagcctctggagacgtcatactctgcagtctcagcacacaacagctggagtgtgttgggagtgtagccagtggtatctctgttatgagttggagtcctgaccaagagctggtgcttcttgccacaggtcaacagaccctgattatgatgacaaaagattttgagccaatcctggagcagcagatccatcaggatgattttggtgaaagcaagtttatcactgttggatggggtaggaaggagacacagttccatggatcagaaggcagacaagcagcttttcagatgcaaatgcatgagtctgctttgccctgggatgaccatagaccacaagttacctggcggggggatggacagttttttgctgtgagtgttgtttgcccagaaacaggggctcggaaggtcagagtgtggaaccgagagtttgctttgcagtcaaccagtgagcctgtggcaggactgggaccagccctggcttggaaaccctcaggcagtttgattgcatctacacaagataaacccaaccagcaggatattgtgttttttgagaaaaatggactccttcatggacactttacacttcccttccttaaagatgaggttaaggtaaatgacttgctctggaatgcagattcctctgtgcttgcagtctggctggaagaccttcagagagaagaaagctccattccgaaaacctgtgttcagctctggactgttggaaactatcactggtatctcaagcaaagtttatccttcagcacctgtgggaagagcaagattgtgtctctgatgtgggaccctgtgaccccataccggctgcatgttctctgtcagggctggcattacctcgcctatgattggcactggacgactgaccggagcgtgggagataattcaagtgacttgtccaatgtggctgtcattgatggaaacagggtgttggtgacagtcttccggcagactgtggttccgcctcccatgtgcacctaccaactgctgttcccacaccctgtgaatcaagtcacattcttagcacaccctcaaaagagtaatgaccttgctgttctagatgccagtaaccagatttctgtttataaatgtggtgattgtccaagtgctgaccctacagtgaaactgggagctgtgggtggaagtggatttaaagtttgccttagaactcctcatttggaaaagagatacaaaatccagtttgagaataatgaagatcaagatgtaaacccgctgaaactaggccttctcacttggattgaagaagacgtcttcctggctgtaagccacagtgagttcagcccccggtctgtcattcaccatttgactgcagcttcttctgagatggatgaagagcatggacagctcaatgtcagttcatctgcagcggtggatggggtcataatcagtctatgttgcaattccaagaccaagtcagtagtattacagctggctgatggccagatatttaagtacctttgggagtcaccttctctggctattaaaccatggaagaactctggtggatttcctgttcggtttccttatccatgcacccagaccgaattggccatgattggagaagaggaatgtgtccttggtctgactgacaggtgtcgctttttcatcaatgacattgaggttgcgtcaaatatcacgtcatttgcagtatatgatgagtttttattgttgacaacccattcccatacctgccagtgtttttgcctgagggatgcttcatttaaaacattacaggccggcctgagcagcaatcatgtgtcccatggggaagttctgcggaaagtggagaggggttcacggattgtcactgttgtgccccaggacacaaagcttgtattacagatgccaaggggaaacttagaagttgttcatcatcgagccctggttttagctcagattcggaagtggttggacaaacttatgtttaaagaggcatttgaatgcatgagaaagctgagaatcaatctcaatctgatttatgatcataaccctaaggtgtttcttggaaatgtggaaaccttcattaaacagatagattctgtgaatcatattaacttgttttttacagaattgaagtaagtattttgaataattcatgtgtatctttt

SEQ ID NO: 351568 - DNA, 568 bp, Homo sapiens
ctactggagcatagaatatttgctgaagttgtataatggaaggagaaatagattttgatttttaggacattatacctggaatggtttagataacttattatttttaaagtcatccaaatgcaatgtaaatatgtaaggttttgtgggcaaatggagcctctgtgtaaaacaggaaaaggcactctttcctctgggcaagtacagtcccacagtgggatgaaccgctcgccgagagacaagggacacatgggatttaaaacttccttggataaagatattcattaattcgttcattcattcattcatgtttgctggaaaaaaaactcttctggattttatctattctttagttaggtgagctttcgatattgtaacactctgagtttgctttaagaccctcaggcagtttgattgcatctacacaagataaacccaaccagcaggatattgtgttttttgagaaaaatggactccttcatggacactttacacttcccttccttaaagatgaggttaaggtaagtgcctgagtttgtttcaccctcgaatgtagaggactttccatagc

SEQ ID NO: 351569 - DNA, 6185 bp, Homo sapiens
cgtgcgcacgcgcgctgctctcaggtccgcaggttccacccccccccccgccccccccaattacagtgctttggggttcgacatcaaaacagagatcaaatacaaaagtttgggcagatgggcaagagggcagagggacaggggacgcggccaatgtagctcctctacctctacggtgccaggcctacaaagaaggccggccgccgtaagtgaccagaagcgggcccggcctcgccccctccgcctggtgacgtcactcccgcgccgcactcccagtgctgcggctgcctagttgacgcacccattgagtcgctggcttctttgcagcgcttcagcgttttcccctggagggcgcctccatccttggaggcctagtgccgtcggagagagagcgggagccgcggacagagacgcgtgcgcaattcggagccgactctgggtgcggactgtgggagctgactctgggtagccggctgcgcgtggctggggaggcgaggccggacgcacctctgtttgggggtcctcagagattaatgattcatcaagggatagttgtacttgtctcgtgggaatcacttcatcatgcgaaatctgaaattatttcggaccctggagttcagggatattcaaggtccagggaatcctcagtgcttctctctccgaactgaacaggggacggtgctcattggttcagaacatggcctgatagaagtagaccctgtctcaagagaagtgaaaaatgaagtttctttggtggcagaaggctttctcccagaggatggaagtggccgcattgttggtgttcaggacttgctggatcaggagtctgtgtgtgtggccacagcctctggagacgtcatactctgcagtctcagcacacaacagctggagtgtgttgggagtgtagccagtggtatctctgttatgagttggagtcctgaccaagagctggtgcttcttgccacaggtcaacagaccctgattatgatgacaaaagattttgagccaatcctggagcagcagatccatcaggatgattttggtgaaagcaagtttatcactgttggatggggtaggaaggagacacagttccatggatcagaaggcagacaagcagcttttcagatgcaaatgcatgagtctgctttgccctgggatgaccatagaccacaagttacctggcggggggatggacagttttttgctgtgagtgttgtttgcccagaaacaggggctcggaaggtcagagtgtggaaccgagagtttgctttgcagtcaaccagtgagcctgtggcaggactgggaccagccctggcttggaaaccctcaggcagtttgattgcatctacacaagataaacccaaccagcaggatattgtgttttttgagaaaaatggactccttcatggacactttacacttcccttccttaaagatgaggttaaggtaaatgacttgctctggaatgcagattcctctgtgcttgcagtctggctggaagaccttcagagagaagaaagctccattccgaaaacctgtgttcagctctggactgttggaaactatcactggtatctcaagcaaagtttatccttcagcacctgtgggaagagcaagattgtgtctctgatgtgggaccctgtgaccccataccggctgcatgttctctgtcagggctggcattacctcgcctatgattggcactggacgactgaccggagcgtgggagataattcaagtgacttgtccaatgtggctgtcattgatggaaacagggtgttggtgacagtcttccggcagactgtggttccgcctcccatgtgcacctaccaactgctgttcccacaccctgtgaatcaagtcacattcttagcacaccctcaaaagagtaatgaccttgctgttctagatgccagtaaccagatttctgtttataaatgtggtgattgtccaagtgctgaccctacagtgaaactgggagctgtgggtggaagtggatttaaagtttgccttagaactcctcatttggaaaagagatacaaaatccagtttgagaataatgaagatcaagatgtaaacccgctgaaactaggccttctcacttggattgaagaagacgtcttcctggctgtaagccacagtgagttcagcccccggtctgtcattcaccatttgactgcagcttcttctgagatggatgaagagcatggacagctcaatgtcagttcatctgcagcggtggatggggtcataatcagtctatgttgcaattccaagaccaagtcagtagtattacagctggctgatggccagatatttaagtacctttgggagtcaccttctctggctattaaaccatggaagaactctggtggatttcctgttcggtttccttatccatgcacccagaccgaattggccatgattggagaagaggaatgtgtccttggtctgactgacaggtgtcgctttttcatcaatgacattgaggttgcgtcaaatatcacgtcatttgcagtatatgatgagtttttattgttgacaacccattcccatacctgccagtgtttttgcctgagggatgcttcatttaaaacattacaggccggcctgagcagcaatcatgtgtcccatggggaagttctgcggaaagtggagaggggttcacggattgtcactgttgtgccccaggacacaaagcttgtattacagatgccaaggggaaacttagaagttgttcatcatcgagccctggttttagctcagattcggaagtggttggacaaacttatgtttaaagaggcatttgaatgcatgagaaagctgagaatcaatctcaatctgatttatgatcataaccctaaggtgtttcttggaaatgtggaaaccttcattaaacagatagattctgtgaatcatattaacttgttttttacagaattgaaagaagaagatgtcacgaagaccatgtaccctgcaccagttaccagcagtgtctacctgtccagggatcctgacgggaataaaatagaccttgtctgcgatgctatgagagcagtcatggagagcataaatcctcataaatactgcctatccatacttacatctcatgtaaagaagacaaccccagaactggaaattgtactgcaaaaagtacacgagcttcaaggaaatgctccctctgatcctgatgctgtgagtgctgaagaggccttgaaatatttgctgcatctggtagatgttaatgaattatatgatcattctcttggcacctatgactttgatttggtcctcatggtagctgagaagtcacagaaggatcccaaagaatatcttccatttcttaatacacttaagaaaatggaaactaattatcagcggtttactatagacaaatacttgaaacgatatgaaaaagccattggccacctcagcaaatgtggacctgagtacttcccagaatgcttaaacttgataaaagataaaaacttgtataacgaagctctgaagttatattcaccaagctcacaacagtaccaggatatcagcattgcttatggggagcacctgatgcaggagcacatgtatgagccagcggggctcatgtttgcccgttgcggtgcccacgagaaagctctctcagcctttctgacatgtggcaactggaagcaagccctctgtgtggcagcccagcttaactttaccaaagaccagctggtgggcctcggcagaactctggcaggaaagctggttgagcagaggaagcacattgatgcggccatggttttggaagagtgtgcccaggattatgaagaagctgtgctcttgctgttagaaggagctgcctgggaagaagctttgaggctggtatacaaatataacagactggatattatagaaaccaacgtaaagccttccattttagaagcccagaaaaattatatggcatttctggactctcagacagccacattcagtcgccacaagaaacgtttattggtagttcgagagctcaaggagcaagcccagcaggcaggtctggatgatgaggtaccccacgggcaagagtcagacctcttctctgaaactagcagtgtcgtgagtggcagtgagatgagtggcaaatactcccatagtaactccaggatatcagcgagatcatccaagaatcgccgaaaagcggagcggaagaagcacagcctcaaagaaggcagtccgctggaggacctggccctcctggaggcactgagtgaagtggtgcagaacactgaaaacctgaaagatgaagtataccatattttaaaggtactctttctctttgagtttgatgaacaaggaagggaattacagaaggcctttgaagatacgctgcagttgatggaaaggtcacttccagaaatttggactcttacttaccagcagaattcagctaccccggttctaggtcccaattctactgcaaatagtatcatggcatcttatcagcaacagaagacttcggttcctgttcttgatgctgagctttttataccaccaaagatcaacagaagaacccagtggaagctgagcctgctagactgagtgactgcagttaggagggatccgacagagaagaccatttccactcattcctgttgtcctaccaccccttgctctttgagggctggctattgagaactggaaagagtaaaatgataacttaccttagcattgccaagaacttcagcagacaacaagcaattctatttattttatgttgtgtatacatcttgatcattagcaagacattaagctttaaccattatggcaccattttgtgagaatgattgttctttcacttgggctgtttgagagcataattatggtaatcatgagattaatgtttcatgatttctacctccaaagtgtgaagacaagtaaaacaatgtttctaaattgtcttattttgttggcggagaagattacaatggctattagtgctacatttggtcaaatgtaatcacttaaatagcttcttgtcaccttaaactaaagcagaataaaaagtatcctttgaaattataagccctcctttgctgacagctattattttgtaacatcttaccaggtcatgtgctttcagttataactgggctgagcctcctataattacaatgtctatagggactgttttactgcctgtgtattttctgctagagagttagcaatgttagagctagaacagattagaatttctaaacagtatcatgcacagttggtgtgagtgatcagtgtgcattgtatggcatgcatggttgtgaattattctctgttctccaaatactgtttctttaactcagatatttttgttagtgtctaggccacttcatttatttttcgtcatggtactttactgacttctctttattcaattctccacgccctcaccaaaaaaaactgtctcaaaatgagaatattttattttcatggtgagtctagaaaacgcccacttcattctgattaaaaattcttccatgttttaaatatcagaaccagacctttcttactgtgtatcttagcccatttgtgtctctataacaacaaccagctttcaaaggaactaatagagtgaaaactcactcattaccacgaggatggcacaagcgattcacgtaggatctgcccctgtgaccaaaacacctcccattgggccccacttccaacactggtgatcacatttcaacatgaggtttagggaaacaaatgcctaaactacagcactgtacataaactaacaggaaatgctgcttttgatcctcaaagaagtgatatagccaaaattgtaatttaagaagcctttgtcagtatagcaagatgttaactatagaatcaatctaggagtattcactgtaaaattcaacttttctgtatgtttgaacattttcacaatctcataggagtttttaaaaagaagagaaagaagatatactttgctttggagaaatctactttttgacttacatgggtttgctgtaattaagtgcccaatattgaaaggctgcaagtactttgtaatcactctttggcatgggtaaataagcatggtaacttatattgaaatatagtgctcttgctttggataactgtaaagggacccatgctgatagactggaaatagaagtaaatgtgtttattgataaaaaaaa

SEQ ID NO: 351570 - DNA, 5449 bp, Homo sapiens
  misc_feature (5449)..(5449): n is a, c, g, or t
cgtgcgcacgcgcgctgctctcaggtccgcaggttccacccccccccccgccccccccaattacagtgctttggggttcgacatcaaaacagagatcaaatacaaaagtttgggcagatgggcaagagggcagagggacaggggacgcggccaatgtagctcctctacctctacggtgccaggcctacaaagaaggccggccgccgtaagtgaccagaagcgggcccggcctcgccccctccgcctggtgacgtcactcccgcgccgcactcccagtgctgcggctgcctagttgacgcacccattgagtcgctggcttctttgcagcgcttcagcgttttcccctggagggcgcctccatccttggaggcctagtgccgtcggagagagagcgggagccgcggacagagacgcgtgcgcaattcggagccgactctgggtgcggactgtgggagctgactctgggtagccggctgcgcgtggctggggaggcgaggccggacgcacctctgtttgggggtcctcagagattaatgattcatcaagggatagttgtacttgtctcgtgggaatcacttcatcatgcgaaatctgaaattatttcggaccctggagttcagggatattcaaggtccagggaatcctcagtgcttctctctccgaactgaacaggggacggtgctcattggttcagaacatggcctgatagaagtagaccctgtctcaagagaagtgaaaaatgaagtttctttggtggcagaaggctttctcccagaggatggaagtggccgcattgttggtgttcaggacttgctggatcaggagtctgtgtgtgtggccacagcctctggagacgtcatactctgcagtctcagcacacaacagctggagtgtgttgggagtgtagccagtggtatctctgttatgagttggagtcctgaccaagagctggtgcttcttgccacaggtcaacagaccctgattatgatgacaaaagattttgagccaatcctggagcagcagatccatcaggatgattttggtgaaagcaagtttatcactgttggatggggtaggaaggagacacagttccatggatcagaaggcagacaagcagcttttcagatgcaaatgcatgagtctgctttgccctgggatgaccatagaccacaagttacctggcggggggatggacagttttttgctgtgagtgttgtttgcccagaaacaggggctcggaaggtcagagtgtggaaccgagagtttgctttgcagtcaaccagtgagcctgtggcaggactgggaccagccctggcttggaaaccctcaggcagtttgattgcatctacacaagataaacccaaccagcaggatattgtgttttttgagaaaaatggactccttcatggacactttacacttcccttccttaaagatgaggttaaggtaaatgacttgctctggaatgcagattcctctgtgcttgcagtctggctggaagaccttcagagagaagaaagctccattccgaaaacctgtgttcagctctggactgttggaaactatcactggtatctcaagcaaagtttatccttcagcacctgtgggaagagcaagattgtgtctctgatgtgggaccctgtgaccccataccggctgcatgttctctgtcagggctggcattacctcgcctatgattggcactggacgactgaccggagcgtgggagataattcaagtgacttgtccaatgtggctgtcattgatggaaacagggtgttggtgacagtcttccggcagactgtggttccgcctcccatgtgcacctaccaactgctgttcccacaccctgtgaatcaagtcacattcttagcacaccctcaaaagagtaatgaccttgctgttctagatgccagtaaccagatttctgtttataaatgtggtgattgtccaagtgctgaccctacagtgaaactgggagctgtgggtggaagtggatttaaagtttgccttagaactcctcatttggaaaagagatacaaaatccagtttgagaataatgaagatcaagatgtaaacccgctgaaactaggccttctcacttggattgaagaagacgtcttcctggctgtaagccacagtgagttcagcccccggtctgtcattcaccatttgactgcagcttcttctgagatggatgaagagcatggacagctcaatgtcagttcatctgcagcggtggatggggtcataatcagtctatgttgcaattccaagaccaagtcagtagtattacagctggctgatggccagatatttaagtacctttgggagtcaccttctctggctattaaaccatggaagaactctggtggatttcctgttcggtttccttatccatgcacccagaccgaattggccatgattggagaagaggaatgtgtccttggtctgactgacaggtgtcgctttttcatcaatgacattgaggttgcgtcaaatatcacgtcatttgcagtatatgatgagtttttattgttgacaacccattcccatacctgccagtgtttttgcctgagggatgcttcatttaaaacattacaggccggcctgagcagcaatcatgtgtcccatggggaagttctgcggaaagtggagaggggttcacggattgtcactgttgtgccccaggacacaaagcttgtattacagatgccaaggggaaacttagaagttgttcatcatcgagccctggttttagctcagattcggaagtggttggacaaacttatgtttaaagaggcatttgaatgcatgagaaagctgagaatcaatctcaatctgatttatgatcataaccctaaggtgtttcttggaaatgtggaaaccttcattaaacagatagattctgtgaatcatattaacttgttttttacagaattgaaagaagaagatgtcacgaagaccatgtaccctgcaccagttaccagcagtgtctacctgtccagggatcctgacgggaataaaatagaccttgtctgcgatgctatgagagcagtcatggagagcataaatcctcataaatactgcctatccatacttacatctcatgtaaagaagacaaccccagaactggaaattgtactgcaaaaagtacacgagcttcaaggaaatgctccctctgatcctgatgctgtgagtgctgaagaggccttgaaatatttgctgcatctggtagatgttaatgaattatatgatcattctcttggcacctatgactttgatttggtcctcatggtagctgagaagtcacagaaggatcccaaagaatatcttccatttcttaatacacttaagaaaatggaaactaattatcagcggtttactatagacaaatacttgaaacgatatgaaaaagccattggccacctcagcaaatgtggacctgagtacttcccagaatgcttaaacttgataaaagataaaaacttgtataacgaagctctgaagttatattcaccaagctcacaacagtaccaggatatcagcattgcttatggggagcacctgatgcaggagcacatgtatgagccagcggggctcatgtttgcccgttgcggtgcccacgagaaagctctctcagcctttctgacatgtggcaactggaagcaagccctctgtgtggcagcccagcttaactttaccaaagaccagctggtgggcctcggcagaactctggcaggaaagctggttgagcagaggaagcacattgatgcggccatggttttggaagagtgtgcccaggattatgaagaagctgtgctcttgctgttagaaggagctgcctgggaagaagctttgaggctggtatacaaatataacagactggatattatagaaaccaacgtaaagccttccattttagaagcccagaaaaattatatggcatttctggactctcagacagccacattcagtcgccacaagaaacgtttattggtagttcgagagctcaaggagcaagcccagcaggcaggtctggatgatgaggtaccccacgggcaagagtcagacctcttctctgaaactagcagtgtcgtgagtggcagtgagatgagtggcaaatactcccatagtaactccaggatatcagcgagatcatccaagaatcgccgaaaagcggagcggaagaagcacagcctcaaagaaggcagtccgctggaggacctggccctcctggaggcactgagtgaagtggtgcagaacactgaaaacctgaaagatgaagtataccatattttaaaggtactctttctctttgagtttgatgaacaaggaagggaattacagaaggcctttgaagatacgctgcagttgatggaaaggtcacttccagaaatttggactcttacttaccagcagaattcagctaccccggttctaggtcccaattctactgcaaatagtatcatggcatcttatcagcaacagaagacttcggttcctgttcttgatgctgagctttttataccaccaaagatcaacagaagaacccagtggaagctgagcctgctagactgagtgactgcagttaggagggatccgacagagaagaccatttccactcattcctgttgtcctaccaccccttgctctttgagggctggctattgagaactggaaagagtaaaatgataacttaccttagcattgccaagaacttcagcagacaacaagcaattctatttattttatgttgtgtatacatcttgatcattagcaagacattaagctttaaccattatggcaccattttgtgagaatgattgttctttcacttgggctgtttgagagcataattatggtaatcatgagattaatgtttcatgatttctacctccaaagtgtgaagacaagtaaaacaatgtttctaaattgtcttattttgttggcggagaagattacaatggctattagtgctacatttggtcaaatgtaatcacttaaatagcttcttgtcaccttaaactaaagcagaataaaaagtatcctttgaaataaaaaaacaaaaaaaaaaaaaaaaaaaaaaaaaaaaaaaaaaacaaaaaaaaaaaaaaacaaaaagaaacaaagacaaaagacaagatacgaagaaaacaacaagacaaaccaaaccaagaacaagggagggcgcagacaacatatcaacaacagaggggggcaaaccgcagcagccagacaccgccgattgaggaggagcgggtatcgtagtgacgacgcaaccaaggcgagggggcggcagcaaaagagacggaggaagacgaccagcgggagaggcgtggagaccactgggggggtgcataaacaagcccaccagagcaacaggtgcgaaaatacataaggaggtgggcaacaccgtctgccgggagctgccacagaaaaaataagn

SEQ ID NO: 351571 - DNA, 1215 bp, Homo sapiens
atgaatacttcagagcttcgttatacaagtttttatcttttatcaagtttaagcattctgggaaggtaccgatatcagcattgcttatggggagcacctgatgcaggagcacatgtatgagccagcggggctcatgtttgcccgttgcggtgcccacgagaaagctctctcagcctttctgacatgtggcaactggaagcaagccctctgtgtggcagcccagcttaactttaccaaagaccagctggtgggcctcggcagaactctggcaggaaagctggttgagcagaggaagcacattgatgcggccatggttttggaagagtgtgcccaggattatgaagaagctgtgctcttgctgttagaaggagctgcctgggaagaagctttgaggctggtatacaaatataacagactggatattatagaaaccaacgtaaagccttccattttagaagcccagaaaaattatatggcatttctggactctcagacagccacattcagtcgccacaagaaacgtttattggtagttcgagagctcaaggagcaagcccagcaggcaggtctggatgatgaggtaccccacgggcaagagtcagacctcttctctgaaactagcagtgtcgtgagtggcagtgagatgagtggcaaatactcccatagtaactccaggatatcagcgagatcatccaagaatcgccgaaaagcggagcggaagaagcacagcctcaaagaaggcagtccgctggaggacctggccctcctggaggcactgagtgaagtggtgcagaacactgaaaacctgaaagtgggagatgaaggtatacccatattttacacaggtactccttctctttcgagagttcgatggaaccagggaagggcaattcacagacagggccttttggcagaaatactgcctggcaagttcggttgggcaagggtcccatttccagaaacactttcgggagctctcttaagttacccacggcagaaatttcaggtaacacccggggatacaaggggtcccaattctatacgggcactatgtatcgacggcgagtcgtagcttagcgacagaaaggacgttcggtccaggatcatctagaggtgaagcttgttataccagcccaaggattctaacagaaagacccagtgagtctgagcctggtcaatagtgagagtgcagttgaggggacctcacgcacagac

SEQ ID NO: 351572 - DNA, 6302 bp, Homo sapiens
cgtgcgcacgcgcgctgctctcaggtccgcaggttccacccccccccccgccccccccaattacagtgctttggggttcgacatcaaaacagagatcaaatacaaaagtttgggcagatgggcaagagggcagagggacaggggacgcggccaatgtagctcctctacctctacggtgccaggcctacaaagaaggccggccgccgtaagtgaccagaagcgggcccggcctcgccccctccgcctggtgacgtcactcccgcgccgcactcccagtgctgcggctgcctagttgacgcacccattgagtcgctggcttctttgcagcgcttcagcgttttcccctggagggcgcctccatccttggaggcctagtgccgtcggagagagagcgggagccgcggacagagacgcgtgcgcaattcggagccgactctgggtgcggactgtgggagctgactctgggtagccggctgcgcgtggctggggaggcgaggccggacgcacctctgtttgggggtcctcagagattaatgattcatcaagggatagttgtacttgtctcgtgggaatcacttcatcatgcgaaatctgaaattatttcggaccctggagttcagggatattcaaggtccagggaatcctcagtgcttctctctccgaactgaacaggggacggtgctcattggttcagaacatggcctgatagaagtagaccctgtctcaagagaagtgaaaaatgaagtttctttggtggcagaaggctttctcccagaggatggaagtggccgcattgttggtgttcaggacttgctggatcaggagtctgtgtgtgtggccacagcctctggagacgtcatactctgcagtctcagcacacaacagctggagtgtgttgggagtgtagccagtggtatctctgttatgagttggagtcctgaccaagagctggtgcttcttgccacaggtcaacagaccctgattatgatgacaaaagattttgagccaatcctggagcagcagatccatcaggatgattttggtgaaagcaagtttatcactgttggatggggtaggaaggagacacagttccatggatcagaaggcagacaagcagcttttcagatgcaaatgcatgagtctgctttgccctgggatgaccatagaccacaagttacctggcggggggatggacagttttttgctgtgagtgttgtttgcccagaaacaggggctcggaaggtcagagtgtggaaccgagagtttgctttgcagtcaaccagtgagcctgtggcaggactgggaccagccctggcttggaaaccctcaggcagtttgattgcatctacacaagataaacccaaccagcaggatattgtgttttttgagaaaaatggactccttcatggacactttacacttcccttccttaaagatgaggttaaggtaaatgacttgctctggaatgcagattcctctgtgcttgcagtctggctggaagaccttcagagagaagaaagctccattccgaaaacctgtgttcagctctggactgttggaaactatcactggtatctcaagcaaagtttatccttcagcacctgtgggaagagcaagattgtgtctctgatgtgggaccctgtgaccccataccggctgcatgttctctgtcagggctggcattacctcgcctatgattggcactggacgactgaccggagcgtgggagataattcaagtgacttgtccaatgtggctgtcattgatggaaacagggtgttggtgacagtcttccggcagactgtggttccgcctcccatgtgcacctaccaactgctgttcccacaccctgtgaatcaagtcacattcttagcacaccctcaaaagagtaatgaccttgctgttctagatgccagtaaccagatttctgtttataaatgtggtgattgtccaagtgctgaccctacagtgaaactgggagctgtgggtggaagtggatttaaagtttgccttagaactcctcatttggaaaagagatacaaaatccagtttgagaataatgaagatcaagatgtaaacccgctgaaactaggccttctcacttggattgaagaagacgtcttcctggctgtaagccacagtgagttcagcccccggtctgtcattcaccatttgactgcagcttcttctgagatggatgaagagcatggacagctcaatgtcagttcatctgcagcggtggatggggtcataatcagtctatgttgcaattccaagaccaagtcagtagtattacagctggctgatggccagatatttaagtacctttgggagtcaccttctctggctattaaaccatggaagaactctggtggatttcctgttcggtttccttatccatgcacccagaccgaattggccatgattggagaagaggaatgtgtccttggtctgactgacaggtgtcgctttttcatcaatgacattgaggttgcgtcaaatatcacgtcatttgcagtatatgatgagtttttattgttgacaacccattcccatacctgccagtgtttttgcctgagggatgcttcatttaaaacattacaggccggcctgagcagcaatcatgtgtcccatggggaagttctgcggaaagtggagaggggttcacggattgtcactgttgtgccccaggacacaaagcttgtattacagatgccaaggggaaacttagaagttgttcatcatcgagccctggttttagctcagattcggaagtggttggacaaacttatgtttaaagaggcatttgaatgcatgagaaagctgagaatcaatctcaatctgatttatgatcataaccctaaggtgtttcttggaaatgtggaaaccttcattaaacagatagattctgtgaatcatattaacttgttttttacagaattgaaagaagaagatgtcacgaagaccatgtaccctgcaccagttaccagcagtgtctacctgtccagggatcctgacgggaataaaatagaccttgtctgcgatgctatgagagcagtcatggagagcataaatcctcataaatactgcctatccatacttacatctcatgtaaagaagacaaccccagaactggaaattgtactgcaaaaagtacacgagcttcaaggaaatgctccctctgatcctgatgctgtgagtgctgaagaggccttgaaatatttgctgcatctggtagatgttaatgaattatatgatcattctcttggcacctatgactttgatttggtcctcatggtagctgagaagtcacagaaggatcccaaagaatatcttccatttcttaatacacttaagaaaatggaaactaattatcagcggtttactatagacaaatacttgaaacgatatgaaaaagccattggccacctcagcaaatgtggacctgagtacttcccagaatgcttaaacttgataaaagataaaaacttgtataacgaagctctgaagttatattcaccaagctcacaacagtaccaggatatcagcattgcttatggggagcacctgatgcaggagcacatgtatgagccagcggggctcatgtttgcccgttgcggtgcccacgagaaagctctctcagcctttctgacatgtggcaactggaagcaagccctctgtgtggcagcccagcttaactttaccaaagaccagctggtgggcctcggcagaactctggcaggaaagctggttgagcagaggaagcacattgatgcggccatggttttggaagagtgtgcccagagatggggtgttactagttgcccacgctggtctgaaactcctggcctcaagtgatccctccacctctgcctcccaaagtgctgggattccatgtgtaagccactgtgcctgaccaaggattatgaagaagctgtgctcttgctgttagaaggagctgcctgggaagaagctttgaggctggtatacaaatataacagactggatattatagaaaccaacgtaaagccttccattttagaagcccagaaaaattatatggcatttctggactctcagacagccacattcagtcgccacaagaaacgtttattggtagttcgagagctcaaggagcaagcccagcaggcaggtctggatgatgaggtaccccacgggcaagagtcagacctcttctctgaaactagcagtgtcgtgagtggcagtgagatgagtggcaaatactcccatagtaactccaggatatcagcgagatcatccaagaatcgccgaaaagcggagcggaagaagcacagcctcaaagaaggcagtccgctggaggacctggccctcctggaggcactgagtgaagtggtgcagaacactgaaaacctgaaagatgaagtataccatattttaaaggtactctttctctttgagtttgatgaacaaggaagggaattacagaaggcctttgaagatacgctgcagttgatggaaaggtcacttccagaaatttggactcttacttaccagcagaattcagctaccccggttctaggtcccaattctactgcaaatagtatcatggcatcttatcagcaacagaagacttcggttcctgttcttgatgctgagctttttataccaccaaagatcaacagaagaacccagtggaagctgagcctgctagactgagtgactgcagttaggagggatccgacagagaagaccatttccactcattcctgttgtcctaccaccccttgctctttgagggctggctattgagaactggaaagagtaaaatgataacttaccttagcattgccaagaacttcagcagacaacaagcaattctatttattttatgttgtgtatacatcttgatcattagcaagacattaagctttaaccattatggcaccattttgtgagaatgattgttctttcacttgggctgtttgagagcataattatggtaatcatgagattaatgtttcatgatttctacctccaaagtgtgaagacaagtaaaacaatgtttctaaattgtcttattttgttggcggagaagattacaatggctattagtgctacatttggtcaaatgtaatcacttaaatagcttcttgtcaccttaaactaaagcagaataaaaagtatcctttgaaattataagccctcctttgctgacagctattattttgtaacatcttaccaggtcatgtgctttcagttataactgggctgagcctcctataattacaatgtctatagggactgttttactgcctgtgtattttctgctagagagttagcaatgttagagctagaacagattagaatttctaaacagtatcatgcacagttggtgtgagtgatcagtgtgcattgtatggcatgcatggttgtgaattattctctgttctccaaatactgtttctttaactcagatatttttgttagtgtctaggccacttcatttatttttcgtcatggtactttactgacttctctttattcaattctccacgccctcaccaaaaaaaactgtctcaaaatgagaatattttattttcatggtgagtctagaaaacgcccacttcattctgattaaaaattcttccatgttttaaatatcagaaccagacctttcttactgtgtatcttagcccatttgtgtctctataacaacaaccagctttcaaaggaactaatagagtgaaaactcactcattaccacgaggatggcacaagcgattcacgtaggatctgcccctgtgaccaaaacacctcccattgggccccacttccaacactggtgatcacatttcaacatgaggtttagggaaacaaatgcctaaactacagcactgtacataaactaacaggaaatgctgcttttgatcctcaaagaagtgatatagccaaaattgtaatttaagaagcctttgtcagtatagcaagatgttaactatagaatcaatctaggagtattcactgtaaaattcaacttttctgtatgtttgaacattttcacaatctcataggagtttttaaaaagaagagaaagaagatatactttgctttggagaaatctactttttgacttacatgggtttgctgtaattaagtgcccaatattgaaaggctgcaagtactttgtaatcactctttggcatgggtaaataagcatggtaacttatattgaaatatagtgctcttgctttggataactgtaaagggacccatgctgatagactggaaatagaagtaaatgtgtttattgataaaaaaaa

SEQ ID NO: 351573 - DNA, 6144 bp, Homo sapiens
cgtgcgcacgcgcgctgctctcaggtccgcaggttccacccccccccccgccccccccaattacagtgctttggggttcgacatcaaaacagagatcaaatacaaaagtttgggcagatgggcaagagggcagagggacaggggacgcggccaatgtagctcctctacctctacggtgccaggcctacaaagaaggccggccgccgtaagtgaccagaagcgggcccggcctcgccccctccgcctggtgacgtcactcccgcgccgcactcccagtgctgcggctgcctagttgacgcacccattgagtcgctggcttctttgcagcgcttcagcgttttcccctggagggcgcctccatccttggaggcctagtgccgtcggagagagagcgggagccgcggacagagacgcgtgcgcaattcggagccgactctgggtgcggactgtgggagctgactctgggtagccggctgcgcgtggctggggaggcgaggccggacgcacctctgtttgggggtcctcagagattaatgattcatcaagggatagttgtacttgtctcgtgggaatcacttcatcatgcgaaatctgaaattatttcggaccctggagttcagggatattcaaggtccagggaatcctcagtgcttctctctccgaactgaacaggggacggtgctcattggttcagaacatggcctgatagaagtagaccctgtctcaagagaagtgaaaaatgaagtttctttggtggcagaaggctttctcccagaggatggaagtggccgcattgttggtgttcaggacttgctggatcaggagtctgtgtgtgtggccacagcctctggagacgtcatactctgcagtctcagcacacaacagctggagtgtgttgggagtgtagccagtggtatctctgttatgagttggagtcctgaccaagagctggtgcttcttgccacaggtcaacagaccctgattatgatgacaaaagattttgagccaatcctggagcagcagatccatcaggatgattttggtgaaagcaagtttatcactgttggatggggtaggaaggagacacagttccatggatcagaaggcagacaagcagcttttcagatgcaaatgcatgagtctgctttgccctgggatgaccatagaccacaagttacctggcggggggatggacagttttttgctgtgagtgttgtttgcccagaaacaggggctcggaaggtcagagtgtggaaccgagagtttgctttgcagtcaaccagtgagcctgtggcaggactgggaccagccctggcttggaaaccctcaggcagtttgattgcatctacacaagataaacccaaccagcaggatattgtgttttttgagaaaaatggactccttcatggacactttacacttcccttccttaaagatgaggttaaggtaaatgacttgctctggaatgcagattcctctgtgcttgcagtctggctggaagaccttcagagagaagaaagctccattccgaaaacctgtgttcagctctggactgttggaaactatcactggtatctcaagcaaagtttatccttcagcacctgtgggaagagcaagattgtgtctctgatgtgggaccctgtgaccccataccggctgcatgttctctgtcagggctggcattacctcgcctatgattggcactggacgactgaccggagcgtgggagataattcaagtgacttgtccaatgtggctgtcattgatggaaacagggtgttggtgacagtcttccggcagactgtggttccgcctcccatgtgcacctaccaactgctgttcccacaccctgtgaatcaagtcacattcttagcacaccctcaaaagagtaatgaccttgctgttctagatgccagtaaccagatttctgtttataaatgtggtgattgtccaagtgctgaccctacagtgaaactgggagctgtgggtggaagtggatttaaagtttgccttagaactcctcatttggaaaagagatacaaaatccagtttgagaataatgaagatcaagatgtaaacccgctgaaactaggccttctcacttggattgaagaagacgtcttcctggctgtaagccacagtgagttcagcccccggtctgtcattcaccatttgactgcagcttcttctgagatggatgaagagcatggacagctcaatgtcagttcatctgcagcggtggatggggtcataatcagtctatgttgcaattccaagaccaagtcagtagtattacagctggctgatggccagatatttaagtacctttgggagtcaccttctctggctattaaaccatggaagaactctggtggatttcctgttcggtttccttatccatgcacccagaccgaattggccatgattggagaagaggaatgtgtccttggtctgactgacaggtgtcgctttttcatcaatgacattgaggttgcgtcaaatatcacgtcatttgcagtatatgatgagtttttattgttgacaacccattcccatacctgccagtgtttttgcctgagggatgcttcatttaaaacattacaggccggcctgagcagcaatcatgtgtcccatggggaagttctgcggaaagtggagaggggttcacggattgtcactgttgtgccccaggacacaaagcttgtattacagatgccaaggggaaacttagaagttgttcatcatcgagccctggttttagctcagattcggaagtggttggacaaacttatgtttaaagaggcatttgaatgcatgagaaagctgagaatcaatctcaatctgatttatgatcataaccctaaggtgtttcttggaaatgtggaaaccttcattaaacagatagattctgtgaatcatattaacttgttttttacagaattgaaagaagaagatgtcacgaagaccatgtaccctgcaccagttaccagcagtgtctacctgtccagggatcctgacgggaataaaatagaccttgtctgcgatgctatgagagcagtcatggagagcataaatcctcataaatactgcctatccatacttacatctcatgtaaagaagacaaccccagaactggaaattgtactgcaaaaagtacacgagcttcaaggaaatgctccctctgatcctgatgctgtgagtgctgaagaggccttgaaatatttgctgcatctggtagatgttaatgaattatatgatcattctcttggcacctatgactttgatttggtcctcatggtagctgagaagtcacagaaggatcccaaagaatatcttccatttcttaatacacttaagaaaatggaaactaattatcagcggtttactatagacaaatacttgaaacgatatgaaaaagccattggccacctcagcaaatgtggacctgagtacttcccagaatgcttaaacttgataaaagataaaaacttgtataacgaagctctgaagttatattcaccaagctcacaacagtaccaggatatcagcattgcttatggggagcacctgatgcaggagcacatgtatgagccagcggggctcatgtttgcccgttgcggtgcccacgagaaagctctctcagcctttctgacatgtggcaactggaagcaagccctctgtgtggcagcccagcttaactttaccaaagaccagctggtgggcctcggcagaactctggcaggaaagctggttgagcagaggaagcacattgatgcggccatggttttggaagagtgtgcccaggattatgaagaagctgtgctcttgctgttagaaggagctgcctgggaagaagctttgaggctggtatacaaatataacagactggatattatagaaaccaacgtaaagccttccattttagaagcccagaaaaattatatggcatttctggactctcagacagccacattcagtcgccacaagaaacgtttattggtagttcgagagctcaaggagcaagcccagcaggcaggtctggatgatgaggtaccccacgggcaagagtcagacctcttctctgaaactagcagtgtcgtgagtggcagtgagatgagtggcaaatactcccatagtaactccaggatatcagcgagatcatccaagaatcgccgaaaagcggagcggaagaagcacagcctcaaagaaggcagtccgctggaggacctggccctcctggaggcactgagtgaagtggtgcagaacactgaaaacctgaaagtttgatgaacaaggaagggaattacagaaggcctttgaagatacgctgcagttgatggaaaggtcacttccagaaatttggactcttacttaccagcagaattcagctaccccggttctaggtcccaattctactgcaaatagtatcatggcatcttatcagcaacagaagacttcggttcctgttcttgatgctgagctttttataccaccaaagatcaacagaagaacccagtggaagctgagcctgctagactgagtgactgcagttaggagggatccgacagagaagaccatttccactcattcctgttgtcctaccaccccttgctctttgagggctggctattgagaactggaaagagtaaaatgataacttaccttagcattgccaagaacttcagcagacaacaagcaattctatttattttatgttgtgtatacatcttgatcattagcaagacattaagctttaaccattatggcaccattttgtgagaatgattgttctttcacttgggctgtttgagagcataattatggtaatcatgagattaatgtttcatgatttctacctccaaagtgtgaagacaagtaaaacaatgtttctaaattgtcttattttgttggcggagaagattacaatggctattagtgctacatttggtcaaatgtaatcacttaaatagcttcttgtcaccttaaactaaagcagaataaaaagtatcctttgaaattataagccctcctttgctgacagctattattttgtaacatcttaccaggtcatgtgctttcagttataactgggctgagcctcctataattacaatgtctatagggactgttttactgcctgtgtattttctgctagagagttagcaatgttagagctagaacagattagaatttctaaacagtatcatgcacagttggtgtgagtgatcagtgtgcattgtatggcatgcatggttgtgaattattctctgttctccaaatactgtttctttaactcagatatttttgttagtgtctaggccacttcatttatttttcgtcatggtactttactgacttctctttattcaattctccacgccctcaccaaaaaaaactgtctcaaaatgagaatattttattttcatggtgagtctagaaaacgcccacttcattctgattaaaaattcttccatgttttaaatatcagaaccagacctttcttactgtgtatcttagcccatttgtgtctctataacaacaaccagctttcaaaggaactaatagagtgaaaactcactcattaccacgaggatggcacaagcgattcacgtaggatctgcccctgtgaccaaaacacctcccattgggccccacttccaacactggtgatcacatttcaacatgaggtttagggaaacaaatgcctaaactacagcactgtacataaactaacaggaaatgctgcttttgatcctcaaagaagtgatatagccaaaattgtaatttaagaagcctttgtcagtatagcaagatgttaactatagaatcaatctaggagtattcactgtaaaattcaacttttctgtatgtttgaacattttcacaatctcataggagtttttaaaaagaagagaaagaagatatactttgctttggagaaatctactttttgacttacatgggtttgctgtaattaagtgcccaatattgaaaggctgcaagtactttgtaatcactctttggcatgggtaaataagcatggtaacttatattgaaatatagtgctcttgctttggataactgtaaagggacccatgctgatagactggaaatagaagtaaatgtgtttattgataaaaaaaa

SEQ ID NO: 351574 - DNA, 5059 bp, Homo sapiens
cgtgcgcacgcgcgctgctctcaggtccgcaggttccacccccccccccgccccccccaattacagtgctttggggttcgacatcaaaacagagatcaaatacaaaagtttgggcagatgggcaagagggcagagggacaggggacgcggccaatgtagctcctctacctctacggtgccaggcctacaaagaaggccggccgccgtaagtgaccagaagcgggcccggcctcgccccctccgcctggtgacgtcactcccgcgccgcactcccagtgctgcggctgcctagttgacgcacccattgagtcgctggcttctttgcagcgcttcagcgttttcccctggagggcgcctccatccttggaggcctagtgccgtcggagagagagcgggagccgcggacagagacgcgtgcgcaattcggagccgactctgggtgcggactgtgggagctgactctgggtagccggctgcgcgtggctggggaggcgaggccggacgcacctctgtttgggggtcctcagagattaatgattcatcaagggatagttgtacttgtctcgtgggaatcacttcatcatgcgaaatctgaaattatttcggaccctggagttcagggatattcaaggtccagggaatcctcagtgcttctctctccgaactgaacaggggacggtgctcattggttcagaacatggcctgatagaagtagaccctgtctcaagagaagtgaaaaatgaagtttctttggtggcagaaggctttctcccagaggatggaagtggccgcattgttggtgttcaggacttgctggatcaggagtctgtgtgtgtggccacagcctctggagacgtcatactctgcagtctcagcacacaacagctggagtgtgttgggagtgtagccagtggtatctctgttatgagttggagtcctgaccaagagctggtgcttcttgccacaggtcaacagaccctgattatgatgacaaaagattttgagccaatcctggagcagcagatccatcaggatgattttggtgaaagcaagtttatcactgttggatggggtaggaaggagacacagttccatggatcagaaggcagacaagcagcttttcagatgcaaatgcatgagtctgctttgccctgggatgaccatagaccacaagttacctggcggggggatggacagttttttgctgtgagtgttgtttgcccagaaacaggggctcggaaggtcagagtgtggaaccgagagtttgctttgcagtcaaccagtgagcctgtggcaggactgggaccagccctggcttggaaaccctcaggcagtttgattgcatctacacaagataaacccaaccagcaggatattgtgttttttgagaaaaatggactccttcatggacactttacacttcccttccttaaagatgaggttaaggtaaatgacttgctctggaatgcagattcctctgtgcttgcagtctggctggaagaccttcagagagaagaaagctccattccgaaaacctgtgttcagctctggactgttggaaactatcactggtatctcaagcaaagtttatccttcagcacctgtgggaagagcaagattgtgtctctgatgtgggaccctgtgaccccataccggctgcatgttctctgtcagggctggcattacctcgcctatgattggcactggacgactgaccggagcgtgggagataattcaagtgacttgtccaatgtggctgtcattgatggaaacagggtgttggtgacagtcttccggcagactgtggttccgcctcccatgtgcacctaccaactgctgttcccacaccctgtgaatcaagtcacattcttagcacaccctcaaaagagtaatgaccttgctgttctagatgccagtaaccagatttctgtttataaatgtggtgattgtccaagtgctgaccctacagtgaaactgggagctgtgggtggaagtggatttaaagtttgccttagaactcctcatttggaaaagagatacaaaatccagtttgagaataatgaagatcaagatgtaaacccgctgaaactaggccttctcacttggattgaagaagacgtcttcctggctgtaagccacagtgagttcagcccccggtctgtcattcaccatttgactgcagcttcttctgagatggatgaagagcatggacagctcaatgtcagttcatctgcagcggtggatggggtcataatcagtctatgttgcaattccaagaccaagtcagtagtattacagctggctgatggccagatatttaagtacctttgggagtcaccttctctggctattaaaccatggaagaactctggtggatttcctgttcggtttccttatccatgcacccagaccgaattggccatgattggagaagaggaatgtgtccttggtctgactgacaggtgtcgctttttcatcaatgacattgaggttgcgtcaaatatcacgtcatttgcagtatatgatgagtttttattgttgacaacccattcccatacctgccagtgtttttgcctgagggatgcttcatttaaaacattacaggccggcctgagcagcaatcatgtgtcccatggggaagttctgcggaaagtggagaggggttcacggattgtcactgttgtgccccaggacacaaagcttgtattacagatgccaaggggaaacttagaagttgttcatcatcgagccctggttttagctcagattcggaagtggttggacaaacttatgtttaaagaggcatttgaatgcatgagaaagctgagaatcaatctcaatctgatttatgatcataaccctaaggtgtttcttggaaatgtggaaaccttcattaaacagatagattctgtgaatcatattaacttgttttttacagaattgaaagaagaagatgtcacgaagaccatgtaccctgcaccagttaccagcagtgtctacctgtccagggatcctgacgggaataaaatagaccttgtctgcgatgctatgagagcagtcatggagagcataaatcctcataaatactgcctatccatacttacatctcatgtaaagaagacaaccccagaactggaaattgtactgcaaaaagtacacgagcttcaaggaaatgctccctctgatcctgatgctgtgagtgctgaagaggccttgaaatatttgctgcatctggtagatgttaatgaattatatgatcattctcttggcacctatgactttgatttggtcctcatggtagctgagaagtcacagaaggatcccaaagaatatcttccatttcttaatacacttaagaaaatggaaactaattatcagcggtttactatagacaaatacttgaaacgatatgaaaaagccattggccacctcagcaaatgtggacctgagtacttcccagaatgcttaaacttgataaaagataaaaacttgtataacgaagctctgaagttatattcaccaagctcacaacagtaccaggatatcagcattgcttatggggagcacctgatgcaggagcacatgtatgagccagcggggctcatgtttgcccgttgcggtgcccacgagaaagctctctcagcctttctgacatgtggcaactggaagcaagccctctgtgtggcagcccagcttaactttaccaaagaccagctggtgggcctcggcagaactctggcaggaaagctggttgagcagaggaagcacattgatgcggccatggttttggaagagtgtgcccaggattatgaagaagctgtgctcttgctgttagaaggagctgcctgggaagaagctttgaggctggtatacaaatataacagactggatattatagaaaccaacgtaaagccttccattttagaagcccagaaaaattatatggcatttctggactctcagacagccacattcagtcgccacaagaaacgtttattggtagttcgagagctcaaggagcaagcccagcaggcaggtctggatgatgaggtaccccacgggcaagagtcagacctcttctctgaaactagcagtgtcgtgagtggcagtgagatgagtggcaaatactcccatagtaactccaggatatcagcgagatcatccaagaatcgccgaaaagcggagcggaagaagcacagcctcaaagaaggcagtccgctggaggacctggccctcctggaggcactgagtgaagtggtgcagaacactgaaaacctgaaagatgaagtataccatattttaaaggtactctttctctttgagtttgatgaacaaggaagggaattacagaaggcctttgaagatacgctgcagttgatggaaaggtcacttccagaaatttggactcttacttaccagcagaattcagctaccccggttctaggtcccaattctactgcaaatagtatcatggcatcttatcagcaacagaagacttcggttcctgttcttgatgctgagctttttataccaccaaagatcaacagaagaacccagtggaagctgagcctgctagactgagtgactgcagttaggagggatccgacagagaagaccatttccactcattcctgttgtcctaccaccccttgctctttgagggctggctattgagaactggaaagagtaaaatgataacttaccttagcattgccaagaacttcagcagacaacaagcaattctatttattttatgttgtgtatacatcttgatcattagcaagacattaagctttaaccattatggcaccattttgtgagaatgattgttctttcacttgggctgtttgagagcataattatggtaatcatgagattaatgtttcatgatttctacctccaaagtgtgaagacaagtaaaacaatgtttctaaattgtcttattttgttggcggagaagattacaatggctattagtgctacatttggtcaaatgtaatcacttaaatagcttcttgtcaccttaaactaaagcagaataaaaagtatcctttgaaat

SEQ ID NO: 351575 - DNA, 376 bp, Homo sapiens
ttgtaaagtgagtattttaaagtatttcaataaaatttaaggggataagtattccagcattcaacacagccttattaggaaaacaaagtcagtctgctatcttctgtgtagaacacatgaaatgaagattcttcacaatctcaacttagctttttccagttacgtaacacttaaaaaataactttgggtgagtttagatatttttaaaaatctggagttattcataagaatcaaggaatttaaaaattagtgatcaaatgtggctactttagccatacataggccaagtctatccttgtttaataacttcaagatgagcctttaatttcacattcattaataagtagaatcttgtccaacatccttatcactaaat

SEQ ID NO: 351576 - DNA, 3089 bp, Homo sapiens
  misc_feature (1277)..(1277): n is a, c, g, or t
  misc_feature (2941)..(2941): n is a, c, g, or t
atcctgtccacgtgaagttgtcgctgccttagagagggggaaagagctgcgggaaaagccggggagtgacgactgcggcggctgggcgcgctctctcattttcttttcttctcctttcccccctgtcgcagtccggagttttggctcctcttcctttcctcctccccctcggagccggcttctccctccgccccgcttctcccccgcttgtgtacgctatttgttgtggggtggccgaaggggatgtcctgttttcaccagaggcacagcgcgaaggggaaacttcgacactggaaggaacgagaataaatacttaattacggacgcactgaaccgcggctgggacagacacttcgggaacccgaggcggaccgggcgacgagatagtcatttttacttgaaggaagctgcttctacttgggagtggcaggagaagtgagaaaaccacatggaagactcccaggatttaaatgaacaatcagtaaagaaaacgtgcacagaatcagatgtttcacaatctcagaattccaggtctatggaaatgcaggacctagcaagtcctcatactcttgttggaggtggtgatactccaggtagctccaaactggaaaaatctaatctcagcagcacatcagttactacaaatgggacaggaggggaaaacatgactgttttaaacatagcagactggttgctgagttgcaacaccccctcttctgcaacaatgtctcttcttgcagtcaaaacagagcccttgaacagcagtgaaaccacagccacgactggagatggagcgcttgacacttttactgggtcagtaattacaagtagtggctacagccccagatcagcacatcagtattccccacagctgtatccttccaagccctatccacacattctttctacaccagcagctcaaacaatgtctgcctatgcaggccagactcagtattcggggatgcagcagccagccgtctacacagcctactcacagacaggacagccctacagcttgcccacttacgatttgggtgtgatgttgccagccatcaagacagagagtggactttcccaaactcagtccccattacagagtggctgcctcagttacagcccagggttctctaccccacagccaggccagacaccttattcttaccaaatgccaggttctagttttgcaccatcatctactatttatgcaaataattcagtttccaattcaacgaatttcagtggttcacaacaggattatccatcctatacagcctttngccaaaaccagtatgcacagtattattcagcatcaacgtatggagcgtatatgacatcgaataacacagccgatggcacaccctcttcaacctctacttatcagttgcaggaatctctcccaggactgactaaccaaccaggagagttcgataccatgcagagtccctccacacccatcaaagatcttgatgagagaacctgtaggagttctgggtcaaagtccagaggaagaggccggaaaaataatccctccccgcctcctgatagtgacctggagcgtgtgtttgtctgggatttggatgaaaccatcattgtttttcactcactgctcaccgggtcttatgcacagaagtatggcaaggatccccccatggctgtaacccttggactccgcatggaagaaatgatttttaatcttgctgatactcatttgttttttaatgatttagaggagtgtgatcaagttcatatagatgatgtttcctctgatgataatgggcaggacttaagtacctacagttttgcaactgatggcttccatgcagctgcaagtagtgcaaacctttgtttgccaacaggtgtaagaggaggggttgactggatgaggaagttggcttttcgttacagaagagtaaaagaattatataacacctacaagaacaacgttggaggactccttggccctgccaagagggatgcctggctacagttaagggcagagattgaaggtctgacagattcctggctaacaaatgcacttaagtctttatcaattattagcactaggagtaactgcataaatgtcttggtaacgacaactcaactgatcccagcacttgcgaaggttctactctatagtttaggaggtgctttccccattgagaatatttacagtgcaactaaaataggaaaagaaagttgctttgaacgaataatgcaaaggtttggcagaaaagtagtgtatgttgtaattggggatggtgtagaagaagaacaggcagcaaaaaagcacaacatgcccttctggaggatatccagtcactcagacctcctggctctccaccaagcactggaattagagtatttgtaactgtgttctttagccggagatctattttttatatttcaagtacactgaatttttatgtgtgattcaatgcctctggctctacacatataaattgtcttaatggatgaaatcatatttggaataaaaattccagaatgaagaattcagattgctgaatggagttaaactttagtgctacagaaaagaaactctatggtcttatatttacaacactttaatgggttttttaaaaatctgtggaggttgctggtacacaccaaatgagtccaaactggaatgagcagctttagcaaagaactcttaccctggcaaagcagcaacacacatgctccgtctgacaaggtggtcaacaacattcctcaaaatgggagatcttctcagccctgaggtttgaatctgactttagcctacctaacccagaaaatctgaattggaatgcactcagactgtataaggacagtcctatttagacatgtaatttgtgtaaattattgatgaaaataatttactgtgactttattagcagctgactttcaaagtggatgcaatttttctttcttttgttggggaggngaatgggaggggaaatgggaatataatattgtctcttttttaagtttggcaaacagaatgttcatactgatgtgttgtgccttaaagacaagacagcatttgtgtgttacaatgtaactttggttaaaatctctgtagataatgaaaa

SEQ ID NO: 351577 - DNA, 823 bp, Homo sapiens
atcctgtccacgtgaagttgtcgctgccttagagagggggaaagagctgcgggaaaagccggggagtgacgactgcggcggctgggcgcgctctctcattttcttttcttctcctttcccccctgtcgcagtccggagttttggctcctcttcctttcctcctccccctcggagccggcttctccctccgccccgcttctcccccgcttgtgtacgctatttgttgtggggtggccgaaggggatgtcctgttttcaccagaggcacagcgcgaaggggaaacttcgacactggaaggaacgagaataaatacttaattacggacgcactgaaccgcggctgggacagacacttcgggaacccgaggcggaccgggcgacgaggtaaatgcaagaacactggacattctgtaaaaacaggcccctctttataaggagtttattcaccatagttctgtattgcagctgctgatcatatttcatggagctgttaaagcacttaaaacctaaaattagataaggaagctgagacccagtcatgcagcacagtggagccaggatcctaactccccagtatgaggccagcacccttatccttaagcgtgtgctgggctcttgcttccatcagtcatataccaccatttttaggtggtacctgaacattttgttttaataatacttatattttatgtaaggataactagatattagaaaaatttgttaaattttgtattaaacctgtaacttcatgggcaatattgtttgagacaagaccaaacaaagtattgaagtcaaagaaaaaaaattaagtatctgaagaaacg

SEQ ID NO: 351578 - DNA, 2436 bp, Homo sapiens
  misc_feature (606)..(606): n is a, c, g, or t
  misc_feature (2288)..(2288): n is a, c, g, or t
ggagtttaaatcatttgtctatggtcactagattggcttgtagcagagcctgagctcctgacattcagactgttgctttttcctatattgttaaaattatattgtggataaagaggattacttcctggatattatagggtttcactgaatctaggctgtctaaattaatacacagtctttgttgccacagtaatgctatttttctgatatttaggccctatccacacattctttctacaccagcagctcaaacaatgtctgcctatgcaggccagactcagtattcggggatgcagcagccagccgtctacacagcctactcacagacaggacagccctacagcttgcccacttacgatttgggtgtgatgttgccagccatcaagacagagagtggactttcccaaactcagtccccattacagagtggctgcctcagttacagcccagggttctctaccccacagccaggccagacaccttattcttaccaaatgccaggttctagttttgcaccatcatctactatttatgcaaataattcagtttccaattcaacgaatttcagtggttcacaacaggattatccatcctatacagcctttngccaaaaccagtatgcacagtattattcagcatcaacgtatggagcgtatatgacatcgaataacacagccgatggcacaccctcttcaacctctacttatcagttgcaggaatctctcccaggactgactaaccaaccaggtacagatcttcacccaggagagttcgataccatgcagagtccctccacacccatcaaagatcttgatgagagaacctgtaggagttctgggtcaaagtccagaggaagaggccggaaaaataatccctccccgcctcctgatagtgacctggagcgtgtgtttgtctgggatttggatgaaaccatcattgtttttcactcactgctcaccgggtcttatgcacagaagtatggcaaggatccccccatggctgtaacccttggactccgcatggaagaaatgatttttaatcttgctgatactcatttgttttttaatgatttagaggagtgtgatcaagttcatatagatgatgtttcctctgatgataatgggcaggacttaagtacctacagttttgcaactgatggcttccatgcagctgcaagtagtgcaaacctttgtttgccaacaggtgtaagaggaggggttgactggatgaggaagttggcttttcgttacagaagagtaaaagaattatataacacctacaagaacaacgttggaggactccttggccctgccaagagggatgcctggctacagttaagggcagagattgaaggtctgacagattcctggctaacaaatgcacttaagtctttatcaattattagcactaggagtaactgcataaatgtcttggtaacgacaactcaactgatcccagcacttgcgaaggttctactctatagtttaggaggtgctttccccattgagaatatttacagtgcaactaaaataggaaaagaaagttgctttgaacgaataatgcaaaggtttggcagaaaagtagtgtatgttgtaattggggatggtgtagaagaagaacaggcagcaaaaaagcacaacatgcccttctggaggatatccagtcactcagacctcctggctctccaccaagcactggaattagagtatttgtaactgtgttctttagccggagatctattttttatatttcaagtacactgaatttttatgtgtgattcaatgcctctggctctacacatataaattgtcttaatggatgaaatcatatttggaataaaaattccagaatgaagaattcagattgctgaatggagttaaactttagtgctacagaaaagaaactctatggtcttatatttacaacactttaatgggttttttaaaaatctgtggaggttgctggtacacaccaaatgagtccaaactggaatgagcagctttagcaaagaactcttaccctggcaaagcagcaacacacatgctccgtctgacaaggtggtcaacaacattcctcaaaatgggagatcttctcagccctgaggtttgaatctgactttagcctacctaacccagaaaatctgaattggaatgcactcagactgtataaggacagtcctatttagacatgtaatttgtgtaaattattgatgaaaataatttactgtgactttattagcagctgactttcaaagtggatgcaatttttctttcttttgttggggaggngaatgggaggggaaatgggaatataatattgtctcttttttaagtttggcaaacagaatgttcatactgatgtgttgtgccttaaagacaagacagcatttgtgtgttacaatgtaactttggttaaaatctctgtagataatgaaaa

SEQ ID NO: 351579 - DNA, 469 bp, Homo sapiens
catagcattaagtcactcatggtgagtgtgaatttgctcatgagcatattaattagctagtgtgtgctccattttcctcatctgtgtattaactggagtgctatttcagatatgagcaagaattgtagacctggaagagacacaggtgtaaaatctaaatcaaatttctacttttacaggtgtggtatagacatagggagtttaaatcatttgtctatggtcactagattggcttgtagcagagcctgagctcctgacattcagactgttgctttttcctatattgttaaaattatattgtggataaagaggattacttcctggatattatagggtttcactgaatctaggctgtctaaattaatacacagtctttgttgccacagtaatgctatttttctgatatttaggccctatccacacattctttctacaccagcagctcaaacaatgtctgcctatgcaggcc

SEQ ID NO: 351580 - DNA, 1958 bp, Homo sapiens
  misc_feature (1)..(1): n is a, c, g, or t
  misc_feature (5)..(8): n is a, c, g, or t
  misc_feature (21)..(21): n is a, c, g, or t
  misc_feature (128)..(128): n is a, c, g, or t
  misc_feature (1810)..(1810): n is a, c, g, or t
ngcannnngttttttacctcnaggttctagttttgcaccatcatctactatttatgcaaataattcagtttccaattcaacgaatttcagtggttcacaacaggattatccatcctatacagcctttngccaaaaccagtatgcacagtattattcagcatcaacgtatggagcgtatatgacatcgaataacacagccgatggcacaccctcttcaacctctacttatcagttgcaggaatctctcccaggactgactaaccaaccaggtacagatcttcacccaggagagttcgataccatgcagagtccctccacacccatcaaagatcttgatgagagaacctgtaggagttctgggtcaaagtccagaggaagaggccggaaaaataatccctccccgcctcctgatagtgacctggagcgtgtgtttgtctgggatttggatgaaaccatcattgtttttcactcactgctcaccgggtcttatgcacagaagtatggcaaggatccccccatggctgtaacccttggactccgcatggaagaaatgatttttaatcttgctgatactcatttgttttttaatgatttagaggagtgtgatcaagttcatatagatgatgtttcctctgatgataatgggcaggacttaagtacctacagttttgcaactgatggcttccatgcagctgcaagtagtgcaaacctttgtttgccaacaggtgtaagaggaggggttgactggatgaggaagttggcttttcgttacagaagagtaaaagaattatataacacctacaagaacaacgttggaggactccttggccctgccaagagggatgcctggctacagttaagggcagagattgaaggtctgacagattcctggctaacaaatgcacttaagtctttatcaattattagcactaggagtaactgcataaatgtcttggtaacgacaactcaactgatcccagcacttgcgaaggttctactctatagtttaggaggtgctttccccattgagaatatttacagtgcaactaaaataggaaaagaaagttgctttgaacgaataatgcaaaggtttggcagaaaagtagtgtatgttgtaattggggatggtgtagaagaagaacaggcagcaaaaaagcacaacatgcccttctggaggatatccagtcactcagacctcctggctctccaccaagcactggaattagagtatttgtaactgtgttctttagccggagatctattttttatatttcaagtacactgaatttttatgtgtgattcaatgcctctggctctacacatataaattgtcttaatggatgaaatcatatttggaataaaaattccagaatgaagaattcagattgctgaatggagttaaactttagtgctacagaaaagaaactctatggtcttatatttacaacactttaatgggttttttaaaaatctgtggaggttgctggtacacaccaaatgagtccaaactggaatgagcagctttagcaaagaactcttaccctggcaaagcagcaacacacatgctccgtctgacaaggtggtcaacaacattcctcaaaatgggagatcttctcagccctgaggtttgaatctgactttagcctacctaacccagaaaatctgaattggaatgcactcagactgtataaggacagtcctatttagacatgtaatttgtgtaaattattgatgaaaataatttactgtgactttattagcagctgactttcaaagtggatgcaatttttctttcttttgttggggaggngaatgggaggggaaatgggaatataatattgtctcttttttaagtttggcaaacagaatgttcatactgatgtgttgtgccttaaagacaagacagcatttgtgtgttacaatgtaactttggttaaaatctctgtagataatgaaaa

SEQ ID NO: 351581 - DNA, 2732 bp, Homo sapiens
  misc_feature (902)..(902): n is a, c, g, or t
  misc_feature (2584)..(2584): n is a, c, g, or t
gtaatcttctaaagccagctggcacatttataggatgccaggctagcccatcagatgaagtgtccattgtggcagccacagatccacatcagatgggaagagtgtgatcagtgctgcatgcatgtttaatcaggtaacaatgggagctgtacaggaagaggattattattccaagaagaaaggacctatatcatcttgtggaaggtaaagaaaacgtgcacagaatcagatgtttcacaatctcagaattccaggtctatggaaatgcaggacctagcaagtcctcatactcttgttggaggtggtgatactccaggtagctccaaactggaaaaatctaatctcagcagcacatcagttactacaaatgggacaggagtgtctcttcttgcagtcaaaacagagcccttgaacagcagtgaaaccacagccacgactggagatggagcgcttgacacttttactgggtcagtaattacaagtagtggctacagccccagatcagcacatcagtattccccacagctgtatccttccaacagctcaaacaatgtctgcctatgcaggccagactcagtattcggggatgcagcagccagccgtctacacagcctactcacagacaggacagccctacagcttgcccacttacgatttgggtgtgatgttgccagccatcaagacagagagtggactttcccaaactcagtccccattacagagtggctgcctcagttacagcccagggttctctaccccacagccaggccagacaccttattcttaccaaatgccaggttctagttttgcaccatcatctactatttatgcaaataattcagtttccaattcaacgaatttcagtggttcacaacaggattatccatcctatacagcctttngccaaaaccagtatgcacagtattattcagcatcaacgtatggagcgtatatgacatcgaataacacagccgatggcacaccctcttcaacctctacttatcagttgcaggaatctctcccaggactgactaaccaaccaggtacagatcttcacccaggagagttcgataccatgcagagtccctccacacccatcaaagatcttgatgagagaacctgtaggagttctgggtcaaagtccagaggaagaggccggaaaaataatccctccccgcctcctgatagtgacctggagcgtgtgtttgtctgggatttggatgaaaccatcattgtttttcactcactgctcaccgggtcttatgcacagaagtatggcaaggatccccccatggctgtaacccttggactccgcatggaagaaatgatttttaatcttgctgatactcatttgttttttaatgatttagaggagtgtgatcaagttcatatagatgatgtttcctctgatgataatgggcaggacttaagtacctacagttttgcaactgatggcttccatgcagctgcaagtagtgcaaacctttgtttgccaacaggtgtaagaggaggggttgactggatgaggaagttggcttttcgttacagaagagtaaaagaattatataacacctacaagaacaacgttggaggactccttggccctgccaagagggatgcctggctacagttaagggcagagattgaaggtctgacagattcctggctaacaaatgcacttaagtctttatcaattattagcactaggagtaactgcataaatgtcttggtaacgacaactcaactgatcccagcacttgcgaaggttctactctatagtttaggaggtgctttccccattgagaatatttacagtgcaactaaaataggaaaagaaagttgctttgaacgaataatgcaaaggtttggcagaaaagtagtgtatgttgtaattggggatggtgtagaagaagaacaggcagcaaaaaagcacaacatgcccttctggaggatatccagtcactcagacctcctggctctccaccaagcactggaattagagtatttgtaactgtgttctttagccggagatctattttttatatttcaagtacactgaatttttatgtgtgattcaatgcctctggctctacacatataaattgtcttaatggatgaaatcatatttggaataaaaattccagaatgaagaattcagattgctgaatggagttaaactttagtgctacagaaaagaaactctatggtcttatatttacaacactttaatgggttttttaaaaatctgtggaggttgctggtacacaccaaatgagtccaaactggaatgagcagctttagcaaagaactcttaccctggcaaagcagcaacacacatgctccgtctgacaaggtggtcaacaacattcctcaaaatgggagatcttctcagccctgaggtttgaatctgactttagcctacctaacccagaaaatctgaattggaatgcactcagactgtataaggacagtcctatttagacatgtaatttgtgtaaattattgatgaaaataatttactgtgactttattagcagctgactttcaaagtggatgcaatttttctttcttttgttggggaggngaatgggaggggaaatgggaatataatattgtctcttttttaagtttggcaaacagaatgttcatactgatgtgttgtgccttaaagacaagacagcatttgtgtgttacaatgtaactttggttaaaatctctgtagataatgaaaa

SEQ ID NO: 351582 - DNA, 1050 bp, Homo sapiens
tcaagtctcgtatacaaaatgagaatttgtaatcaactgctgaagcatttatatggtcctatttagaacatcctgggatgctcctactatgtgggatcttttggagaaaaaaatccatacctgagcaagtggagagaagggaccagattcagaggatacccataaaatgatctgcaagggaaaacaagtttctgaccaagcacggttacaaccacatcttcctgggacaaatgaggacatgtatcaattcctcaccaaccttccatacaccccaggcttacctaggaactgccttcagcacaccatgtctaccagagtggcggtatataatcactattcaactccacagccagagagaggtgcagaagccatcacaggaaatgactagatgcccctgagctctctgttgctgctgccgtgcgggtgactgggaatcacatagttaactaaaagcttttactcagcttaatttcctccactctacatgataattgctctgttcattttcgctttacctttaaattcagggcacatgcacaaagacataatggtgtaagagtggaaaagagaagatgtattttctaagctgcctgcagtctgacaattgtttgaatgtgtgtgtacatttaacaagatggtagattacagcattaccttatcttcagggtaaaactgccattcaggatccaaaaatctcctaatggtttattgaaatggttccctcttgcaatgcatcatcacagtagtttatgataaggagaaaagtatgttctgatacaaatcaaataatgccaaatacaaagagttgtaagagaaatagctcacttgggagatagagagaattgaagaaaatgtattgggtgagagacgctaactagacctctggaaagagaagtcagcaatgacccaaatgggatacttgattctcttcagtggtcaaaaaccctcaggagaaggataaataggtatttattatttggtataggacatgatattttgaaatacctatatattatgtaatggttaaattgagctaataaaataaacatg

SEQ ID NO: 351583 - DNA, 1033 bp, Homo sapiens
accttgccccttcctcgtgatactttcttgttcttcctctctttaagggttggggggggggtggatactattctacatcttctagaaagaagactccttccctcatacccatgaatatcaaaggaccaaatacagaggtatcctgtcttctgatcggactgggaaatcactataccaacctatcatgtaatcaaactcatctccttgggagggggggcgacatgtatcaattcctcaccaaccttccatacaccccaggcttacctaggaactgccttcagcacaccatgtctaccagagtggcggtatataatcactattcaactccacagccagagagaggtgcagaagccatcacaggaaatgactagatgcccctgagctctctgttgctgctgccgtgcgggtgactgggaatcacatagttaactaaaagcttttactcagcttaatttcctccactctacatgataattgctctgttcattttcgctttacctttaaattcagggcacatgcacaaagacataatggtgtaagagtggaaaagagaagatgtattttctaagctgcctgcagtctgacaattgtttgaatgtgtgtgtacatttaacaagatggtagattacagcattaccttatcttcagggtaaaactgccattcaggatccaaaaatctcctaatggtttattgaaatggttccctcttgcaatgcatcatcacagtagtttatgataaggagaaaagtatgttctgatacaaatcaaataatgccaaatacaaagagttgtaagagaaatagctcacttgggagatagagagaattgaagaaaatgtattgggtgagagacgctaactagacctctggaaagagaagtcagcaatgacccaaatgggatacttgattctcttcagtggtcaaaaaccctcaggagaaggataaataggtatttattatttggtataggacatgatattttgaaatacctatatattatgtaatggttaaattgagctaataaaataaacatg

SEQ ID NO: 351584 - DNA, 1105 bp, Homo sapiens
aatcatgagttatttgttaaaggtagggggggggaacctagctgcagacgactctcttattctccaccgctacagcagaatttgtaatcaactgctgaagcatttatatggtcctatttagaacatcctgggatgctcctactatgtgggatcttttggagaaaaaaatccatacctgagcaagtggagagaagggaccagattcagaggatacccataaaatgatctgcaagggaaaacaagtttctgaccaagcacggttacaaccacatcttcctgggacaaatgaggacatgtatcaattcctcaccaaccttccatacaccccaggcttacctaggaactgccttcagcacaccatgtctaccagagtggcggtatataatcactattcaactccacagccagagagaggtgcagaagccatcacaggaaatgactagatgcccctgagctctctgttgctgctgccgtgcgggtgactgggaatcacatagttaactaaaagcttttactcagcttaatttcctccactctacatgataattgctctgttcattttcgctttacctttaaattcagggcacatgcacaaagacataatggtgtaagagtggaaaagagaagatgtattttctaagctgcctgcagtctgacaattgtttgaatgtgtgtgtacatttaacaagatggtagattacagcattaccttatcttcagggtaaaactgccattcaggatccaaaaatctcctaatggtttattgaaatggttccctcttgcaatgcatcatcacagtagtttatgataaggagaaaagtatgttctgatacaaatcaaataatgccaaatacaaagagttgtaagagaaatagctcacttgggagatagagagaattgaagaaaatgtattgggtgagagacgctaactagacctctggaaagagaagtcagcaatgacccaaatgggatacttgattctcttcagtggtcaaaaaccctcaggagaaggataaataggtatttattatttggtataggacatgatattttgaaatacctatatattatgtaatggttaaattgagctaataaaataaacatg

SEQ ID NO: 351585 - DNA, 345 bp, Homo sapiens
aacagctctttagtttgcagagggcggttcaggaacaaatatgtatgtgtttattacgtaccaggcactgaaatgggcccttgaacagaacaaatcctttcccctgagcagcaccctgagagcagggctggagctaattatgtgtgtggctgctattgtatgcggagaaaactagatgggcccatagtctagaaaagtaattataaaaactgagtaagtgccatgcccatcatagtaggggcttttataaatattccctttttcagcttggggcctctcaatttccccaggtcctcagaattacacacccccacaagggttcctgggctgcccccaggagttagg

SEQ ID NO: 351586 - DNA, 578 bp, Homo sapiens
gctgagaccacaggggttccctcaaatcatgtcacacatcagtgatccaccccatctatttgaccatgtccctgaatctctcagtgcttctgactccagacagcgcgaggaaaggctgaggcaggaggcctaggtggagaccctgcctgagagatgagtcactcggctctggcaggacaggcttcagggggatcagctcagcttagctggggaacgctttctgctctcgtaagcccctcatccccataccacactcaactcttcccttttgtcaccttcaaaaggtttcagcaaccaaggagcacacaccctgatccttgattggtgaaaggatacacaaaatcaggctgcttcagaggaagtcatctgctcacaggaatcagggtgaaggccaaggacggcactcaagaattgtcctgtctctaaaaaaaaagcatctgcaacgaacttcctttaatttttgagttcagtgtctgtgataattaagaaatggcaataccatgtattttccccagaagttaagaaatattgctgaacgaaccaataaaaataattacagctccctcaaaaaaaaaaaa

SEQ ID NO: 351587 - DNA, 541 bp, Homo sapiens
agagcaggcatgttgccccaaatacctgtgttttccttgtttgcagcagagtgtatgtcacatagtagaagttaaagccaaagaaacgattgaattaatgaatgtctctgtgggttattcttaggagtaatttaaacttatgaagtttaagttttggaaaattttagaacaagaaagctttaggataatatatttgtcttttctaccactgtttactaggaactagataagtatttacaacatcatgccttcttaaatgcaagaagaaaggagatgttatataaaagatgggttgactgtgtggcagatcctcttcagaagaaaattatagaaaaagtttgctcacataagaagattaaaaaaaggaggcaaggggaattagatggctttttaaaacatgtaaataaaaaggtactaagagatcatttgatgcttttttcagttgatttagacctaatgtcatctttgttcatttataatcattcagtcagtctgtccctgtcccctctacatatgtatcatctataccctgtggaaagta

SEQ ID NO: 351588 - DNA, 422 bp, Homo sapiens
attccaagggacgggggattctttcaaagagcatctcgcctgcttataaaggaggctggctctgaagccgtcatctggagtctgtagtgaaggcctcttgttagggaaactggatggttagtgttcaaaatccattttgcgtgtgtgcaaggacacaggtggtattaaacagaagagaaaatcagatgactgtgaaatgttcaatactaaataagatgatttttagtttttccaggggcattgttatttgtgaccacaatgaaaaatgtagacagtgatgatctggtaactggcacacttcccaagctcaagagctcaaaagaatggttggagcccaagcccctttgttttatggaggtatatatcaaatagtgtgggatttggagattttttacttggatcgttgcagtaggaagtggctt

SEQ ID NO: 351589 - DNA, 786 bp, Homo sapiens
aggcgagatgttccggtcggggaggccctgagcagaggaacccgggtggagagggcggggcctgaggagggcggagagctggggcgggtctcagagctgctccaagcttttctgccatttgaagcttcttctgggagccagctgtgaccagaggaatagctccagccatccggttaaaagtttaacaaccggaacagctccagtctgcagctcccagcgtgatcgacgcagaagacaggtgatttctgcatttccgactgaggtaactgattcatctcactgggactggtttgacagtgggtgcagcccacggatggggagctgaagcagggcagggcgtcacctcaccctggaagtgcaaggggtcaggggatttccctttcctagccaagggaagccgtgacagactacctggaaaaatgggacactcctgcccaaatactgcacttttcccaagatcttagccaccggcagacaaggagattctctcccatgcctggctcggcgggttccacacccacggagccttgctcactgctagtgcagcagtctgagatcgaactgtgaggcggcagcctggctgggggaggggcgtccgctgttgctgaggcttgagtaggtaaacaaagcagccgggaagttcgaactgggcagagcccactggcagctcaagtaaggcctactgcctctagactccatctctgtggccagggcatagctgaacaaaaggcagcagacaacttttgcagacttaaaggtccctgtctgacagctctgaagagagca

SEQ ID NO: 351590 - DNA, 865 bp, Homo sapiens
tcttgctgtgtcacccaggctgaagtgcagtggcacaatcttggctcactgcaacctcctcctcctgggttcaagcgattctcctgccttagcctcccaagtagcttgggactacaggggcccaccacctagcctggctaattttttttgtatttttaatagagacgggtttcaccatattggccaggctggtcttgaactcctgaccttgtgatctgcccacctcagactcccaaagtgctgggattacagttaaaagtttaacaaccggaacagctccagtctgcagctcccagcgtgatcgacgcagaagacaggtgatttctgcatttccgactgaggtaactgattcatctcactgggactggtttgacagtgggtgcagcccacggatggggagctgaagcagggcagggcgtcacctcaccctggaagtgcaaggggtcaggggatttccctttcctagccaagggaagccgtgacagactacctggaaaaatgggacactcctgcccaaatactgcacttttcccaagatcttagccaccggcagacaaggagattctctcccatgcctggctcggcgggttccacacccacggagccttgctcactgctagtgcagcagtctgagatcgaactgtgaggcggcagcctggctgggggaggggcgtccgctgttgctgaggcttgagtaggtaaacaaagcagccgggaagttcgaactgggcagagcccactggcagctcaagtaaggcctactgcctctagactccatctctgtggccagggcatagctgaacaaaaggcagcagacaacttttgcagacttaaaggtccctgtctgacagctctgaagagagca

SEQ ID NO: 351591 - DNA, 257 bp, Homo sapiens
cccttgcctcctttttttaatcttcttatgtgagcaaactttttctataattttcttctgaagagggaagattaaaaaaaggaggcaaggggaattagatggctttttaaaacatgtaaataaaaaggtactaagagatcatttgatgcttttttcagttgatttagacctaatgtcatctttgttcatttataatcattcagtcagtctgtccctgtcccctctacatatgtatcatctataccctgtggaaagta

SEQ ID NO: 351592 - DNA, 456 bp, Homo sapiens
caccccgctctgtggtgcccgcaaggacccggcgaccaaggacccgaccgtcaacggacgcggttgcgggtgggtggcggcggcaggattggccgggccacgcgccggtcaccgagaagcagcgactccagccccttccgcaaaccaagacccgccacctagagccgccgcccaatcccctttgggcctgaagccgtcctccgccgccccggcaccgcccgcgcggactcgctgtggaacccgcggcgcagggggcggagtgctcgcgcggcgctgcgtccgggagacggtgggcgccaacattcgcgcgttccgcagacgcgggcgggctcccttccagccgcagtcggacggctccggggtcgtcgggccgggcccgagtgtgtagcaggacggccgcgggcctgctggccttgggagggcagagaggtgcctgtcgcggccggcgacctcccc

SEQ ID NO: 351593 - DNA, 467 bp, Homo sapiens
agagcaggcatgttgccccaaatacctgtgttttccttgtttgcagcagagtgtatgtcacatagtagaagttaaagccaaagaaacgattgaattaatgaatgtctctgtgggttattcttaggagtaatttaaacttatgaagtttaagttttggaaaattttagaacaagaaagctttaggataatatatttgtcttttctaccactgtttactaggaactagataagtatttacaacatcatgccttcttaaatgcaagaagaaaggagatgttatataaaagatgggttgactgtgtggcagatcctcttcagaagaaaattatagaaaaagtttgctcacataagaagattaaaaaaaggaggcaaggggaattagatggcttttcgccacatgtatatcagtcggcgactatagagatcacgacgatcctgttccacagctgacatagacgcaatgtgat

SEQ ID NO: 351594 - DNA, 907 bp, Homo sapiens
aaaacagaagagccaacaccacaccttcctcatcccctcgcgccgaccgcctcgcctttcccctagttaccatcccaccatttcatgaccctttgaaaaaagcacaatatgacaaggataatgaaaaaagaactcttcttcagtgtgagactggcaaaatatattcaataaaggaattcaaagaagttgagaaggttcagctgcattccagattcccacaaatttctaattcaaggcactttataactccaaacgagtggctgaaactgcctacaagatacatagaaagtgaattttgtagaaggagaaggttaaaggtgaaagtgaattttaatgactgtagttttgatttgaaacccttggcaagagctccttatcttttggaatcccaggaagaagaaaaaacagttatttacaaaaacaaagggtcatcctttctagaaagagaaccgctgtgctatcaggagggaaataatccaagtgccaaagaggccatctctgaagggtatttttcttccttgagcctcagccaggaacgggaggaagaccaggatgggtctccctccccgcgtttgggactgctgaagctggagctataagaaagaagagggaggtttcagcaaccaaggagcacacaccctgatccttgattggtgaaaggatacacaaaatcaggctgcttcagaggaagtcatctgctcacaggaatcagggtgaaggccaaggacggcactcaagaattgtcctgtctctaaaaaaaaagcatctgcaacgaacttcctttaatttttgagttcagtgtctgtgataattaagaaatggcaataccatgtattttccccagaagttaagaaatattgctgaacgaaccaataaaaataattacagctccctcaaaaaaaaaaaa

SEQ ID NO: 351595 - DNA, 1249 bp, Homo sapiens
tgaggagggtggcgagaggtggggtggggcccaggtgagtagcgggcgaaggcggggcctgaggaggactgagctggggcgggacccagagctgctccaagcttttctgccatttgaagcttcttctgggagccagctgtgaccagaggaatagctccagccatccggttaaaagtttaacaaccggaacagctccagtctgcagctcccagcgtgatcgacgcagaagacaggtgatttctgcatttccgactgaggttttagctaaagaagatactgaggcagctattcaatcaatattatacaaagaaaattctgtaattaagggaaatgcatttatagaacattatgatccaaaagagtatgatcccttttatatgagcaagaaggaccccaattttctgaaggttaccatcccaccatttcatgaccctttgaaaaaagcacaatatgacaaggataatgaaaaaagaactcttcttcagtgtgagactggcaaaatatattcaataaaggaattcaaagaagttgagaaggttcagctgcattccagattcccacaaatttctaattcaaggcactttataactccaaacgagtggctgaaactgcctacaagatacatagaaagtgaattttgtagaaggagaaggttaaaggtgaaagtgaattttaatgactgtagttttgatttgaaacccttggcaagagctccttatcttttggaatcccaggaagaagaaaaaacagttatttacaaaaacaaagggtcatcctttctagaaagagaaccgctgtgctatcaggagggaaataatccaagtgccaaagaggccatctctgaagggtatttttcttccttgagcctcagccaggaacgggaggaagaccaggatgggtctccctccccgcgtttgggactgctgaagctggagctataagaaagaagagggaggtttcagcaaccaaggagcacacaccctgatccttgattggtgaaaggatacacaaaatcaggctgcttcagaggaagtcatctgctcacaggaatcagggtgaaggccaaggacggcactcaagaattgtcctgtctctaaaaaaaaagcatctgcaacgaacttcctttaatttttgagttcagtgtctgtgataattaagaaatggcaataccatgtattttccccagaagttaagaaatattgctgaacgaaccaataaaaataattacagctccctcaaaaaaaaaaaa

SEQ ID NO: 351596 - DNA, 1744 bp, Homo sapiens
caccccgctctgtggtgcccgcaaggacccggcgaccaaggacccgaccgtcaacggacgcggttgcgggtgggtggcggcggcaggattggccgggccacgcgccggtcaccgagaagcagcgactccagccccttccgcaaaccaagacccgccacctagagccgccgcccaatcccctttgggcctgaagccgtcctccgccgccccggcaccgcccgcgcggactcgctgtggaacccgcggcgcagggggcggagtgctcgcgcggcgctgcgtccgggagacggtgggcgccaacattcgcgcgttccgcagacgcgggcgggctcccttccagccgcagtcggacggctccggggtcgtcgggccgggcccgagtgtgtagcaggacggccgcgggcctgctggccttgggagggcagagagtttttccaggggcattgttatttgtgaccacaatgaaaaatgtagacagtgatgatctggtaactggcacacttcccaagctcaagagctcaaaagaatggttggagcccaagcccctttgttttatggaggttttagctaaagaagatactgaggcagctattcaatcaatattatacaaagaaaattctgtaattaaggaactagataagtatttacaacatcatgccttcttaaatgcaagaagaaaggagatgttatataaaagatgggttgactgtgtggcagatcctcttcagaagaaaattatagaaaaagtttgctcacataagaagattaaaaaaaggaggcaaggggaattagatggctttttaaaacatgtaaataaaaagggaaatgcatttatagaacattatgatccaaaagagtatgatcccttttatatgagcaagaaggaccccaattttctgaaggttaccatcccaccatttcatgaccctttgaaaaaagcacaatatgacaaggataatgaaaaaagaactcttcttcagtgtgagactggcaaaatatattcaataaaggaattcaaagaagttgagaaggttcagctgcattccagattcccacaaatttctaattcaaggcactttataactccaaacgagtggctgaaactgcctacaagatacatagaaagtgaattttgtagaaggagaaggttaaaggtgaaagtgaattttaatgactgtagttttgatttgaaacccttggcaagagctccttatcttttggaatcccaggaagaagaaaaaacagttatttacaaaaacaaagggtcatcctttctagaaagagaaccgctgtgctatcaggagggaaataatccaagtgccaaagaggccatctctgaagggtatttttcttccttgagcctcagccaggaacgggaggaagaccaggatgggtctccctccccgcgtttgggactgctgaagctggagctataagaaagaagagggaggtttcagcaaccaaggagcacacaccctgatccttgattggtgaaaggatacacaaaatcaggctgcttcagaggaagtcatctgctcacaggaatcagggtgaaggccaaggacggcactcaagaattgtcctgtctctaaaaaaaaagcatctgcaacgaacttcctttaatttttgagttcagtgtctgtgataattaagaaatggcaataccatgtattttccccagaagttaagaaatattgctgaacgaaccaataaaaataattacagctccctcaaaaaaaaaaaa

SEQ ID NO: 351597 - DNA, 1599 bp, Homo sapiens
  misc_feature (355)..(355): n is a, c, g, or t
  misc_feature (370)..(370): n is a, c, g, or t
caccccgctctgtggtgcccgcaaggacccggcgaccaaggacccgaccgtcaacggacgcggttgcgggtgggtggcggcggcaggattggccgggccacgcgccggtcaccgagaagcagcgactccagccccttccgcaaaccaagacccgccacctagagccgccgcccaatcccctttgggcctgaagccgtcctccgccgccccggcaccgcccgcgcggactcgctgtggaacccgcggcgcagggggcggagtgctcgcgcgggcagcatgccggtcccccgggaagaacgggtgggggccggccccccaaacccaattttcgccgggcggttttcccccggcaaangaaaccggccggggnccggggctcccttccagccgcagtcggacggctccggggtcgtcgggccgggcccgagtgtgtagcaggacggccgcgggcctgctggccttgggagggcagagagtttttccaggggcattgttatttgtgaccacaatgaaaaatgtagacagtgatgatctggtaactggcacacttcccaagctcaagagctcaaaagaatggttggagcccaagcccctttgttttatggaggttttagctaaagaagatactgaggcagctattcaatcaatattatacaaagaaaattctgtaattaagggaaatgcatttatagaacattatgatccaaaagagtatgatcccttttatatgagcaagaaggaccccaattttctgaaggttaccatcccaccatttcatgaccctttgaaaaaagcacaatatgacaaggataatgaaaaaagaactcttcttcagtgtgagactggcaaaatatattcaataaaggaattcaaagaagttgagaaggttcagctgcattccagattcccacaaatttctaattcaaggcactttataactccaaacgagtggctgaaactgcctacaagatacatagaaagtgaattttgtagaaggagaaggttaaaggtgaaagtgaattttaatgactgtagttttgatttgaaacccttggcaagagctccttatcttttggaatcccaggaagaagaaaaaacagttatttacaaaaacaaagggtcatcctttctagaaagagaaccgctgtgctatcaggagggaaataatccaagtgccaaagaggccatctctgaagggtatttttcttccttgagcctcagccaggaacgggaggaagaccaggatgggtctccctccccgcgtttgggactgctgaagctggagctataagaaagaagagggaggtttcagcaaccaaggagcacacaccctgatccttgattggtgaaaggatacacaaaatcaggctgcttcagaggaagtcatctgctcacaggaatcagggtgaaggccaaggacggcactcaagaattgtcctgtctctaaaaaaaaagcatctgcaacgaacttcctttaatttttgagttcagtgtctgtgataattaagaaatggcaataccatgtattttccccagaagttaagaaatattgctgaacgaaccaataaaaataattacagctccctcaaaaaaaaaaaa

SEQ ID NO: 351598 - DNA, 1133 bp, Homo sapiens
cgatgatatgatttggaggaaacaaactgcatgcatagagaactttccagggatatgtctgtcatgctaaatataatgattccagatagcactaatagtttttaaagattttcttttcaaagtttaattctgtcctttcaggttttagctaaagaagatactgaggcagctattcaatcaatattatacaaagaaaattctgtaattaagggaaatgcatttatagaacattatgatccaaaagagtatgatcccttttatatgagcaagaaggaccccaattttctgaaggttaccatcccaccatttcatgaccctttgaaaaaagcacaatatgacaaggataatgaaaaaagaactcttcttcagtgtgagactggcaaaatatattcaataaaggaattcaaagaagttgagaaggttcagctgcattccagattcccacaaatttctaattcaaggcactttataactccaaacgagtggctgaaactgcctacaagatacatagaaagtgaattttgtagaaggagaaggttaaaggtgaaagtgaattttaatgactgtagttttgatttgaaacccttggcaagagctccttatcttttggaatcccaggaagaagaaaaaacagttatttacaaaaacaaagggtcatcctttctagaaagagaaccgctgtgctatcaggagggaaataatccaagtgccaaagaggccatctctgaagggtatttttcttccttgagcctcagccaggaacgggaggaagaccaggatgggtctccctccccgcgtttgggactgctgaagctggagctataagaaagaagagggaggtttcagcaaccaaggagcacacaccctgatccttgattggtgaaaggatacacaaaatcaggctgcttcagaggaagtcatctgctcacaggaatcagggtgaaggccaaggacggcactcaagaattgtcctgtctctaaaaaaaaagcatctgcaacgaacttcctttaatttttgagttcagtgtctgtgataattaagaaatggcaataccatgtattttccccagaagttaagaaatattgctgaacgaaccaataaaaataattacagctccctcaaaaaaaaaaaa

SEQ ID NO: 351599 - DNA, 915 bp, Homo sapiens
attccaagggacgggggattctttcaaagagcatctcgcctgcttataaaggaggctggctctgaagccgtcatctggagtctgtagtgaaggcctcttgttagggaaactggatggttagtgttcaaaatccattttgcgtgtgtgcaaggacacaggtggtattaaacagaagagaaaatcagatgactgtgaaatgttcaatactaaataagatgatttttagtttttccaggggcattgttatttgtgaccacaatgaaaaatgtagacagtgatgatctggtaactggcacacttcccaagctcaagagctcaaaagaatggttggagcccaagcccctttgttttatggaggttttagctaaagaagatactgaggcagctattcaatcaatattatacaaagaaaattctgtaattaagaaacaaagggtcatcctttctagaaagagaaccgctgtgctatcaggagggaaataatccaagtgccaaagaggccatctctgaagggtatttttcttccttgagcctcagccaggaacgggaggaagaccaggatgggtctccctccccgcgtttgggactgctgaagctggagctataagaaagaagagggaggtttcagcaaccaaggagcacacaccctgatccttgattggtgaaaggatacacaaaatcaggctgcttcagaggaagtcatctgctcacaggaatcagggtgaaggccaaggacggcactcaagaattgtcctgtctctaaaaaaaaagcatctgcaacgaacttcctttaatttttgagttcagtgtctgtgataattaagaaatggcaataccatgtattttccccagaagttaagaaatattgctgaacgaaccaataaaaataattacagctccctcaaaaaaaaaaaa

SEQ ID NO: 351600 - DNA, 1493 bp, Homo sapiens
caccccgctctgtggtgcccgcaaggacccggcgaccaaggacccgaccgtcaacggacgcggttgcgggtgggtggcggcggcaggattggccgggccacgcgccggtcaccgagaagcagcgactccagccccttccgcaaaccaagacccgccacctagagccgccgcccaatcccctttgggcctgaagccgtcctccgccgccccggcaccgcccgcgcggactcgctgtggaacccgcggcgcagggggcggagtgctcgcgcggcgctgcgtccgggagacggttttagctaaagaagatactgaggcagctattcaatcaatattatacaaagaaaattctgtaattaaggaactagataagtatttacaacatcatgccttcttaaatgcaagaagaaaggagatgttatataaaagatgggttgactgtgtggcagatcctcttcagaagaaaattatagaaaaagtttgctcacataagaagattaaaaaaaggaggcaaggggaattagatggctttttaaaacatgtaaataaaaagggaaatgcatttatagaacattatgatccaaaagagtatgatcccttttatatgagcaagaaggaccccaattttctgaaggttaccatcccaccatttcatgaccctttgaaaaaagcacaatatgacaaggataatgaaaaaagaactcttcttcagtgtgagactggcaaaatatattcaataaaggaattcaaagaagttgagaaggttcagctgcattccagattcccacaaatttctaattcaaggcactttataactccaaacgagtggctgaaactgcctacaagatacatagaaagtgaattttgtagaaggagaagaaacaaagggtcatcctttctagaaagagaaccgctgtgctatcaggagggaaataatccaagtgccaaagaggccatctctgaagggtatttttcttccttgagcctcagccaggaacgggaggaagaccaggatgggtcctctctgtgcagatgtgatcatccctccaactcctagtaccagcccctgtctgctctgaggctctgctgtcagtcccctacgtgatctccaaggatcctcaggtcccagatgggagccctccacggtctccctccccgcgtttgggactgctgaagctggagctataagaaagaagagggaggtttcagcaaccaaggagcacacaccctgatccttgattggtgaaaggatacacaaaatcaggctgcttcagaggaagtcatctgctcacaggaatcagggtgaaggccaaggacggcactcaagaattgtcctgtctctaaaaaaaaagcatctgcaacgaacttcctttaatttttgagttcagtgtctgtgataattaagaaatggcaataccatgtattttccccagaagttaagaaatattgctgaacgaaccaataaaaataattacagctccctcaaaaaaaaaaaa

SEQ ID NO: 351601 - DNA, 832 bp, Homo sapiens
  misc_feature (45)..(45): n is a, c, g, or t
ggagtgagcgaattaatagaatgtgaacaagttgggcacaatggngagcggcctccaggcaaaatatattcaataaaggaattcaaagaagttgagaaggttcagctgcattccagattcccacaaatttctaattcaaggcactttataactccaaacgagtggctgaaactgcctacaagatacatagaaagtgaattttgtagaaggagaagaaacaaagggtcatcctttctagaaagagaaccgctgtgctatcaggagggaaataatccaagtgccaaagaggccatctctgaagggtatttttcttccttgagcctcagccaggaacgggaggaagaccaggatgggtcctctctgtgcagatgtgatcatccctccaactcctagtaccagcccctgtctgctctgaggctctgctgtcagtcccctacgtgatctccaaggatcctcaggtcccagatgggagccctccacggtctccctccccgcgtttgggactgctgaagctggagctataagaaagaagagggaggtttcagcaaccaaggagcacacaccctgatccttgattggtgaaaggatacacaaaatcaggctgcttcagaggaagtcatctgctcacaggaatcagggtgaaggccaaggacggcactcaagaattgtcctgtctctaaaaaaaaagcatctgcaacgaacttcctttaatttttgagttcagtgtctgtgataattaagaaatggcaataccatgtattttccccagaagttaagaaatattgctgaacgaaccaataaaaataattacagctccctcaaaaaaaaaaaa

SEQ ID NO: 351602 - DNA, 1473 bp, Homo sapiens
caccccgctctgtggtgcccgcaaggacccggcgaccaaggacccgaccgtcaacggacgcggttgcgggtgggtggcggcggcaggattggccgggccacgcgccggtcaccgagaagcagcgactccagccccttccgcaaaccaagacccgccacctagagccgccgcccaatcccctttgggcctgaagccgtcctccgccgccccggcaccgcccgcgcggactcgctgtggaacccgcggcgcagggggcggagtgctcgcgcggcgctgcgtccgggagacggttttagctaaagaagatactgaggcagctattcaatcaatattatacaaagaaaattctgtaattaaggaactagataagtatttacaacatcatgccttcttaaatgcaagaagaaaggagatgttatataaaagatgggttgactgtgtggcagatcctcttcagaagaaaattatagaaaaagtttgctcacataagaagattaaaaaaaggaggcaaggggaattagatggctttttaaaacatgtaaataaaaagggaaatgcatttatagaacattatgatccaaaagagtatgatcccttttatatgagcaagaaggaccccaattttctgaaggttaccatcccaccatttcatgaccctttgaaaaaagcacaatatgacaaggataatgaaaaaagaactcttcttcagtgtgagactggcaaaatatattcaataaaggaattcaaagaagttgagaaggttcagctgcattccagattcccacaaatttctaattcaaggcactttataactccaaacgagtggctgaaactgcctacaagatacatagaaagtgaattttgtagaaggagaaggttaaaggtgaaagtgaattttaatgactgtagttttgatttgaaacccttggcaagagctccttatcttttggaatcccaggaagaagaaaaaacagttatttacaaaaacaaagggtcatcctttctagaaagagaaccgctgtgctatcaggagggaaataatccaagtgccaaagaggccatctctgaagggtatttttcttccttgagcctcagccaggaacgggaggaagaccaggatgggtctccctccccgcgtttgggactgctgaagctggagctataagaaagaagagggaggtttcagcaaccaaggagcacacaccctgatccttgattggtgaaaggatacacaaaatcaggctgcttcagaggaagtcatctgctcacaggaatcagggtgaaggccaaggacggcactcaagaattgtcctgtctctaaaaaaaaagcatctgcaacgaacttcctttaatttttgagttcagtgtctgtgataattaagaaatggcaataccatgtattttccccagaagttaagaaatattgctgaacgaaccaataaaaataattacagctccctcaaaaaaaaaaaa

SEQ ID NO: 351603 - DNA, 1416 bp, Homo sapiens
caccccgctctgtggtgcccgcaaggacccggcgaccaaggacccgaccgtcaacggacgcggttgcgggtgggtggcggcggcaggattggccgggccacgcgccggtcaccgagaagcagcgactccagccccttccgcaaaccaagacccgccacctagagccgccgcccaatcccctttgggcctgaagccgtcctccgccgccccggcaccgcccgcgcggactcgctgtggaacccgcggcgcagggggcggagtgctcgcgcggcgctgcgtccgggagacggttttagctaaagaagatactgaggcagctattcaatcaatattatacaaagaaaattctgtaattaaggaactagataagtatttacaacatcatgccttcttaaatgcaagaagaaaggagatgttatataaaagatgggttgactgtgtggcagatcctcttcagaagaaaattatagaaaaagtttgctcacataagaagattaaaaaaaggaggcaaggggaattagatggctttttaaaacatgtaaataaaaagggaaatgcatttatagaacattatgatccaaaagagtatgatcccttttatatgagcaagaaggaccccaattttctgaaggttaccatcccaccatttcatgaccctttgaaaaaagcacaatatgacaaggataatgaaaaaagaactcttcttcagtgtgagactggcaaaatatattcaataaaggaattcaaagaagttgagaaggttcagctgcattccagattcccacaaatttctaattcaaggcactttataactccaaacgagtggctgaaactgcctacaagatacatagaaagtgaattttgtagaaggagaaggttaaaggtgaaagtgaattttaatgactgtagttttgatttgaaacccttggcaagagctccttatcttttggaatcccaggaagaagaaaaaacagttatttacaaaaacaaagggtcatcctttctagaaagagaaccgctgtgctatcaggagggaaataatccaagtgccaaagaggccatctctgaagggtatttttcttccttgagcctcagccaggaacgggaggaagaccaggatgggtttcagcaaccaaggagcacacaccctgatccttgattggtgaaaggatacacaaaatcaggctgcttcagaggaagtcatctgctcacaggaatcagggtgaaggccaaggacggcactcaagaattgtcctgtctctaaaaaaaaagcatctgcaacgaacttcctttaatttttgagttcagtgtctgtgataattaagaaatggcaataccatgtattttccccagaagttaagaaatattgctgaacgaaccaataaaaataattacagctccctcaaaaaaaaaaaa

SEQ ID NO: 351604 - DNA, 2496 bp, Homo sapiens
cgccgcgaccccacaggcagggagccgcatttaggtttcgggcgggcggacgggggacggcccgagtgaggcgtcctccgaaggctgcgggcccgaagccagaactccttcctctccgaagacctcgggggtggggctcgcgcttccgcagcgggcctagagcgagaggcaggcggcaggtcaagagactgctctcctccccaagctaggggaaccttctgggactccatcaactgacaatgaggggataatggtccctcactgccccatcaggaaaggctcatgggtgattgggacctttgcttgaaacccaacttactggccaggaacctcaagttctgggaccaggcgccttcctccctcccactgtgccagaggaggggagacaaaatccctcaatggctgtctagctccaggcagatcagctgccacggggactgctgagcagggagaggctgtcgatgctgaggcacgagagaatttgctcctgctcctccagagaaaatggctgggacaggctgttgaggaataattctgcagggaaaagtggaagatggctgtgaaagactgggaggaggctggctgtgttttcaggggttcttcctgcacagtcggtagaagctgagctgctggggaaggggctggaagaaagcccacaccgcaggtatcagtagcaaattcaaaaactacagaatcagctccagaggactttgttaacaagaaagagaagattgaaaacagccctggggctacaccaactcaagagctcccaggcaaagtggcatcctggacccaccatctctcctaccccatcctcagtcggtacttccccaggcaccgtttgttctggcatggggctagttcagccctgggaccaccctcatccttataactaccagctgtctttggtgaggtgcaagatctctctggttttctttatttcattttcattcctataatcacagccttttttgtgcccatccctcaggtgacattctattatgtttgatgtgtcattttgatttggttgtgtccttgcaaaatgtgcgttgttttatttatcaatttattttatttttatttttttaaagagatgaggtctcatcatgttgcccaggctggactccaactcctgggctcaagcgatccttccacctcaatcttctgagtggctgggactacagatgtgcgccaccatacctggctattgatcaatttttagtttaccaaacaggcattatgttctgggtcccattctgtgtcgggttctcttttcactcggcaccatggctttaggatccatccatgctgctctgtgaacgccgagttgctttaactgcttggtgctccatgaggcatccccttttgtgtctctgtcctcccagtgagggaccccatcgtaccctactcccctcccacaaaggaagctgtagtgcgcgtcctcaggcgtgtccccatatggatctgctggcattcgtttgtcagtgcacccaggggtagaagtccttggtctcagtctgcagacgtctgcctgagtgcagccaggtgcccccccagagtgggtagccttgtccacatgcccatcagcagcacctgaggggtcccaacagccctacatcccaccaactttctgcttttttccagtcaaatggctcttgagtgttacctggctttatttatttatttattttttgagtcgggtctctgttgcgcaggctggagtgcagtggtgcaatcatggctcactgcagcctcgaccttccaggctcaaacaatcctctcacctcctgagtagctaggactacacgcatgtgccaccatgcctggctaatttttaaatttttttgcagagaaagggtcttgctatgttgcccaggctgatcttgaactcctggcctcaagcgatcctcctgccccagcctcccaaagtgctgggattacaggtgtgagccactgctcccggcctgtctttattttgtattcttggattcctagtgagtttgagccccctctatacatcataacccttatgatactagtaaacatatattttatctttaaccccatttctggcacagaactcctaaaagccttactctccaaaatgatctctttctgtgtactaatggattgactgaaggctggcagcccctaggtagcttcaagatgggggctggtcatcagagagacataggcaggattagagggttgggactttcatcccaccatcccacgtactgggagggaagggggctaaaggttaagctgttcgccaatggccagtgatttattcaatcatgcctacgtaatgaagcctacacaaaaacccaagaagaccgggttcagagaacttctggtagctgggcacatggaggttcctggagggtgccaagccctggaagctctgtgctccctcccacatgccttgccctatgcatctcttcatttgtatcctttgtaatatcctttctaataaactggtaaatgtaaaaaaaa

SEQ ID NO: 351605 - DNA, 2227 bp, Homo sapiens
cgccgcgaccccacaggcagggagccgcatttaggtttcgggcgggcggacgggggacggcccgagtgaggcgtcctccgaaggctgcgggcccgaagccagaactccttcctctccgaagacctcgggggtggggctcgcgcttccgcagcgggcctagagcgagaggcaggcggcagggagaggctgtcgatgctgaggcacgagagaatttgctcctgctcctccagagaaaatggctgggacaggctgttgaggaataattctgcagggaaaagtggaagatggctgtgaaagactgggaggaggctggctgtgttttcaggggttcttcctgcacagtcggtagaagctgagctgctggggaaggggctggaagaaagcccacaccgcaggtatcagtagcaaattcaaaaactacagaatcagctccagaggactttgttaacaagaaagagaagattgaaaacagccctggggctacaccaactcaagagctcccaggcaaagtggcatcctggacccaccatctctcctaccccatcctcagtcggtacttccccaggcaccgtttgttctggcatggggctagttcagccctgggaccaccctcatccttataactaccagctgtctttggtgaggtgcaagatctctctggttttctttatttcattttcattcctataatcacagccttttttgtgcccatccctcaggtgacattctattatgtttgatgtgtcattttgatttggttgtgtccttgcaaaatgtgcgttgttttatttatcaatttattttatttttatttttttaaagagatgaggtctcatcatgttgcccaggctggactccaactcctgggctcaagcgatccttccacctcaatcttctgagtggctgggactacagatgtgcgccaccatacctggctattgatcaatttttagtttaccaaacaggcattatgttctgggtcccattctgtgtcgggttctcttttcactcggcaccatggctttaggatccatccatgctgctctgtgaacgccgagttgctttaactgcttggtgctccatgaggcatccccttttgtgtctctgtcctcccagtgagggaccccatcgtaccctactcccctcccacaaaggaagctgtagtgcgcgtcctcaggcgtgtccccatatggatctgctggcattcgtttgtcagtgcacccaggggtagaagtccttggtctcagtctgcagacgtctgcctgagtgcagccaggtgcccccccagagtgggtagccttgtccacatgcccatcagcagcacctgaggggtcccaacagccctacatcccaccaactttctgcttttttccagtcaaatggctcttgagtgttacctggctttatttatttatttattttttgagtcgggtctctgttgcgcaggctggagtgcagtggtgcaatcatggctcactgcagcctcgaccttccaggctcaaacaatcctctcacctcctgagtagctaggactacacgcatgtgccaccatgcctggctaatttttaaatttttttgcagagaaagggtcttgctatgttgcccaggctgatcttgaactcctggcctcaagcgatcctcctgccccagcctcccaaagtgctgggattacaggtgtgagccactgctcccggcctgtctttattttgtattcttggattcctagtgagtttgagccccctctatacatcataacccttatgatactagtaaacatatattttatctttaaccccatttctggcacagaactcctaaaagccttactctccaaaatgatctctttctgtgtactaatggattgactgaaggctggcagcccctaggtagcttcaagatgggggctggtcatcagagagacataggcaggattagagggttgggactttcatcccaccatcccacgtactgggagggaagggggctaaaggttaagctgttcgccaatggccagtgatttattcaatcatgcctacgtaatgaagcctacacaaaaacccaagaagaccgggttcagagaacttctggtagctgggcacatggaggttcctggagggtgccaagccctggaagctctgtgctccctcccacatgccttgccctatgcatctcttcatttgtatcctttgtaatatcctttctaataaactggtaaatgtaaaaaaaa

SEQ ID NO: 351606 - DNA, 3229 bp, Homo sapiens
attggtcgacaggaccgggttgtccggccccacccccgcttccctttgccgcgctccgggtctcgggttttaacccaaggtggagagctggattccggcgggcggcgcttggttagcaggtggacaggcgtcctctttccggctgttgctgctcttcttcctccaatcctgggtctcagtcagggaagaacgaacattcttcctttgctgctggagcttttagagaactgttgcccagcaccttaggcacttcagacatttcatctcactcatttttgtaatttcactgtaaaaatcacctgcacatttataacactgtgactctccacttctgctcaatgctgaaaaggggtccgcatactgcggggagctgtctaaggtgctgaagcttcccaagcatcagtctacaccaacaccatgcggggttagattgtacattttcattctgtctttctggttccccatgccttggataagactattttcaggatcgtgaatatctctccgtatcatggcccacgtgagacactttcggacattagtttcgggattttacttctgggaagcagcactgttactcagtttggttgccacaaaggaaacagacagtgcaagatctcgaagtgctccaatgtcaccttctgattttctggataaattaatgggcaggacatcaggatatgatgcaagaatcagacccaattttaaaggccctccagttaatgtcacatgcaacatattcatcaacagtttcggctctatcgcagagacgaccatggattacagagtgaatatctttcttcgtcagaaatggaatgatccccgcctcgcgtacagtgaatatcctgacgactctttagacctcgacccctccatgttggactccatttggaaacctgatttgttctttgccaatgaaaagggtgccaactttcatgaagtcactacagacaacaaattgctaagaattttcaaaaatggaaatgttctttattcaataagattaacattaacactttcctgtccaatggatctcaagaattttcccatggatgtacaaacatgtataatgcaactggaaagctttgggtacacaatgaatgatctcatttttgaatggcaagatgaggcacccgtacaagtggcagaaggactcactttgccccagtttctgttgaaagaagaaaaagatttacgatactgcactaaacattacaatacaggaaagtttacgtgtatagaagtgcgattccatctggagcgacaaatgggatactatctgatccagatgtacattcccagtctcctgattgttattctatcctgggtttcgttctggatcaacatggatgcagcaccggccagggtagctctggggataaccaccgtgctaacgatgactacacagagttcaggatcacgagcttccttgccaaaagtttcatatgtcaaagctattgatatttggatggcagtatgcctcctttttgtgttttcagcacttctggagtatgcagctgtaaattttgtatcaagacaacacaaagaacttctgagatttcgacgaaagagaaagaataagacagaagcttttgcactggagaagttttaccgtttctcagatatggatgatgaggtaagggaaagccgattcagcttcacagcctatggaatgggaccatgtctacaagcaaaggatggcatgactccaaagggccccaaccaccctgtccaggtaatgccaaaaagtcctgatgaaatgaggaaggtctttatcgaccgggccaagaagattgataccatctcccgagcctgcttcccattagcttttttgatttttaatattttctactgggttatctataaaattcttaggcatgaggatattcatcagcagcaagattaagtctctgggggcatgcaaatgcaaatggtcaattcagaagaaagtgtctctgccataggtgtgtatgtgtatatgtgtgcgtgtggtatacaaatgatgaccattgtattaaaatggcatatggaaaatgtattaaaatggcatatggaaaagctttgtattttggttagctatgcaaagtcatgagaaagatgagattcttttaatgaatataaaatatttattaggggattctatttcatattaattccaggtgatttgttttttcacagtaaaccatgtaagtggaagctttactgccaatgtgtttatatgttatataatatctcataatagtagacatgaaaactactttgaaattccttgatttgtaattcaatgctattaaatcatacaaaagcaaattttgcacagtaaactaatagtttgagatttaaaactattttcttatagtatagttacaaaatgggaaaataattagttacagtgggaaattcactcatattaatggaggattgtacatataaatactatttaaacaacatatgtaattttgaaaatttttaaataagagcattaaaagactttaatgatttggaatactaaatttaattgtttagaatattaagttttcctctgtgcaaatttaaaacaaataacaagagatcgtgttacagtcacaatctacttttcttaaactttgtatctctaggaacgaaggtggaaatacgggaaacaactttgtttttaaataagtattatagctatgtatttttagttattgccaaacattgaacaattcaagccagcacccttgtttttgttagacttttaatagctacttaactgtatgtgattgtgtttaataatttgatataacaggacaaaattcagtaagacttttatattttagtttagaatgtgactttaaaattcaatgggattaaagtatttacattttgataaaaatgaatacaatgaaaacaaaatggattcatggaagattttttaataaaaaccattttcccatcaatgttttatgggtctcaactcctatctccaaatataagtagggaaagttttaattttaaatgatataagtaagtcatttctataaagtgaggactctttttctatttctgaattaatgatttcaaaatctaagccattcgcaagatgtgaataattttaaatgaaatttttacataaaatttttcaatgaccccatgggattacttcaacaaaaacagagcattagtaacttgttttttgcagtgtaattgggtgcaaatgtatgatagagttcttggtaaacagaaccag

SEQ ID NO: 351607 - DNA, 287 bp, Homo sapiens
aatccagagtcctcagacagtgctcgacacattgtacattttcaaaacctatttgaagatgaaaatgactcctgctcacttcataaggagaccacacagagtaatcgactgaactgtgaacactttaaagattcagatttgtgttttatatactttactgtttgtagcacagtgctttgcatcgaacaaattacataagaactcaaaaatcatttttgcaatatataccatatatttgattacattatggtataagaaaggatacttttacataataaataaatgca

SEQ ID NO: 351608 - DNA, 1413 bp, Homo sapiens
attggtcgacaggaccgggttgtccggccccacccccgcttccctttgccgcgctccgggtctcgggttttaacccaaggtggagagctggattccggcgggcggcgcttggttagcaggtggacaggcgtcctctttccggctgttgctgctcttcttcctccaatcctgggtctcagtcagggaagaacgaacattcttcctttgctgctggagcttttagagaactgttgcccagcaccttaggcacttcagacatttcatctcactcatttttgtaatttcactgtaaaaatcacctgcacatttataacactgtgactctccacttctgctcaatgctgaaaaggggtccgcatactgcggggagctgtctaaggtgctgaagcttcccaagcatcagtctacaccaacaccatgcggggttagattgtacattttcattctgtctttctggttccccatgccttggataagactattttcaggatcgtgaatatctctccgtatcatggcccacgtgagacactttcggacattagtttcgggattttacttctgggaagcagcactgttactcagtttggttgccacaaaggaaacagacagtgcaagatctcgaagtgctccaatgtcaccttctgattttctggataaattaatgggcaggacatcaggatatgatgcaagaatcagacccaattttaaaggccctccagttaatgtcacatgcaacatattcatcaacagtttcggctctatcgcagagacgaccatggattacagagtgaatatctttcttcgtcagaaatggaatgatccccgcctcgcgtacagtgaatatcctgacgactctttagacctcgacccctccatgttggactccatttggaaacctgatttgttctttgccaatgaaaagggtgccaactttcatgaagtcactacagacaacaaattgctaagaattttcaaaaatggaaatgttctttattcaataagtatgaattcaaatgaaacagatggtctctcggctcctagattttgtttgctatatcctggcttgcacaatccaaaacttaattttttctgagttgtttttgaaaatctcacaggactttgaaatcttcaaatgcttcatatcttcagtttctttgttaacaaaaattgtgctagaaaaagaaaaaatcttgttgaatttacaaatggagcatctgttatgtttcatgagagatctggctttcctgcttttttaaagaaagaagaagaaggtccttgcaaagacgactaattgaacttacatatttatctgtatttcctctgaaacccccattaaaaaaggaaataaacatagatgcgaacagcctcccctgttctcattgcccgtccgcccctatcatctacattttcctc

SEQ ID NO: 351609 - DNA, 1602 bp, Homo sapiens
attggtcgacaggaccgggttgtccggccccacccccgcttccctttgccgcgctccgggtctcgggttttaacccaaggtggagagctggattccggcgggcggcgcttggttagcaggtggacaggcgtcctctttccggctgttgctgctcttcttcctccaatcctgggtctcagtcagggaagaacgaacattcttcctttgctgctggagcttttagagaactgttgcccagcaccttaggcacttcagacatttcatctcactcatttttgtaatttcactgtaaaaatcacctgcacatttataacactgtgactctccacttctgctcaatgctgaaaaggggtccgcatactgcggggagctgtctaaggtgctgaagcttcccaagcatcagtctacaccaacaccatgcggggttagattgtacattttcattctgtctttctggttccccatgccttggataagactattttcaggatcgtgaatatctctccgtatcatggcccacgtgagacactttcggacattagtttcgggattttacttctgggaagcagcactgttactcagtttggttgccacaaaggaaacagacagtgcaagatctcgaagtgctccaatgtcaccttctgattttctggataaattaatgggcaggacatcaggatatgatgcaagaatcagacccaattttaaaggccctccagttaatgtcacatgcaacatattcatcaacagtttcggctctatcgcagagacgaccatggattacagagtgaatatctttcttcgtcagaaatggaatgatccccgcctcgcgtacagtgaatatcctgacgactctttagacctcgacccctccatgttggactccatttggaaacctgatttgttctttgccaatgaaaagggtgccaactttcatgaagtcactacagacaacaaattgctaagaattttcaaaaatggaaatgttctttattcaataagattaacattaacactttcctgtccaatggatctcaagaattttcccatggatgtacaaacatgtataatgcaactggaaagctttgggtacacaatgaatgatctcatttttgaatggcaagatgaggcacccgtacaagtggcagaaggactcactttgccccagtttctgttgaaagaagaaaaagatttacgatactgcactaaacattacaatacaggtaggggttgagtagtgttctttacacttactacttgtggttttatgatatccagatgtttcttcattacaatgctaagttatttaactgttcatagatcaatgtttttcttatatagcagaaaatggatgcatttgaaacctatgaatactttgattcattgcatattgttaaataattggtctgtatgagaccaaagtaatgcttggtgttcaattatctttaaataatttttaatgaaaagctcataattacatagtaataatgtttccaaaactattcctttaatttctgtgaacaataaaatgtgtttttaaccattcttgggcagtaaacactgtatctgttaagaacattttttttaaaattgcatttttta

SEQ ID NO: 351610 - DNA, 408 bp, Homo sapiens
taggacaattacatatacatacacacacacatgtaatatactatataatatatacatatattaagaaatgcctacatttctgtgtatatatacatatgtgtgtatatatatatgcatatatgtgtgtgtatatatatactcatacatacaaatctacatatatatgtgtgtatatatgcatgttttaagaacaatttgtatctatttttttcttttctccttaaatagtggtttaaaatgacaagataaaagattgtaaatcggtggaacccactggaaagtaggcaaaaagagtttaacctactggaaagcaagagctgtcagaatcccagggtccacttttgaatgaaatctgactgcagaaaggaagaaaagaaaatgttcaataatattaagacgtgggaagca

SEQ ID NO: 351611 - DNA, 3160 bp, Homo sapiens
attggtcgacaggaccgggttgtccggccccacccccgcttccctttgccgcgctccgggtctcgggttttaacccaaggtggagagctggattccggcgggcggcgcttggttagcaggtggacaggcgtcctctttccggctgttgctgctcttcttcctccaatcctgggtctcagtcagggaagaacgaacattcttcctttgctgctggagcttttagagaactgttgcccagcaccttaggcacttcagacatttcatctcactcatttttgtaatttcactgtaaaaatcacctgcacatttataacactgtgactctccacttctgctcaatgctgaaaaggggtccgcatactgcggggagctgtctaaggtgctgaagcttcccaagcatcagtctacaccaacaccatgcggggttagattgtacattttcattctgtctttctggttccccatgccttggataagactattttcaggatcgtgaatatctctccgtatcatggcccacgtgagacactttcggacattagtttcgggattttacttctgggaagcagcactgttactcagtttggttgccacaaaggaaacagacagtgcaagatctcgaagtgctccaatgtcaccttctgattttctggataaattaatgggcaggacatcaggatatgatgcaagaatcagacccaattttaaaggccctccagttaatgtcacatgcaacatattcatcaacagtttcggctctatcgcagagacgaccatggattacagagtgaatatctttcttcgtcagaaatggaatgatccccgcctcgcgtacagtgaatatcctgacgactctttagacctcgacccctccatgttggactccatttggaaacctgatttgttctttgccaatgaaaagggtgccaactttcatgaagtcactacagacaacaaattgctaagaattttcaaaaatggaaatgttctttattcaataagattaacattaacactttcctgtccaatggatctcaagaattttcccatggatgtacaaacatgtataatgcaactggaaagctttgggtacacaatgaatgatctcatttttgaatggcaagatgaggcacccgtacaagtggcagaaggactcactttgccccagtttctgttgaaagaagaaaaagatttacgatactgcactaaacattacaatacaggaaagtttacgtgtatagaagtgcgattccatctggagcgacaaatgggatactatctgatccagatgtacattcccagtctcctgattgttattctatcctgggtttcgttctggatcaacatggatgcagcaccggccagggtagctctggggataaccaccgtgctaacgatgactacacagagttcaggatcacgagcttccttgccaaaagtttcatatgtcaaagctattgatatttggatggcagtatgcctcctttttgtgttttcagcacttctggagtatgcagctgtaaattttgtatcaagacaacacaaagaacttctgagatttcgacgaaagagaaagaataaggatgatgaggtaagggaaagccgattcagcttcacagcctatggaatgggaccatgtctacaagcaaaggatggcatgactccaaagggccccaaccaccctgtccaggtaatgccaaaaagtcctgatgaaatgaggaaggtctttatcgaccgggccaagaagattgataccatctcccgagcctgcttcccattagcttttttgatttttaatattttctactgggttatctataaaattcttaggcatgaggatattcatcagcagcaagattaagtctctgggggcatgcaaatgcaaatggtcaattcagaagaaagtgtctctgccataggtgtgtatgtgtatatgtgtgcgtgtggtatacaaatgatgaccattgtattaaaatggcatatggaaaagctttgtattttggttagctatgcaaagtcatgagaaagatgagattcttttaatgaatataaaatatttattaggggattctatttcatattaattccaggtgatttgttttttcacagtaaaccatgtaagtggaagctttactgccaatgtgtttatatgttatataatatctcataatagtagacatgaaaactactttgaaattccttgatttgtaattcaatgctattaaatcatacaaaagcaaattttgcacagtaaactaatagtttgagatttaaaactattttcttatagtatagttacaaaatgggaaaataattagttacagtgggaaattcactcatattaatggaggattgtacatataaatactatttaaacaacatatgtaattttgaaaatttttaaataagagcattaaaagactttaatgatttggaatactaaatttaattgtttagaatattaagttttcctctgtgcaaatttaaaacaaataacaagagatcgtgttacagtcacaatctacttttcttaaactttgtatctctaggaacgaaggtggaaatacgggaaacaactttgtttttaaataagtattatagctatgtatttttagttattgccaaacattgaacaattcaagccagcacccttgtttttgttagacttttaatagctacttaactgtatgtgattgtgtttaataatttgatataacaggacaaaattcagtaagacttttatattttagtttagaatgtgactttaaaattcaatgggattaaagtatttacattttgataaaaatgaatacaatgaaaacaaaatggattcatggaagattttttaataaaaaccattttcccatcaatgttttatgggtctcaactcctatctccaaatataagtagggaaagttttaattttaaatgatataagtaagtcatttctataaagtgaggactctttttctatttctgaattaatgatttcaaaatctaagccattcgcaagatgtgaataattttaaatgaaatttttacataaaatttttcaatgaccccatgggattacttcaacaaaaacagagcattagtaacttgttttttgcagtgtaattgggtgcaaatgtatgatagagttcttggtaaacagaaccag

SEQ ID NO: 351612 - DNA, 903 bp, Homo sapiens
ggaaggggcaaatatccaaactgtatcagcactctttgaaagattacagagtgaatatctttcttcgtcagaaatggaatgatccccgcctcgcgtacagtgaatatcctgacgactctttagacctcgacccctccatgttggactccatttggaaacctgatttgttctttgccaatgaaaagggtgccaactttcatgaagtcactacagacaacaaattgctaagaattttcaaaaatggaaatgttctttattcaataagattaacattaacactttcctgtccaatggatctcaagaattttcccatggatgtacaaacatgtataatgcaactggaaagctgtctgggaaatttaggtctaaagccaaagagggagtgaaaagtgaagatcaactattaaaagccatatacagagtggttcaagaatcagatgaaatagctgaagaggcgaatgtagagaggaaataaaacacaaacaagaacagacgcttaagaaatgcctacatttagaagttgttggaaaaaattccagacaaaggcaaagatggcaaattaaaatcaacacgattcaacctcgaaagagaaagcactgtgaaggagttctgtgtaacaaaatcaaatgctgcaaagaaagttgtgtaaggtacttgaaaaaagcaattgttattgttaacgaagacaaatgtgattagaataatgatggtcaaagctggaatctaaaaaggttttttatagtggtttaaaatgacaagataaaagattgtaaatcggtggaacccactggaaagtaggcaaaaagagtttaacctactggaaagcaagagctgtcagaatcccagggtccacttttgaatgaaatctgactgcagaaaggaagaaaagaaaatgttcaataa

SEQ ID NO: 351613 - DNA, 899 bp, Homo sapiens
ttatgtcggcactgactctcttaactaccaccgctacacgattacagagtgaatatctttcttcgtcagaaatggaatgatccccgcctcgcgtacagtgaatatcctgacgactctttagacctcgacccctccatgttggactccatttggaaacctgatttgttctttgccaatgaaaagggtgccaactttcatgaagtcactacagacaacaaattgctaagaatttttttaaatggaagatgttctttattcaataaggattacagagtgaatatctttcttcgtcagaaatggaatgatccccgcctcgcgtacagtgaatatcctgacgactctttagacctcgacccctccatgttggactccatttggaaacctgatttgttctttgccaatgaaaagggtgccaactttcatgaagtcactacagacaacaaattgctaagaattttcaaaaatggaaatgttctttattcaataagtatgaattcaaatgaaacagatggtctctcggctcctagattttgtttgctatatcctggcttgcacaatccaaaacttaattttttctgagttgtttttgaaaatctcacaggactttgaaatcttcaaatgcttcatatcttcagtttctttgttaacaaaaattgtgctagaaaaagaaaaaatcttgttgaatttacaaatggagcatctgttatgtttcatgagagatctggctttcctgcttttttaaagaaagaagaagaaggtccttgcaaagacgactaattgaacttacatatttatctgtatttcctctgaaacccccattaaaaaaggaaataaacatagatgcgaacagcctcccctgttctcattgcccgtccgcccctatcatctacattttcctc

SEQ ID NO: 351614 - DNA, 486 bp, Homo sapiens
aacacagtgggacactgagagctagagcatctcgatgtagtacaccgtgacttaacacagcaggacacggagagctagagcatcttgatgtagtacaccatgacttaacacagcgggacatggagagctggagcatctcgatgtagtacaccgtgacttaacacagtgggacactgaaagctagagcatctcgatgtagtacaccatgacttaacacagcgggacactgagagctagagcatctcgatgtagtacaccgtgacttaacacagtgggacactgagagctagagcatctcgatgtaatacaccatgacttaacacagtgggacacggagagctagagcatctcgatgtagtacaccatgacttaacacagggggacacggagagctagagcatctcgatgtagtacaccgtgacttaacacagcgggacactgaaagctagagcatctcgatgtagtacaccgtgacttaacacagcg

SEQ ID NO: 351615 - DNA, 599 bp, Homo sapiens
tgtagtggctcacgcctgtaatccctgcactttgggaggccaaggcaggcggatcacaaggtcaggagatcaagaccatcctggctaacacggtgaaaccccgtctctactaaaaatacaaaaaattagccgggtgtggtgatgggtgcttgtagtcccagctactcgggaggctgaggcaggagaatggcgtgaacccgggaggcggagcttgcagtgagccgagatcacgccactgcactccagcctcggtgatgaagggagactccgtctcaaaaaaaaaaaaaaaaaaaacaaaaacatggcattaggaaacaggaaaccaaagaaccaaccaagcatctaaggaggggtgacttaaatttaacgcaaaacaataaaggtaatcacttctagttttaaaagatagttaagagtctggccatatccctagttgtacaacagtgactatctgtcacaaccaaggcactggtacaatatcagtgtgcttctctctgcctccataaaaattattttgaaacagaccctcctgggaccccagaaggtagtgtgtcactattccctcccctcattcattttgctaagtagtttttctgcca

SEQ ID NO: 351616 - DNA, 2838 bp, Homo sapiens
accagtctggaaggtccccgggaggccgtacctccgagaggctcggcgttgagcccgggtagggccaggtggctgccctttcacctagggtagtccctggtcgcctccgctcttcgcccaaaaggggatgcagctccgggaaatatatgggagtccacatttatgtaagaaatgaaactataaaatgtataaataatttgcaaatcagaattgctgtcgaaagttttactataatgaaagatattttcatactctcaaaaatatagaggaaaggggccaagattatagtaccagtcacaatcttttgatgaggacgaaatgaatcaggtaacagactgggttgacccatcatttgatgattttctagagtgtagtggcgtctctactattactgccacatcattaggtgtgaataactcaagtcatagaagaaaaaatgggccttctacattagaaagcagcagatttccagcgagaaaaagaggaaatctatcttccttagaacagatttatggtttagaaaattcaaaagaatatctgtctgaaaatgaaccatgggtggataaatataaaccagaaactcagcatgaacttgctgtgcataaaaagaaaattgaagaagtcgaaacctggttaaaagctcaagttttagaaaggcaaccaaaacagggtggatctattttattaataacaggtcctcctggatgtggaaagacaacgaccttaaaaatactatcaaaggagcatggtattcaagtacaagagtggattaatccagttttaccagacttccaaaaagatgatttcaaggggatgtttaatactgaatcaagcttccatatgtttccctatcagtctcagatagcagttttcaaagagtttctactaagagcgacaaagtataacaagttacaaatgcttggagatgatctgagaactgataagaagataattctggttgaagatttacctaaccagttttatcgggattctcatactttacatgaagttctaaggaagtatgtgaggattggtcgatgtcctcttatatttataatctcggacagtctcagtggagataataatcaaaggttattgtttcccaaagaaattcaggaagagtgttctatctcaaatattagtttcaaccctgtggcaccaacaattatgatgaaatttcttaatcgaatagtgactatagaagctaacaagaatggaggaaaaattactgtccctgacaaaacttctctagagttgctctgtcagggatgttctggtgatatcagaagtgcaataaacagcctccagttttcttcttcaaaaggagaaaacaacttacggccaaggaaaaaaggaatgtctttaaaatcagatgctgtgctgtcaaaatcaaaacgaagaaaaaaacctgatagggtttttgaaaatcaagaggtccaagctattggtggcaaagatgtttctctgtttctcttcagagctttggggaaaattctatattgtaaaagagcatctttaacagaattagactcacctcggttgccctctcatttatcagaatatgaacgggatacattacttgttgaacctgaggaggtagtagaaatgtcacacatgcctggagacttatttaatttatatcttcaccaaaactacatagatttcttcatggaaattgatgatattgtgagagccagtgaatttctgagttttgcagatatcctcagtggtgactggaatacacgctctttactcagggaatatagcacatctatagctacgagaggtgtgatgcattccaacaaagcccgaggatatgctcattgccaaggaggaggatcaagttttcgacccttgcacaaacctcagtggtttctaataaataaaaagtatcgggaaaattgcctggcagcaaaagcactttttcctgacttctgcctaccagctttatgcctccaaactcagctattgccataccttgctctactaaccattccaatgagaaatcaagctcagatttcttttatccaagatattggaaggctccctctgaagcgacactttggaagattgaaaatggaagccctgactgacagggaacatggaatgatagaccctgacagcggagatgaagcccagcttaatggaggacattctgcagaggaatctctgggtgaacccactcaagccactgtgccggaaacctggtctcttcctttgagtcagaatagtgccagtgaactgcctgctagccagccccagcccttttcagcccaaggagacatggaagaaaacataataatagaagactacgagagtgatgggacatagaagccagcctgctaatcagattgctacttcacagcttcatttttgtttcattcagtggtacttcagcagagttaatatgcttttctgatgaattacacaacagtttgttaattcttcattcttgtagtatttcatcacaagaaacctactcttctgtcatcttgaagtaaatagaagatcaagccttcaaatctcttaattttttcggtatttattaaatctgtgagtggtttaaggagcggtcagtgtgtataaagtgtgtttgaacattatgccaaatatcaagatgtgaaggactaattcaggatgcaaaaacgttattggggggttgtaaatatcaactattcaacagtttaggatgcaattacgagtgtaaactgtgtgccttatttacactttattgtctcccgcttctcagatagttttgatgtgttgtacagtggaatatcttagatactttttggaaagtatttacataagttatatcacaattaaaatgttgaattt

SEQ ID NO: 351617 - DNA, 925 bp, Homo sapiens
accagtctggaaggtccccgggaggccgtacctccgagaggctcggcgttgagcccgggtagggccaggtggctgccctttcacctagggtagtccctggtcgcctccgctcttcgcccaaaaggggatgcagctccgggaaacaagtgaattcatggtattttacttttttgggaaatactggaaatgaagacctgcaactgtaatttgaaataaggaaaactttaattttcagtataaaaattgctcaaatagaattgcctgattttaatgacaaaagtatatgggagtccacatttatgtaagaaatgaaactataaaatgtataaataatttgcaaatcagaattgctgtcgaaagttttactataatgaaagatattttcatactctcaaaaatatagaggaaaggggccaagattatagtaccagtcacaatcttttgatgaggacgaaatgaatcaggtaacagactgggttgacccatcatttgatgattttctagagtgtagtggcgtctctactattactgccacatcattaggtgtgaataactcaagtcatagaagaaaaaatgggccttctacattagaaagcagcagatttccagcgagaaaaagaggaaatctatcttccttagaacagatttatggtttagaaaattcaaaagaatatctgtctgaaaatgaaccatgggtgtaatttaacagaatcaggatgacttgtgtgcttaacgaaattgggagtcaaactgctaaaggtcagtttgaaggacaacgggggttttttttaaaaggctcgggggagaaggctaaatacagggggtcgtccgggttcgttcaccacagttggggtttgcagctgtccttagaagttgaaatgggggagagggcgtctgggggggtacggtattgtttgtggtttct

SEQ ID NO: 351618 - DNA, 4076 bp, Homo sapiens
accagtctggaaggtccccgggaggccgtacctccgagaggctcggcgttgagcccgggtagggccaggtggctgccctttcacctagggtagtccctggtcgcctccgctcttcgcccaaaaggggatgcagctccgggaaagtaaggccgccgcggttgcggctatattatgtatatgtcttagagacgcgagtctatctctgccttcaagctttcctgggctctcgtcgctcctcctcccgacccgcccatcccatctggggatgagaagattgagggtgcagagccctgtcctgcagcggggatttgcgagctcaacccggcaccccactgattacaggattacgttggacgaatatttgagcttagtattccctgttcactgtgtggggtggtggtgggtcggctaggaatagtcttgaaggtctacctctgacatctcatttcagtaacctcgcatcttcagggacagttatctgctttttaaaggaggtaattgtcaatcttgttttcaagagtgaatagagacctgaccgtgacaacagtctgcacctttttttgtttgtttgtttgtttttgttttgttttgagacggagtctcactcttgtcgcccaggctggagtgcaacctccgcctcctgggttcaagtgattctcctgccttagcctccagagtagctgggattacaggcgcccaccaccacgcccggctaatttttgcatttttaatagagacggggtttcaccatgttttggccaggctggtctcaaactcctgacctcagatgatccgcccgcctcgtcctcccacggtgctgggattacaggcatgagccaccgcgtccggcccctggtctgcatcttttatttcgagctacaaactatatttactcaaataggtgttttttttccacctgtataccttttgaaacgtcacagtctctaatcgtgaacgatttggggcggagggctgaacaatgtgttttctagtgtgtcgaggtgtttataggctatgtgtgcctccaaactgtaaagtagtccagtatactttccaatgtataagtttgtagaccttaaacttttcttctggctaacttaaaatcgttgaattcactagtttgcataaacatttaagaatttgaaaacacggttgaaaaacagtgttaccaagaaattttgtaataacatgttcaaatgaagacaaaaattttacagtttaagacttaaattcttcgtccacagcaagtgaattcatggtattttacttttttgggaaatactggaaatgaagacctgcaactgtaatttgaaataaggaaaactttaattttcagtataaaaattgctcaaatagaattgcctgattttaatgacaaaagtatatgggagtccacatttatgtaagaaatgaaactataaaatgtataaataatttgcaaatcagaattgctgtcgaaagttttactataatgaaagatattttcatactctcaaaaatatagaggaaaggggccaagattatagtaccagtcacaatcttttgatgaggacgaaatgaatcaggtaacagactgggttgacccatcatttgatgattttctagagtgtagtggcgtctctactattactgccacatcattaggtgtgaataactcaagtcatagaagaaaaaatgggccttctacattagaaagcagcagatttccagcgagaaaaagaggaaatctatcttccttagaacagatttatggtttagaaaattcaaaagaatatctgtctgaaaatgaaccatgggtggataaatataaaccagaaactcagcatgaacttgctgtgcataaaaagaaaattgaagaagtcgaaacctggttaaaagctcaagttttagaaaggcaaccaaaacagggtggatctattttattaataacaggtcctcctggatgtggaaagacaacgaccttaaaaatactatcaaaggagcatggtattcaagtacaagagtggattaatccagttttaccagacttccaaaaagatgatttcaaggggatgtttaatactgaatcaagcttccatatgtttccctatcagtctcagatagcagttttcaaagagtttctactaagagcgacaaagtataacaagttacaaatgcttggagatgatctgagaactgataagaagataattctggttgaagatttacctaaccagttttatcgggattctcatactttacatgaagttctaaggaagtatgtgaggattggtcgatgtcctcttatatttataatctcggacagtctcagtggagataataatcaaaggttattgtttcccaaagaaattcaggaagagtgttctatctcaaatattagtttcaaccctgtggcaccaacaattatgatgaaatttcttaatcgaatagtgactatagaagctaacaagaatggaggaaaaattactgtccctgacaaaacttctctagagttgctctgtcagggatgttctggtgatatcagaagtgcaataaacagcctccagttttcttcttcaaaaggagaaaacaacttacggccaaggaaaaaaggaatgtctttaaaatcagatgctgtgctgtcaaaatcaaaacgaagaaaaaaacctgatagggtttttgaaaatcaagaggtccaagctattggtggcaaagatgtttctctgtttctcttcagagctttggggaaaattctatattgtaaaagagcatctttaacagaattagactcacctcggttgccctctcatttatcagaatatgaacgggatacattacttgttgaacctgaggaggtagtagaaatgtcacacatgcctggagacttatttaatttatatcttcaccaaaactacatagatttcttcatggaaattgatgatattgtgagagccagtgaatttctgagttttgcagatatcctcagtggtgactggaatacacgctctttactcagggaatatagcacatctatagctacgagaggtgtgatgcattccaacaaagcccgaggatatgctcattgccaaggaggaggatcaagttttcgacccttgcacaaacctcagtggtttctaataaataaaaagtatcgggaaaattgcctggcagcaaaagcactttttcctgacttctgcctaccagctttatgcctccaaactcagctattgccataccttgctctactaaccattccaatgagaaatcaagctcagatttcttttatccaagatattggaaggctccctctgaagcgacactttggaagattgaaaatggaagccctgactgacagggaacatggaatgatagaccctgacagcggagatgaagcccagcttaatggaggacattctgcagaggaatctctgggtgaacccactcaagccactgtgccggaaacctggtctcttcctttgagtcagaatagtgccagtgaactgcctgctagccagccccagcccttttcagcccaaggagacatggaagaaaacataataatagaagactacgagagtgatgggacatagaagccagcctgctaatcagattgctacttcacagcttcatttttgtttcattcagtggtacttcagcagagttaatatgcttttctgatgaattacacaacagtttgttaattcttcattcttgtagtatttcatcacaagaaacctactcttctgtcatcttgaagtaaatagaagatcaagccttcaaatctcttaattttttcggtatttattaaatctgtgagtggtttaaggagcggtcagtgtgtataaagtgtgtttgaacattatgccaaatatcaagatgtgaaggactaattcaggatgcaaaaacgttattggggggttgtaaatatcaactattcaacagtttaggatgcaattacgagtgtaaactgtgtgccttatttacactttattgtctcccgcttctcagatagttttgatgtgttgtacagtggaatatcttagatactttttggaaagtatttacataagttatatcacaattaaaatgttgaattt

SEQ ID NO: 351619 - DNA, 3326 bp, Homo sapiens
accagtctggaaggtccccgggaggccgtacctccgagaggctcggcgttgagcccgggtagggccaggtggctgccctttcacctagggtagtccctggtcgcctccgctcttcgcccaaaaggggatgcagctccgggaaagtaaggccgccgcggttgcggctatattatgtatatgtcttagagacgcgagtctatctctgccttcaagctttcctgggctctcgtcgctcctcctcccgacccgcccatcccatctggggatgagaagattgagggtgcagagccctgtcctgcagcggggatttgcgagctcaacccggcaccccactgattacaggattacgttggacgaatatttgagcttagtattccctgttcactgtgtggggtggtggtgggtcggctaggaatagtcttgaaggtctacctctgacatctcatttcagtaacctcgcatcttcagggacagttatctgctttttaaaggagcaagtgaattcatggtattttacttttttgggaaatactggaaatgaagacctgcaactgtaatttgaaataaggaaaactttaattttcagtataaaaattgctcaaatagaattgcctgattttaatgacaaaagtatatgggagtccacatttatgtaagaaatgaaactataaaatgtataaataatttgcaaatcagaattgctgtcgaaagttttactataatgaaagatattttcatactctcaaaaatatagaggaaaggggccaagattatagtaccagtcacaatcttttgatgaggacgaaatgaatcaggtaacagactgggttgacccatcatttgatgattttctagagtgtagtggcgtctctactattactgccacatcattaggtgtgaataactcaagtcatagaagaaaaaatgggccttctacattagaaagcagcagatttccagcgagaaaaagaggaaatctatcttccttagaacagatttatggtttagaaaattcaaaagaatatctgtctgaaaatgaaccatgggtggataaatataaaccagaaactcagcatgaacttgctgtgcataaaaagaaaattgaagaagtcgaaacctggttaaaagctcaagttttagaaaggcaaccaaaacagggtggatctattttattaataacaggtcctcctggatgtggaaagacaacgaccttaaaaatactatcaaaggagcatggtattcaagtacaagagtggattaatccagttttaccagacttccaaaaagatgatttcaaggggatgtttaatactgaatcaagcttccatatgtttccctatcagtctcagatagcagttttcaaagagtttctactaagagcgacaaagtataacaagttacaaatgcttggagatgatctgagaactgataagaagataattctggttgaagatttacctaaccagttttatcgggattctcatactttacatgaagttctaaggaagtatgtgaggattggtcgatgtcctcttatatttataatctcggacagtctcagtggagataataatcaaaggttattgtttcccaaagaaattcaggaagagtgttctatctcaaatattagtttcaaccctgtggcaccaacaattatgatgaaatttcttaatcgaatagtgactatagaagctaacaagaatggaggaaaaattactgtccctgacaaaacttctctagagttgctctgtcagggatgttctggtgatatcagaagtgcaataaacagcctccagttttcttcttcaaaaggagaaaacaacttacggccaaggaaaaaaggaatgtctttaaaatcagatgctgtgctgtcaaaatcaaaacgaagaaaaaaacctgatagggtttttgaaaatcaagaggtccaagctattggtggcaaagatgtttctctgtttctcttcagagctttggggaaaattctatattgtaaaagagcatctttaacagaattagactcacctcggttgccctctcatttatcagaatatgaacgggatacattacttgttgaacctgaggaggtagtagaaatgtcacacatgcctggagacttatttaatttatatcttcaccaaaactacatagatttcttcatggaaattgatgatattgtgagagccagtgaatttctgagttttgcagatatcctcagtggtgactggaatacacgctctttactcagggaatatagcacatctatagctacgagaggtgtgatgcattccaacaaagcccgaggatatgctcattgccaaggaggaggatcaagttttcgacccttgcacaaacctcagtggtttctaataaataaaaagtatcgggaaaattgcctggcagcaaaagcactttttcctgacttctgcctaccagctttatgcctccaaactcagctattgccataccttgctctactaaccattccaatgagaaatcaagctcagatttcttttatccaagatattggaaggctccctctgaagcgacactttggaagattgaaaatggaagccctgactgacagggaacatggaatgatagaccctgacagcggagatgaagcccagcttaatggaggacattctgcagaggaatctctgggtgaacccactcaagccactgtgccggaaacctggtctcttcctttgagtcagaatagtgccagtgaactgcctgctagccagccccagcccttttcagcccaaggagacatggaagaaaacataataatagaagactacgagagtgatgggacatagaagccagcctgctaatcagattgctacttcacagcttcatttttgtttcattcagtggtacttcagcagagttaatatgcttttctgatgaattacacaacagtttgttaattcttcattcttgtagtatttcatcacaagaaacctactcttctgtcatcttgaagtaaatagaagatcaagccttcaaatctcttaattttttcggtatttattaaatctgtgagtggtttaaggagcggtcagtgtgtataaagtgtgtttgaacattatgccaaatatcaagatgtgaaggactaattcaggatgcaaaaacgttattggggggttgtaaatatcaactattcaacagtttaggatgcaattacgagtgtaaactgtgtgccttatttacactttattgtctcccgcttctcagatagttttgatgtgttgtacagtggaatatcttagatactttttggaaagtatttacataagttatatcacaattaaaatgttgaattt

SEQ ID NO: 351620 - DNA, 3996 bp, Homo sapiens
accagtctggaaggtccccgggaggccgtacctccgagaggctcggcgttgagcccgggtagggccaggtggctgccctttcacctagggtagtccctggtcgcctccgctcttcgcccaaaaggggatgcagctccgggaaagtaaggccgccgcggttgcggctatattatgtatatgtcttagagacgcgagtctatctctgccttcaagctttcctgggctctcgtcgctcctcctcccgacccgcccatcccatctggggatgagaagattgagggtgcagagccctgtcctgcagcggggatttgcgagctcaacccggcaccccactgattacaggattacgttggacgaatatttgagcttagtattccctgttcactgtgtggggtggtggtgggtcggctaggaatagtcttgaaggtctacctctgacatctcatttcagtaacctcgcatcttcagggacagttatctgctttttaaaggaggtaattgtcaatcttgttttcaagagtgaatagagacctgaccgtgacaacagtctgcacctttttttgtttgtttgtttgtttttgttttgttttgagacggagtctcactcttgtcgcccaggctggagtgcaacctccgcctcctgggttcaagtgattctcctgccttagcctccagagtagctgggattacaggcgcccaccaccacgcccggctaatttttgcatttttaatagagacggggtttcaccatgttttggccaggctggtctcaaactcctgacctcagatgatccgcccgcctcgtcctcccacggtgctgggattacaggcatgagccaccgcgtccggcccctggtctgcatcttttatttcgagctacaaactatatttactcaaataggtgttttttttccacctgtataccttttgaaacgtcacagtctctaatcgtgaacgatttggggcggagggctgaacaatgtgttttctagtgtgtcgaggtgtttataggctatgtgtgcctccaaactgtaaagtagtccagtatactttccaatgtataagtttgtagaccttaaacttttcttctggctaacttaaaatcgttgaattcactagtttgcataaacatttaagaatttgaaaacacggttgaaaaacagtgttaccaagaaattttgtaataacatgttcaaatgaagacaaaaattttacagtttaagacttaaattcttcgtccacagcaagtgaattcatggtattttacttttttgggaaatactggaaatgaagacctgcaactgtaatttgaaataaggaaaactttaattttcagtataaaaattgctcaaatagaattgcctgattttaatgacaaaaggtgaattatagtttaatgtactgcaagtcctaaactacggatgggaactattacagtttataatgtcaaaaacttttcttagaccaaaggtatcttccacaaaggtaacagactgggttgacccatcatttgatgattttctagagtgtagtggcgtctctactattactgccacatcattaggtgtgaataactcaagtcatagaagaaaaaatgggccttctacattagaaagcagcagatttccagcgagaaaaagaggaaatctatcttccttagaacagatttatggtttagaaaattcaaaagaatatctgtctgaaaatgaaccatgggtggataaatataaaccagaaactcagcatgaacttgctgtgcataaaaagaaaattgaagaagtcgaaacctggttaaaagctcaagttttagaaaggcaaccaaaacagggtggatctattttattaataacaggtcctcctggatgtggaaagacaacgaccttaaaaatactatcaaaggagcatggtattcaagtacaagagtggattaatccagttttaccagacttccaaaaagatgatttcaaggggatgtttaatactgaatcaagcttccatatgtttccctatcagtctcagatagcagttttcaaagagtttctactaagagcgacaaagtataacaagttacaaatgcttggagatgatctgagaactgataagaagataattctggttgaagatttacctaaccagttttatcgggattctcatactttacatgaagttctaaggaagtatgtgaggattggtcgatgtcctcttatatttataatctcggacagtctcagtggagataataatcaaaggttattgtttcccaaagaaattcaggaagagtgttctatctcaaatattagtttcaaccctgtggcaccaacaattatgatgaaatttcttaatcgaatagtgactatagaagctaacaagaatggaggaaaaattactgtccctgacaaaacttctctagagttgctctgtcagggatgttctggtgatatcagaagtgcaataaacagcctccagttttcttcttcaaaaggagaaaacaacttacggccaaggaaaaaaggaatgtctttaaaatcagatgctgtgctgtcaaaatcaaaacgaagaaaaaaacctgatagggtttttgaaaatcaagaggtccaagctattggtggcaaagatgtttctctgtttctcttcagagctttggggaaaattctatattgtaaaagagcatctttaacagaattagactcacctcggttgccctctcatttatcagaatatgaacgggatacattacttgttgaacctgaggaggtagtagaaatgtcacacatgcctggagacttatttaatttatatcttcaccaaaactacatagatttcttcatggaaattgatgatattgtgagagccagtgaatttctgagttttgcagatatcctcagtggtgactggaatacacgctctttactcagggaatatagcacatctatagctacgagaggtgtgatgcattccaacaaagcccgaggatatgctcattgccaaggaggaggatcaagttttcgacccttgcacaaacctcagtggtttctaataaataaaaagtatcgggaaaattgcctggcagcaaaagcactttttcctgacttctgcctaccagctttatgcctccaaactcagctattgccataccttgctctactaaccattccaatgagaaatcaagctcagatttcttttatccaagatattggaaggctccctctgaagcgacactttggaagattgaaaatggaagccctgactgacagggaacatggaatgatagaccctgacagcggagatgaagcccagcttaatggaggacattctgcagaggaatctctgggtgaacccactcaagccactgtgccggaaacctggtctcttcctttgagtcagaatagtgccagtgaactgcctgctagccagccccagcccttttcagcccaaggagacatggaagaaaacataataatagaagactacgagagtgatgggacatagaagccagcctgctaatcagattgctacttcacagcttcatttttgtttcattcagtggtacttcagcagagttaatatgcttttctgatgaattacacaacagtttgttaattcttcattcttgtagtatttcatcacaagaaacctactcttctgtcatcttgaagtaaatagaagatcaagccttcaaatctcttaattttttcggtatttattaaatctgtgagtggtttaaggagcggtcagtgtgtataaagtgtgtttgaacattatgccaaatatcaagatgtgaaggactaattcaggatgcaaaaacgttattggggggttgtaaatatcaactattcaacagtttaggatgcaattacgagtgtaaactgtgtgccttatttacactttattgtctcccgcttctcagatagttttgatgtgttgtacagtggaatatcttagatactttttggaaagtatttacataagttatatcacaattaaaatgttgaattt

SEQ ID NO: 351621 - DNA, 2998 bp, Homo sapiens
accagtctggaaggtccccgggaggccgtacctccgagaggctcggcgttgagcccgggtagggccaggtggctgccctttcacctagggtagtccctggtcgcctccgctcttcgcccaaaaggggatgcagctccgggaaacaagtgaattcatggtattttacttttttgggaaatactggaaatgaagacctgcaactgtaatttgaaataaggaaaactttaattttcagtataaaaattgctcaaatagaattgcctgattttaatgacaaaagtatatgggagtccacatttatgtaagaaatgaaactataaaatgtataaataatttgcaaatcagaattgctgtcgaaagttttactataatgaaagatattttcatactctcaaaaatatagaggaaaggggccaagattatagtaccagtcacaatcttttgatgaggacgaaatgaatcaggtaacagactgggttgacccatcatttgatgattttctagagtgtagtggcgtctctactattactgccacatcattaggtgtgaataactcaagtcatagaagaaaaaatgggccttctacattagaaagcagcagatttccagcgagaaaaagaggaaatctatcttccttagaacagatttatggtttagaaaattcaaaagaatatctgtctgaaaatgaaccatgggtggataaatataaaccagaaactcagcatgaacttgctgtgcataaaaagaaaattgaagaagtcgaaacctggttaaaagctcaagttttagaaaggcaaccaaaacagggtggatctattttattaataacaggtcctcctggatgtggaaagacaacgaccttaaaaatactatcaaaggagcatggtattcaagtacaagagtggattaatccagttttaccagacttccaaaaagatgatttcaaggggatgtttaatactgaatcaagcttccatatgtttccctatcagtctcagatagcagttttcaaagagtttctactaagagcgacaaagtataacaagttacaaatgcttggagatgatctgagaactgataagaagataattctggttgaagatttacctaaccagttttatcgggattctcatactttacatgaagttctaaggaagtatgtgaggattggtcgatgtcctcttatatttataatctcggacagtctcagtggagataataatcaaaggttattgtttcccaaagaaattcaggaagagtgttctatctcaaatattagtttcaaccctgtggcaccaacaattatgatgaaatttcttaatcgaatagtgactatagaagctaacaagaatggaggaaaaattactgtccctgacaaaacttctctagagttgctctgtcagggatgttctggtgatatcagaagtgcaataaacagcctccagttttcttcttcaaaaggagaaaacaacttacggccaaggaaaaaaggaatgtctttaaaatcagatgctgtgctgtcaaaatcaaaacgaagaaaaaaacctgatagggtttttgaaaatcaagaggtccaagctattggtggcaaagatgtttctctgtttctcttcagagctttggggaaaattctatattgtaaaagagcatctttaacagaattagactcacctcggttgccctctcatttatcagaatatgaacgggatacattacttgttgaacctgaggaggtagtagaaatgtcacacatgcctggagacttatttaatttatatcttcaccaaaactacatagatttcttcatggaaattgatgatattgtgagagccagtgaatttctgagttttgcagatatcctcagtggtgactggaatacacgctctttactcagggaatatagcacatctatagctacgagaggtgtgatgcattccaacaaagcccgaggatatgctcattgccaaggaggaggatcaagttttcgacccttgcacaaacctcagtggtttctaataaataaaaagtatcgggaaaattgcctggcagcaaaagcactttttcctgacttctgcctaccagctttatgcctccaaactcagctattgccataccttgctctactaaccattccaatgagaaatcaagctcagatttcttttatccaagatattggaaggctccctctgaagcgacactttggaagattgaaaatggaagccctgactgacagggaacatggaatgatagaccctgacagcggagatgaagcccagcttaatggaggacattctgcagaggaatctctgggtgaacccactcaagccactgtgccggaaacctggtctcttcctttgagtcagaatagtgccagtgaactgcctgctagccagccccagcccttttcagcccaaggagacatggaagaaaacataataatagaagactacgagagtgatgggacatagaagccagcctgctaatcagattgctacttcacagcttcatttttgtttcattcagtggtacttcagcagagttaatatgcttttctgatgaattacacaacagtttgttaattcttcattcttgtagtatttcatcacaagaaacctactcttctgtcatcttgaagtaaatagaagatcaagccttcaaatctcttaattttttcggtatttattaaatctgtgagtggtttaaggagcggtcagtgtgtataaagtgtgtttgaacattatgccaaatatcaagatgtgaaggactaattcaggatgcaaaaacgttattggggggttgtaaatatcaactattcaacagtttaggatgcaattacgagtgtaaactgtgtgccttatttacactttattgtctcccgcttctcagatagttttgatgtgttgtacagtggaatatcttagatactttttggaaagtatttacataagttatatcacaattaaaatgttgaatttcacaacagacaaacacaacacaa

SEQ ID NO: 351622 - DNA, 2138 bp, Homo sapiens
aggagaattgcttgaacctgggaggtggaggttgcagtgagccaagattgcgccactgcactccagcctgggcgacagagcaagattccgtctcaaaacaaacaaaccaaacccttatcactgaagaatcaagcttccatatgtttccctatcagtctcagatagcagttttcaaagagtttctactaagagcgacaaagtataacaagttacaaatgcttggagatgatctgagaactgataagaagataattctggttgaagatttacctaaccagttttatcgggattctcatactttacatgaagttctaaggaagtatgtgaggattggtcgatgtcctcttatatttataatctcggacagtctcagtggagataataatcaaaggttattgtttcccaaagaaattcaggaagagtgttctatctcaaatattagtttcaaccctgtggcaccaacaattatgatgaaatttcttaatcgaatagtgactatagaagctaacaagaatggaggaaaaattactgtccctgacaaaacttctctagagttgctctgtcagggatgttctggtgatatcagaagtgcaataaacagcctccagttttcttcttcaaaaggagaaaacaacttacggccaaggaaaaaaggaatgtctttaaaatcagatgctgtgctgtcaaaatcaaaacgaagaaaaaaacctgatagggtttttgaaaatcaagaggtccaagctattggtggcaaagatgtttctctgtttctcttcagagctttggggaaaattctatattgtaaaagagcatctttaacagaattagactcacctcggttgccctctcatttatcagaatatgaacgggatacattacttgttgaacctgaggaggtagtagaaatgtcacacatgcctggagacttatttaatttatatcttcaccaaaactacatagatttcttcatggaaattgatgatattgtgagagccagtgaatttctgagttttgcagatatcctcagtggtgactggaatacacgctctttactcagggaatatagcacatctatagctacgagaggtgtgatgcattccaacaaagcccgaggatatgctcattgccaaggaggaggatcaagttttcgacccttgcacaaacctcagtggtttctaataaataaaaagtatcgggaaaattgcctggcagcaaaagcactttttcctgacttctgcctaccagctttatgcctccaaactcagctattgccataccttgctctactaaccattccaatgagaaatcaagctcagatttcttttatccaagatattggaaggctccctctgaagcgacactttggaagattgaaaatggaagccctgactgacagggaacatggaatgatagaccctgacagcggagatgaagcccagcttaatggaggacattctgcagaggaatctctgggtgaacccactcaagccactgtgccggaaacctggtctcttcctttgagtcagaatagtgccagtgaactgcctgctagccagccccagcccttttcagcccaaggagacatggaagaaaacataataatagaagactacgagagtgatgggacatagaagccagcctgctaatcagattgctacttcacagcttcatttttgtttcattcagtggtacttcagcagagttaatatgcttttctgatgaattacacaacagtttgttaattcttcattcttgtagtatttcatcacaagaaacctactcttctgtcatcttgaagtaaatagaagatcaagccttcaaatctcttaattttttcggtatttattaaatctgtgagtggtttaaggagcggtcagtgtgtataaagtgtgtttgaacattatgccaaatatcaagatgtgaaggactaattcaggatgcaaaaacgttattggggggttgtaaatatcaactattcaacagtttaggatgcaattacgagtgtaaactgtgtgccttatttacactttattgtctcccgcttctcagatagttttgatgtgttgtacagtggaatatcttagatactttttggaaagtatttacataagttatatcacaattaaaatgttgaattt

SEQ ID NO: 351623 - DNA, 1086 bp, Homo sapiens
accagtctggaaggtccccgggaggccgtacctccgagaggctcggcgttgagcccgggtagggccaggtggctgccctttcacctagggtagtccctggtcgcctccgctcttcgcccaaaaggggatgcagctccgggaaacaagtgaattcatggtattttacttttttgggaaatactggaaatgaagacctgcaactgtaatttgaaataaggaaaactttaattttcagtataaaaattgctcaaatagaattgcctgattttaatgacaaaagatattggaaggctccctctgaagcgacactttggaagattgaaaatggaagccctgactgacagggaacatggaatgatagaccctgacagcggagatgaagcccagcttaatggaggacattctgcagaggaatctctgggtgaacccactcaagccactgtgccggaaacctggtctcttcctttgagtcagaatagtgccagtgaactgcctgctagccagccccagcccttttcagcccaaggagacatggaagaaaacataataatagaagactacgagagtgatgggacatagaagccagcctgctaatcagattgctacttcacagcttcatttttgtttcattcagtggtacttcagcagagttaatatgcttttctgatgaattacacaacagtttgttaattcttcattcttgtagtatttcatcacaagaaacctactcttctgtcatcttgaagtaaatagaagatcaagccttcaaatctcttaattttttcggtatttattaaatctgtgagtggtttaaggagcggtcagtgtgtataaagtgtgtttgaacattatgccaaatatcaagatgtgaaggactaattcaggatgcaaaaacgttattggggggttgtaaatatcaactattcaacagtttaggatgcaattacgagtgtaaactgtgtgccttatttacactttattgtctcccgcttctcagatagttttgatgtgttgtacagtggaatatcttagatactttttggaaagtatttacataagttatatcacaattaaaatgttgaattt

SEQ ID NO: 351624 - DNA, 3000 bp, Homo sapiens
gcaacgcccgcgagggtcggctcccggggcgctgacaaccgcctcgtggccctcggccggcctctgaagagggcagtgaggggcccccacctgggcgcccgatgcccagagcactctgcgcccccagcctgccccagcccagtccctcccggccgcgcgccctgaccgcaagtgaattcatggtattttacttttttgggaaatactggaaatgaagacctgcaactgtaatttgaaataaggaaaactttaattttcagtataaaaattgctcaaatagaattgcctgattttaatgacaaaagtatatgggagtccacatttatgtaagaaatgaaactataaaatgtataaataatttgcaaatcagaattgctgtcgaaagttttactataatgaaagatattttcatactctcaaaaatatagaggaaaggggccaagattatagtaccagtcacaatcttttgatgaggacgaaatgaatcaggtaacagactgggttgacccatcatttgatgattttctagagtgtagtggcgtctctactattactgccacatcattaggtgtgaataactcaagtcatagaagaaaaaatgggccttctacattagaaagcagcagatttccagcgagaaaaagaggaaatctatcttccttagaacagatttatggtttagaaaattcaaaagaatatctgtctgaaaatgaaccatgggtggataaatataaaccagaaactcagcatgaacttgctgtgcataaaaagaaaattgaagaagtcgaaacctggttaaaagctcaagttttagaaaggcaaccaaaacagggtggatctattttattaataacaggtcctcctggatgtggaaagacaacgaccttaaaaatactatcaaaggagcatggtattcaagtacaagagtggattaatccagttttaccagacttccaaaaagatgatttcaaggggatgtttaatactgaatcaagcttccatatgtttccctatcagtctcagatagcagttttcaaagagtttctactaagagcgacaaagtataacaagttacaaatgcttggagatgatctgagaactgataagaagataattctggttgaagatttacctaaccagttttatcgggattctcatactttacatgaagttctaaggaagtatgtgaggattggtcgatgtcctcttatatttataatctcggacagtctcagtggagataataatcaaaggttattgtttcccaaagaaattcaggaagagtgttctatctcaaatattagtttcaaccctgtggcaccaacaattatgatgaaatttcttaatcgaatagtgactatagaagctaacaagaatggaggaaaaattactgtccctgacaaaacttctctagagttgctctgtcagggatgttctggtgatatcagaagtgcaataaacagcctccagttttcttcttcaaaaggagaaaacaacttacggccaaggaaaaaaggaatgtctttaaaatcagatgctgtgctgtcaaaatcaaaacgaagaaaaaaacctgatagggtttttgaaaatcaagaggtccaagctattggtggcaaagatgtttctctgtttctcttcagagctttggggaaaattctatattgtaaaagagcatctttaacagaattagactcacctcggttgccctctcatttatcagaatatgaacgggatacattacttgttgaacctgaggaggtagtagaaatgtcacacatgcctggagacttatttaatttatatcttcaccaaaactacatagatttcttcatggaaattgatgatattgtgagagccagtgaatttctgagttttgcagatatcctcagtggtgactggaatacacgctctttactcagggaatatagcacatctatagctacgagaggtgtgatgcattccaacaaagcccgaggatatgctcattgccaaggaggaggatcaagttttcgacccttgcacaaacctcagtggtttctaataaataaaaagtatcgggaaaattgcctggcagcaaaagcactttttcctgacttctgcctaccagctttatgcctccaaactcagctattgccataccttgctctactaaccattccaatgagaaatcaagctcagatttcttttatccaagatattggaaggctccctctgaagcgacactttggaagattgaaaatggaagccctgactgacagggaacatggaatgatagaccctgacagcggagatgaagcccagcttaatggaggacattctgcagaggaatctctgggtgaacccactcaagccactgtgccggaaacctggtctcttcctttgagtcagaatagtgccagtgaactgcctgctagccagccccagcccttttcagcccaaggagacatggaagaaaacataataatagaagactacgagagtgatgggacatagaagccagcctgctaatcagattgctacttcacagcttcatttttgtttcattcagtggtacttcagcagagttaatatgcttttctgatgaattacacaacagtttgttaattcttcattcttgtagtatttcatcacaagaaacctactcttctgtcatcttgaagtaaatagaagatcaagccttcaaatctcttaattttttcggtatttattaaatctgtgagtggtttaaggagcggtcagtgtgtataaagtgtgtttgaacattatgccaaatatcaagatgtgaaggactaattcaggatgcaaaaacgttattggggggttgtaaatatcaactattcaacagtttaggatgcaattacgagtgtaaactgtgtgccttatttacactttattgtctcccgcttctcagatagttttgatgtgttgtacagtggaatatcttagatactttttggaaagtatttacataagttatatcacaattaaaatgttgaattt

SEQ ID NO: 351625 - DNA, 3079 bp, Homo sapiens
accagtctggaaggtccccgggaggccgtacctccgagaggctcggcgttgagcccgggtagggccaggtggctgccctttcacctagggtagtccctggtcgcctccgctcttcgcccaaaaggggatgcagctccgggaaacaagtgaattcatggtattttacttttttgggaaatactggaaatgaagacctgcaactgtaatttgaaataaggaaaactttaattttcagtataaaaattgctcaaatagaattgcctgattttaatgacaaaaggtgaattatagtttaatgtactgcaagtcctaaactacggatgggaactattacagtttataatgtcaaaaacttttcttagaccaaaggtatcttccacaaagtatatgggagtccacatttatgtaagaaatgaaactataaaatgtataaataatttgcaaatcagaattgctgtcgaaagttttactataatgaaagatattttcatactctcaaaaatatagaggaaaggggccaagattatagtaccagtcacaatcttttgatgaggacgaaatgaatcaggtaacagactgggttgacccatcatttgatgattttctagagtgtagtggcgtctctactattactgccacatcattaggtgtgaataactcaagtcatagaagaaaaaatgggccttctacattagaaagcagcagatttccagcgagaaaaagaggaaatctatcttccttagaacagatttatggtttagaaaattcaaaagaatatctgtctgaaaatgaaccatgggtggataaatataaaccagaaactcagcatgaacttgctgtgcataaaaagaaaattgaagaagtcgaaacctggttaaaagctcaagttttagaaaggcaaccaaaacagggtggatctattttattaataacaggtcctcctggatgtggaaagacaacgaccttaaaaatactatcaaaggagcatggtattcaagtacaagagtggattaatccagttttaccagacttccaaaaagatgatttcaaggggatgtttaatactgaatcaagcttccatatgtttccctatcagtctcagatagcagttttcaaagagtttctactaagagcgacaaagtataacaagttacaaatgcttggagatgatctgagaactgataagaagataattctggttgaagatttacctaaccagttttatcgggattctcatactttacatgaagttctaaggaagtatgtgaggattggtcgatgtcctcttatatttataatctcggacagtctcagtggagataataatcaaaggttattgtttcccaaagaaattcaggaagagtgttctatctcaaatattagtttcaaccctgtggcaccaacaattatgatgaaatttcttaatcgaatagtgactatagaagctaacaagaatggaggaaaaattactgtccctgacaaaacttctctagagttgctctgtcagggatgttctggtgatatcagaagtgcaataaacagcctccagttttcttcttcaaaaggagaaaacaacttacggccaaggaaaaaaggaatgtctttaaaatcagatgctgtgctgtcaaaatcaaaacgaagaaaaaaacctgatagggtttttgaaaatcaagaggtccaagctattggtggcaaagatgtttctctgtttctcttcagagctttggggaaaattctatattgtaaaagagcatctttaacagaattagactcacctcggttgccctctcatttatcagaatatgaacgggatacattacttgttgaacctgaggaggtagtagaaatgtcacacatgcctggagacttatttaatttatatcttcaccaaaactacatagatttcttcatggaaattgatgatattgtgagagccagtgaatttctgagttttgcagatatcctcagtggtgactggaatacacgctctttactcagggaatatagcacatctatagctacgagaggtgtgatgcattccaacaaagcccgaggatatgctcattgccaaggaggaggatcaagttttcgacccttgcacaaacctcagtggtttctaataaataaaaagtatcgggaaaattgcctggcagcaaaagcactttttcctgacttctgcctaccagctttatgcctccaaactcagctattgccataccttgctctactaaccattccaatgagaaatcaagctcagatttcttttatccaagatattggaaggctccctctgaagcgacactttggaagattgaaaatggaagccctgactgacagggaacatggaatgatagaccctgacagcggagatgaagcccagcttaatggaggacattctgcagaggaatctctgggtgaacccactcaagccactgtgccggaaacctggtctcttcctttgagtcagaatagtgccagtgaactgcctgctagccagccccagcccttttcagcccaaggagacatggaagaaaacataataatagaagactacgagagtgatgggacatagaagccagcctgctaatcagattgctacttcacagcttcatttttgtttcattcagtggtacttcagcagagttaatatgcttttctgatgaattacacaacagtttgttaattcttcattcttgtagtatttcatcacaagaaacctactcttctgtcatcttgaagtaaatagaagatcaagccttcaaatctcttaattttttcggtatttattaaatctgtgagtggtttaaggagcggtcagtgtgtataaagtgtgtttgaacattatgccaaatatcaagatgtgaaggactaattcaggatgcaaaaacgttattggggggttgtaaatatcaactattcaacagtttaggatgcaattacgagtgtaaactgtgtgccttatttacactttattgtctcccgcttctcagatagttttgatgtgttgtacagtggaatatcttagatactttttggaaagtatttacataagttatatcacaattaaaatgttgaattt

SEQ ID NO: 351626 - DNA, 2975 bp, Homo sapiens
accagtctggaaggtccccgggaggccgtacctccgagaggctcggcgttgagcccgggtagggccaggtggctgccctttcacctagggtagtccctggtcgcctccgctcttcgcccaaaaggggatgcagctccgggaaacaagtgaattcatggtattttacttttttgggaaatactggaaatgaagacctgcaactgtaatttgaaataaggaaaactttaattttcagtataaaaattgctcaaatagaattgcctgattttaatgacaaaagtatatgggagtccacatttatgtaagaaatgaaactataaaatgtataaataatttgcaaatcagaattgctgtcgaaagttttactataatgaaagatattttcatactctcaaaaatatagaggaaaggggccaagattatagtaccagtcacaatcttttgatgaggacgaaatgaatcaggtaacagactgggttgacccatcatttgatgattttctagagtgtagtggcgtctctactattactgccacatcattaggtgtgaataactcaagtcatagaagaaaaaatgggccttctacattagaaagcagcagatttccagcgagaaaaagaggaaatctatcttccttagaacagatttatggtttagaaaattcaaaagaatatctgtctgaaaatgaaccatgggtggataaatataaaccagaaactcagcatgaacttgctgtgcataaaaagaaaattgaagaagtcgaaacctggttaaaagctcaagttttagaaaggcaaccaaaacagggtggatctattttattaataacaggtcctcctggatgtggaaagacaacgaccttaaaaatactatcaaaggagcatggtattcaagtacaagagtggattaatccagttttaccagacttccaaaaagatgatttcaaggggatgtttaatactgaatcaagcttccatatgtttccctatcagtctcagatagcagttttcaaagagtttctactaagagcgacaaagtataacaagttacaaatgcttggagatgatctgagaactgataagaagataattctggttgaagatttacctaaccagttttatcgggattctcatactttacatgaagttctaaggaagtatgtgaggattggtcgatgtcctcttatatttataatctcggacagtctcagtggagataataatcaaaggttattgtttcccaaagaaattcaggaagagtgttctatctcaaatattagtttcaaccctgtggcaccaacaattatgatgaaatttcttaatcgaatagtgactatagaagctaacaagaatggaggaaaaattactgtccctgacaaaacttctctagagttgctctgtcagggatgttctggtgatatcagaagtgcaataaacagcctccagttttcttcttcaaaaggagaaaacaacttacggccaaggaaaaaaggaatgtctttaaaatcagatgctgtgctgtcaaaatcaaaacgaagaaaaaaacctgatagggtttttgaaaatcaagaggtccaagctattggtggcaaagatgtttctctgtttctcttcagagctttggggaaaattctatattgtaaaagagcatctttaacagaattagactcacctcggttgccctctcatttatcagaatatgaacgggatacattacttgttgaacctgaggaggtagtagaaatgtcacacatgcctggagacttatttaatttatatcttcaccaaaactacatagatttcttcatggaaattgatgatattgtgagagccagtgaatttctgagttttgcagatatcctcagtggtgactggaatacacgctctttactcagggaatatagcacatctatagctacgagaggtgtgatgcattccaacaaagcccgaggatatgctcattgccaaggaggaggatcaagttttcgacccttgcacaaacctcagtggtttctaataaataaaaagtatcgggaaaattgcctggcagcaaaagcactttttcctgacttctgcctaccagctttatgcctccaaactcagctattgccataccttgctctactaaccattccaatgagaaatcaagctcagatttcttttatccaagatattggaaggctccctctgaagcgacactttggaagattgaaaatggaagccctgactgacagggaacatggaatgatagaccctgacagcggagatgaagcccagcttaatggaggacattctgcagaggaatctctgggtgaacccactcaagccactgtgccggaaacctggtctcttcctttgagtcagaatagtgccagtgaactgcctgctagccagccccagcccttttcagcccaaggagacatggaagaaaacataataatagaagactacgagagtgatgggacatagaagccagcctgctaatcagattgctacttcacagcttcatttttgtttcattcagtggtacttcagcagagttaatatgcttttctgatgaattacacaacagtttgttaattcttcattcttgtagtatttcatcacaagaaacctactcttctgtcatcttgaagtaaatagaagatcaagccttcaaatctcttaattttttcggtatttattaaatctgtgagtggtttaaggagcggtcagtgtgtataaagtgtgtttgaacattatgccaaatatcaagatgtgaaggactaattcaggatgcaaaaacgttattggggggttgtaaatatcaactattcaacagtttaggatgcaattacgagtgtaaactgtgtgccttatttacactttattgtctcccgcttctcagatagttttgatgtgttgtacagtggaatatcttagatactttttggaaagtatttacataagttatatcacaattaaaatgttgaattt

SEQ ID NO: 351627 - DNA, 3892 bp, Homo sapiens
accagtctggaaggtccccgggaggccgtacctccgagaggctcggcgttgagcccgggtagggccaggtggctgccctttcacctagggtagtccctggtcgcctccgctcttcgcccaaaaggggatgcagctccgggaaagtaaggccgccgcggttgcggctatattatgtatatgtcttagagacgcgagtctatctctgccttcaagctttcctgggctctcgtcgctcctcctcccgacccgcccatcccatctggggatgagaagattgagggtgcagagccctgtcctgcagcggggatttgcgagctcaacccggcaccccactgattacaggattacgttggacgaatatttgagcttagtattccctgttcactgtgtggggtggtggtgggtcggctaggaatagtcttgaaggtctacctctgacatctcatttcagtaacctcgcatcttcagggacagttatctgctttttaaaggaggtaattgtcaatcttgttttcaagagtgaatagagacctgaccgtgacaacagtctgcacctttttttgtttgtttgtttgtttttgttttgttttgagacggagtctcactcttgtcgcccaggctggagtgcaacctccgcctcctgggttcaagtgattctcctgccttagcctccagagtagctgggattacaggcgcccaccaccacgcccggctaatttttgcatttttaatagagacggggtttcaccatgttttggccaggctggtctcaaactcctgacctcagatgatccgcccgcctcgtcctcccacggtgctgggattacaggcatgagccaccgcgtccggcccctggtctgcatcttttatttcgagctacaaactatatttactcaaataggtgttttttttccacctgtataccttttgaaacgtcacagtctctaatcgtgaacgatttggggcggagggctgaacaatgtgttttctagtgtgtcgaggtgtttataggctatgtgtgcctccaaactgtaaagtagtccagtatactttccaatgtataagtttgtagaccttaaacttttcttctggctaacttaaaatcgttgaattcactagtttgcataaacatttaagaatttgaaaacacggttgaaaaacagtgttaccaagaaattttgtaataacatgttcaaatgaagacaaaaattttacagtttaagacttaaattcttcgtccacagcaagtgaattcatggtattttacttttttgggaaatactggaaatgaagacctgcaactgtaatttgaaataaggaaaactttaattttcagtataaaaattgctcaaatagaattgcctgattttaatgacaaaaggtaacagactgggttgacccatcatttgatgattttctagagtgtagtggcgtctctactattactgccacatcattaggtgtgaataactcaagtcatagaagaaaaaatgggccttctacattagaaagcagcagatttccagcgagaaaaagaggaaatctatcttccttagaacagatttatggtttagaaaattcaaaagaatatctgtctgaaaatgaaccatgggtggataaatataaaccagaaactcagcatgaacttgctgtgcataaaaagaaaattgaagaagtcgaaacctggttaaaagctcaagttttagaaaggcaaccaaaacagggtggatctattttattaataacaggtcctcctggatgtggaaagacaacgaccttaaaaatactatcaaaggagcatggtattcaagtacaagagtggattaatccagttttaccagacttccaaaaagatgatttcaaggggatgtttaatactgaatcaagcttccatatgtttccctatcagtctcagatagcagttttcaaagagtttctactaagagcgacaaagtataacaagttacaaatgcttggagatgatctgagaactgataagaagataattctggttgaagatttacctaaccagttttatcgggattctcatactttacatgaagttctaaggaagtatgtgaggattggtcgatgtcctcttatatttataatctcggacagtctcagtggagataataatcaaaggttattgtttcccaaagaaattcaggaagagtgttctatctcaaatattagtttcaaccctgtggcaccaacaattatgatgaaatttcttaatcgaatagtgactatagaagctaacaagaatggaggaaaaattactgtccctgacaaaacttctctagagttgctctgtcagggatgttctggtgatatcagaagtgcaataaacagcctccagttttcttcttcaaaaggagaaaacaacttacggccaaggaaaaaaggaatgtctttaaaatcagatgctgtgctgtcaaaatcaaaacgaagaaaaaaacctgatagggtttttgaaaatcaagaggtccaagctattggtggcaaagatgtttctctgtttctcttcagagctttggggaaaattctatattgtaaaagagcatctttaacagaattagactcacctcggttgccctctcatttatcagaatatgaacgggatacattacttgttgaacctgaggaggtagtagaaatgtcacacatgcctggagacttatttaatttatatcttcaccaaaactacatagatttcttcatggaaattgatgatattgtgagagccagtgaatttctgagttttgcagatatcctcagtggtgactggaatacacgctctttactcagggaatatagcacatctatagctacgagaggtgtgatgcattccaacaaagcccgaggatatgctcattgccaaggaggaggatcaagttttcgacccttgcacaaacctcagtggtttctaataaataaaaagtatcgggaaaattgcctggcagcaaaagcactttttcctgacttctgcctaccagctttatgcctccaaactcagctattgccataccttgctctactaaccattccaatgagaaatcaagctcagatttcttttatccaagatattggaaggctccctctgaagcgacactttggaagattgaaaatggaagccctgactgacagggaacatggaatgatagaccctgacagcggagatgaagcccagcttaatggaggacattctgcagaggaatctctgggtgaacccactcaagccactgtgccggaaacctggtctcttcctttgagtcagaatagtgccagtgaactgcctgctagccagccccagcccttttcagcccaaggagacatggaagaaaacataataatagaagactacgagagtgatgggacatagaagccagcctgctaatcagattgctacttcacagcttcatttttgtttcattcagtggtacttcagcagagttaatatgcttttctgatgaattacacaacagtttgttaattcttcattcttgtagtatttcatcacaagaaacctactcttctgtcatcttgaagtaaatagaagatcaagccttcaaatctcttaattttttcggtatttattaaatctgtgagtggtttaaggagcggtcagtgtgtataaagtgtgtttgaacattatgccaaatatcaagatgtgaaggactaattcaggatgcaaaaacgttattggggggttgtaaatatcaactattcaacagtttaggatgcaattacgagtgtaaactgtgtgccttatttacactttattgtctcccgcttctcagatagttttgatgtgttgtacagtggaatatcttagatactttttggaaagtatttacataagttatatcacaattaaaatgttgaattt

SEQ ID NO: 351628 - DNA, 3818 bp, Homo sapiens
accagtctggaaggtccccgggaggccgtacctccgagaggctcggcgttgagcccgggtagggccaggtggctgccctttcacctagggtagtccctggtcgcctccgctcttcgcccaaaaggggatgcagctccgggaaagtaaggccgccgcggttgcggctatattatgtatatgtcttagagacgcgagtctatctctgccttcaagctttcctgggctctcgtcgctcctcctcccgacccgcccatcccatctggggatgagaagattgagggtgcagagccctgtcctgcagcggggatttgcgagctcaacccggcaccccactgattacaggattacgttggacgaatatttgagcttagtattccctgttcactgtgtggggtggtggtgggtcggctaggaatagtcttgaaggtctacctctgacatctcatttcagtaacctcgcatcttcagggacagttatctgctttttaaaggaggtaattgtcaatcttgttttcaagagtgaatagagacctgaccgtgacaacagtctgcacctttttttgtttgtttgtttgtttttgttttgttttgagacggagtctcactcttgtcgcccaggctggagtgcaacctccgcctcctgggttcaagtgattctcctgccttagcctccagagtagctgggattacaggcgcccaccaccacgcccggctaatttttgcatttttaatagagacggggtttcaccatgttttggccaggctggtctcaaactcctgacctcagatgatccgcccgcctcgtcctcccacggtgctgggattacaggcatgagccaccgcgtccggcccctggtctgcatcttttatttcgagctacaaactatatttactcaaataggtgttttttttccacctgtataccttttgaaacgtcacagtctctaatcgtgaacgatttggggcggagggctgaacaatgtgttttctagtgtgtcgaggtgtttataggctatgtgtgcctccaaactgtaaagtagtccagtatactttccaatgtataagtttgtagaccttaaacttttcttctggctaacttaaaatcgttgaattcactagtttgcataaacatttaagaatttgaaaacacggttgaaaaacagtgttaccaagaaattttgtaataacatgttcaaatgaagacaaaaattttacagtttaagacttaaattcttcgtccacagcaagtgaattcatggtattttacttttttgggaaatactggaaatgaagacctgcaactgtaatttgaaataaggaaaactttaattttcagtataaaaattgctcaaatagaattgcctgattttaatgacaaaagtatatgggagtccacatttatgtaagaaatgaaactataaaatgtataaataatttgcaaatcagaattgctgtcgaaagttttactataatgaaagatattttcatactctcaaaaatatagaggaaaggggccaagattatagtaccagtcacaatcttttgatgaggacgaaatgaatcagcatgaacttgctgtgcataaaaagaaaattgaagaagtcgaaacctggttaaaagctcaagttttagaaaggcaaccaaaacagggtggatctattttattaataacaggtcctcctggatgtggaaagacaacgaccttaaaaatactatcaaaggagcatggtattcaagtacaagagtggattaatccagttttaccagacttccaaaaagatgatttcaaggggatgtttaatactgaatcaagcttccatatgtttccctatcagtctcagatagcagttttcaaagagtttctactaagagcgacaaagtataacaagttacaaatgcttggagatgatctgagaactgataagaagataattctggttgaagatttacctaaccagttttatcgggattctcatactttacatgaagttctaaggaagtatgtgaggattggtcgatgtcctcttatatttataatctcggacagtctcagtggagataataatcaaaggttattgtttcccaaagaaattcaggaagagtgttctatctcaaatattagtttcaaccctgtggcaccaacaattatgatgaaatttcttaatcgaatagtgactatagaagctaacaagaatggaggaaaaattactgtccctgacaaaacttctctagagttgctctgtcagggatgttctggtgatatcagaagtgcaataaacagcctccagttttcttcttcaaaaggagaaaacaacttacggccaaggaaaaaaggaatgtctttaaaatcagatgctgtgctgtcaaaatcaaaacgaagaaaaaaacctgatagggtttttgaaaatcaagaggtccaagctattggtggcaaagatgtttctctgtttctcttcagagctttggggaaaattctatattgtaaaagagcatctttaacagaattagactcacctcggttgccctctcatttatcagaatatgaacgggatacattacttgttgaacctgaggaggtagtagaaatgtcacacatgcctggagacttatttaatttatatcttcaccaaaactacatagatttcttcatggaaattgatgatattgtgagagccagtgaatttctgagttttgcagatatcctcagtggtgactggaatacacgctctttactcagggaatatagcacatctatagctacgagaggtgtgatgcattccaacaaagcccgaggatatgctcattgccaaggaggaggatcaagttttcgacccttgcacaaacctcagtggtttctaataaataaaaagtatcgggaaaattgcctggcagcaaaagcactttttcctgacttctgcctaccagctttatgcctccaaactcagctattgccataccttgctctactaaccattccaatgagaaatcaagctcagatttcttttatccaagatattggaaggctccctctgaagcgacactttggaagattgaaaatggaagccctgactgacagggaacatggaatgatagaccctgacagcggagatgaagcccagcttaatggaggacattctgcagaggaatctctgggtgaacccactcaagccactgtgccggaaacctggtctcttcctttgagtcagaatagtgccagtgaactgcctgctagccagccccagcccttttcagcccaaggagacatggaagaaaacataataatagaagactacgagagtgatgggacatagaagccagcctgctaatcagattgctacttcacagcttcatttttgtttcattcagtggtacttcagcagagttaatatgcttttctgatgaattacacaacagtttgttaattcttcattcttgtagtatttcatcacaagaaacctactcttctgtcatcttgaagtaaatagaagatcaagccttcaaatctcttaattttttcggtatttattaaatctgtgagtggtttaaggagcggtcagtgtgtataaagtgtgtttgaacattatgccaaatatcaagatgtgaaggactaattcaggatgcaaaaacgttattggggggttgtaaatatcaactattcaacagtttaggatgcaattacgagtgtaaactgtgtgccttatttacactttattgtctcccgcttctcagatagttttgatgtgttgtacagtggaatatcttagatactttttggaaagtatttacataagttatatcacaattaaaatgttgaattt

SEQ ID NO: 351629 - DNA, 3636 bp, Homo sapiens
accagtctggaaggtccccgggaggccgtacctccgagaggctcggcgttgagcccgggtagggccaggtggctgccctttcacctagggtagtccctggtcgcctccgctcttcgcccaaaaggggatgcagctccgggaaagtaaggccgccgcggttgcggctatattatgtatatgtcttagagacgcgagtctatctctgccttcaagctttcctgggctctcgtcgctcctcctcccgacccgcccatcccatctggggatgagaagattgagggtgcagagccctgtcctgcagcggggatttgcgagctcaacccggcaccccactgattacaggattacgttggacgaatatttgagcttagtattccctgttcactgtgtggggtggtggtgggtcggctaggaatagtcttgaaggtctacctctgacatctcatttcagtaacctcgcatcttcagggacagttatctgctttttaaaggaggtaattgtcaatcttgttttcaagagtgaatagagacctgaccgtgacaacagtctgcacctttttttgtttgtttgtttgtttttgttttgttttgagacggagtctcactcttgtcgcccaggctggagtgcaacctccgcctcctgggttcaagtgattctcctgccttagcctccagagtagctgggattacaggcgcccaccaccacgcccggctaatttttgcatttttaatagagacggggtttcaccatgttttggccaggctggtctcaaactcctgacctcagatgatccgcccgcctcgtcctcccacggtgctgggattacaggcatgagccaccgcgtccggcccctggtctgcatcttttatttcgagctacaaactatatttactcaaataggtgttttttttccacctgtataccttttgaaacgtcacagtctctaatcgtgaacgatttggggcggagggctgaacaatgtgttttctagtgtgtcgaggtgtttataggctatgtgtgcctccaaactgtaaagtagtccagtatactttccaatgtataagtttgtagaccttaaacttttcttctggctaacttaaaatcgttgaattcactagtttgcataaacatttaagaatttgaaaacacggttgaaaaacagtgttaccaagaaattttgtaataacatgttcaaatgaagacaaaaattttacagtttaagacttaaattcttcgtccacagcaagtgaattcatggtattttacttttttgggaaatactggaaatgaagacctgcaactgtaatttgaaataaggaaaactttaattttcagtataaaaattgctcaaatagaattgcctgattttaatgacaaaaggtaacagactgggttgacccatcatttgatgattttctagagtgtagtggcgtctctactattactgccacatcattaggtgtgaataactcaagtcatagaagaaaaaatgggccttctacattagaaagcagcagatttccagcgagaaaaagaggaaatctatcttccttagaacagatttatggtttagaaaattcaaaagaatatctgtctgaaaatgaaccatgggtggataaatataaaccagaaactcagcatgaacttgctgtgcataaaaagaaaattgaagaagtcgaaacctggttaaaagctcaagttttagaaaggcaaccaaaacagggtggatctattttattaataacaggtcctcctggatgtggaaagacaacgaccttaaaaatactatcaaaggagcatggtattcaagtacaagagtggattaatccagttttaccagacttccaaaaagatgatttcaaggggatgtttaatactgaatcaagcttccatatgtttccctatcagtctcagatagcagttttcaaagagtttctactaagagcgacaaagtataacaagttacaaatgcttggagatgatctgagaactgataagaagataattctggttgaagatttacctaaccagttttatcgggattctcatactttacatgaagttctaaggaagtatgtgaggattggtcgatgtcctcttatatttataatctcggacagtctcagtggagataataatcaaaggttattgtttcccaaagaaattcaggaagagtgttctatctcaaatattagtttcaaccctgtggcaccaacaattatgatgaaatttcttaatcgaatagtgactatagaagctaacaagaatggaggaaaaattactgtccctgacaaaacttctctagagttgctctgtcagggatgttctggtgatatcagaagtgcaataaacagcctccagttttcttcttcaaaaggagaaaacaacttacggccaaggaaaaaaggaatgtctttaaaatcagatgctgtgctgtcaaaatcaaaacgaagaaaaaaacctgatagggtttttgaaaatcaagaggtccaagctattggtggcaaagatgtttctctgtttctcttcagagctttggggaaaattctatattgtaaaagagcatctttaacagaattagactcacctcggttgccctctcatttatcagaatatgaacgggatacattacttgttgaacctgaggaggtagtagaaatgtcacacatgcctggagacttatttaatttatatcttcaccaaaactacatagatttcttcatggaaattgatgatattgtgagagccagtgaatttctgagttttgcagatatcctcagtggtgactggaatacacgctctttactcagggaatatagcacatctatagctacgagaggtgtgatgcattccaacaaagcccgaggatatgctcattgccaaggaggaggatcaagttttcgacccttgcacaaacctcagtggtttctaataaataaaaagtatcgggaaaattgcctggcagcaaaagcactttttcctgacttctgcctaccagctttatgcctccaaactcagctattgccataccttgctctactaaccattccaatgagaaatcaagctcagatttcttttatccaagatattggaaggctccctctgaagcgacactttggaagattgaaaatggaagccctgactgacagggaacatggaatgatagaccctgacagcggagatgaagcccagcttaatggaggacattctgcagaggaatctctgggtgaacccactcaagccactgtgccggaaacctggtctcttcctttgagtcagaatagtgccagtgaactgcctgctagccagccccagcccttttcagcccaaggagacatggaagaaaacataataatagaagactacgagagtgatgggacatagaagccagcctgctaatcagattgctacttcacagcttcatttttgtttcattcagtggtacttcagcagagttaatatgcttttctgatgaattacacaacagtttgttaattcttcattcttgtagtatttcatcacaagaaacctactcttctgtcatcttgaagtaaatagaagatcaagccttcaaatctctcttttccttcgcttttctgggcctgccgtgctccgggcatcactgctccatagct

SEQ ID NO: 351630 - DNA, 758 bp, Homo sapiens
aaatacattacaggttttgcaaaagcagaaacttcaacacaggaaaacttttaaagtaaatagactagcgcggcacttacctctctctaatggtgggataaagaccctgccagtttggggccgggataaggttgttgttactgagattctgctggtggtactgctggacgctggtgctgctggagttggctggctttttacgggggaatatatcagcagccatcttcttctttttagtcttcaaggtaattatttcataacaaactggtggcaacttgctgctgttgctactgctgctgctggtatttgctttctttgagcttttcttggacctgttctttaccgtctctggaagcatcaagaagaaggtatggcaactggtgtcagaagtataaggggtttgtgaaaattccacagtaaagaagtggggcaacacctggactacgaggcggatctcctggcttgtcatgttgtttgcttcattcactctaatattcactcacagtaattacctcacacacttacagaatgctcaattgtcatatttctaatctactttaaaagaagagctttcttttaaagtttacaaagatgaaaaccatgaacatatgtagtctgcacccctgtaggggcacactacaggcaagaatgctgaaaggatacttgtggaatgagatggaaggaaggaactgcagtgaggacgctgctcaaaaacagaagaggctctccaggtacttgaaaatagtctatccaaagaa

SEQ ID NO: 351631 - DNA, 517 bp, Homo sapiens
  misc_feature (9)..(9): n is a, c, g, or t
  misc_feature (12)..(12): n is a, c, g, or t
  misc_feature (14)..(15): n is a, c, g, or t
attcgcggncgngnngacgaaaaagagttgcatttaatacaatctgacatattcactttgcagacctgaatgaggtttgaaactgaacgggactccagaaatcatttaatgcaactctttttcacaggtatggcaactggtgtcagaagtataaggggtttgtgaaaattccacagtaaagaagtggggcaacacctggactacgaggcggatctcctggcttgtcatgttgtttgcttcattcactctaatattcactcacagtaattacctcacacacttacagaatgctcaattgtcatatttctaatctactttaaaagaagagctttcttttaaagtttacaaagatgaaaaccatgaacatatgtagtctgcacccctgtaggggcacactacaggcaagaatgctgaaaggatacttgtggaatgagatggaaggaaggaactgcagtgaggacgctgctcaaaaacagaagaggctctccaggtacttgaaaatagtctatccaaagaa

SEQ ID NO: 351632 - DNA, 326 bp, Homo sapiens
tgtgattaaaccctaagtctacaagaaaaacattaaattgtgttcaaaactatctgttagaaaggaagaagtactgccttttggtaaaaaggacccttgatcctttttagagctggaaaagaaccttaaaagttacttggtctaaccaccttaatttacaggtgaggaaactgagtctcaaagaggttaattgatttgtccaaagtcatacagctgcccattggaaaaactgctgggactggaatctcagagtcccaattcctggtttagtcatgttcctacttctgactaaaaagcacaaatgttagtactatgaaaaactcatt

SEQ ID NO: 351633 - DNA, 600 bp, Homo sapiens
agatcctacaagacactccagtgcatttggcctgagtgttgcaggccagggcaggtgtgcaggtgcaggtgtgcgtgctgcaaacaggcagatgtgagatgtaggggattttcctatttcagattacaaagctggaacagaggtgagacagaccaccgatgagagcttcaacaatcccagcacctaccagaaagctaattacctaaagcaaagcagctgacaaatgggctagacttgaggaccgcacattcgtttaaatgtagagaaaagaagggtaggcacttatggcctgtgaccctaaaacaggataaactctagagggaatagtcggttctgcaagaagaaatgaatcgtgactaattccagagaggtggcaacagggacggatctaaaggagctattgtgtttcccatgacatgttctgtttagaaaaggacaagtacaaagatagaaggaagggcacagtaccaaggacaagctgagaagagtgacacatttctgtgagaacagtgcccgacttgagctgaggcttgcaaaaaaattgctaaagttggcaagaaaaaaaaaaggtggtggtgaattatttttagttatgattaa

SEQ ID NO: 351634 - DNA, 797 bp, Homo sapiens
tgctgggattacaggcgtgagccaccaggcccggctgtctgtggtttttctttctggaatttctgttactcagatggtggacccagaattacctctcctccctgtgtgccccaaccccaattttcttttcttttgatcataatttatggaggattactccaagttgattctctgattgttcctttatatacgtagatatatagggacagtaccttgttccttgttgcaacatctttgaggatattaatatgctctgtagaagctttcatctccctgcatatgtctttctgctttctgttcttcaatttaatctttcatgttacagactttctttagctgcctggcaatcgttggtaatcttgcttatatttaagagtggagtattaaaaagaatatgtgattgtaaggtgatctcattgagcttctttggggaaatccccagtgtccatacttctagaactttgctccaggctggacaggttctcttggagaaacttttggtttcacatcaggagggtttactctgagctgctggattgagagctctgttggggaagagggtgagaatttcagcattctagtatgtccacattcagttccttcatccaggtctctgggagggctcctagtccagaaaccttctaaccccctctggagaataagcttccaacttttttgccaagattggggaagtcaggtcatgtggaaatatgaatgtttcagcatgcttttgctttttttctttgaaaatatattactttaaaatgaaaaaaaaaaaactcgtgccgaattcttgg

SEQ ID NO: 351635 - DNA, 451 bp, Homo sapiens
gggctcctagtccagaaaccttctaaccccctctggagaataagcttccaacttttttgccaagattggggaagtcaggtcatgtggaaatatgaatgtttcagcatgcttttgctttttttctttgaaaatatattactttaaaatgaagaataagactgggggtggtggcttatgcctgtaatcccagcactttgggaggctgaggtgggcagatcacctgaagtcaggcattcaagaccagcctggccaacatgacaaaaccgtgtctctactaaaaatacaaaaattagctgggtgtggtggcacatgcctgtaatctcagttactggggaggctgaggcaggagaatcgcttgaacccaggaggtggaggttgcattgagctgagatcgcaccactgcacaccagcctgggcaacagagcgggactctgtctcaaaaagaaaaaaa

SEQ ID NO: 351636 - DNA, 719 bp, Homo sapiens
tgctgggattacaggcgtgagccaccaggcccggctgtctgtggtttttctttctggaatttctgttactcagatggtggacccagaattacctctcctccctgtgtgccccaaccccaattttcttttcttttgatcataatttatggaggattactccaagttgattctctgattgttcctttatatacgtagatatatagggacagtaccttgttccttgttgcaacatctttgaggatattaatatgctctgtagaagctttcatctccctgcatatgtctttctgctttctgttcttcaatttaatctttcatgttacagactttctttagctgcctggcaatcgttggtaatcttgcttatatttaagagtggagtattaaaaagaatatgtgattgtaaaacaaaaaacaaaaaaacaacaaaaaaaaaaaaaaaaaaagagggggggccgcgccccaaaaattcccccgccggggggccccagttttgcgcgcgttccccggttttcttgcgttcccccggtgtggtcgcccctagtagtgggagcgcgcggtgtaataagagcaagaggacgcagggcgccggcacgttgttcacaccaccgttcgtggcccggggaacaaccgtgcctgcccctgggggacccctggggcgaaaggaacccttatccttccgggggggggggccccactatgtgcgcccacctttacca

SEQ ID NO: 351637 - DNA, 715 bp, Homo sapiens
cacagtatcaacagtggtgatgagagctaccgttgactttgccatattttgcagagcggtgaagacactagctttggagaagtacaatggcaaggtcgcacagctggaaagaaacagaattgggatttgaaccaggtcccgtctccgctgcgtgtagcaccctgctttgtaggcacttagtaaacgtctgtttgatggatttctgaccatcagagtgacccagatttcaacccaagtatttgccagagtctcataggagtgccctggggctggaagatatgtcgttgtagaaggcaggatcacacctggtagaagcagagcccagcgaccctgtcccgggtctgctgaaccaggcctctgcccaggacctttggaggagcatctgggtgtggctggactaggcgaggaatgtgcttatttattctcagcataaagccagaaggcaagaccctgggtaggtctgtccgatgagcttcccttgtcctctgtggtaaccctgaggctctgtgacctagctgagggccctctgtggcccacctcaccttgtctctccagcctcacctcgaagcttccagccacaccctagcgtgcctccagccttcaggcctttgttctttctgcccagagtattacttcttgccttacccctttcttccccgtgcatccttctagattccatttcagcttccctgagggcacgttgggctcactcttc

SEQ ID NO: 351638 - DNA, 1135 bp, Homo sapiens
gtttggtaagttccgtttttagccccggcctttttctagccaggctctcaactgtctcctgcgttgctgggaagttctggaaggaagcatgtgctccagaggttgggattcgtgtctggctctggaattgctactgctgcctctgtcactcctggtgaccagcattcaaggtcacttggtacatatgaccgtggtctccggcagcaacgtgactctgaacatctctgagagcctgcctgagaactacaaacaactaacctggttttatactttcgaccagaagattgtagaatgggattccagaaaatctaagtactttgaatccaaatttaaaggcagggtcagacttgatcctcagagtggcgcactgtacatctctaaggtccagaaagaggacaacagcacctacatcatgagggtgttgaaaaagactgggaatgagcaagaatggaagatcaagctgcaagtgcttgaccctgtacccaagcctgtcatcaaaattgagaagatagaagacatggatgacaactgttatctgaaactgtcatgtgtgatacctggcgagtctgtaaactacacctggtatggggacaaaaggcccttcccaaaggagctccagaacagtgtgcttgaaaccacccttatgccacataattactccaggtgttatacttgccaagtcagcaattctgtgagcagcaagaatggcacggtctgcctcagtccaccctgtaccctggcccggtcctttggagtagaatggattgcaagttggctagtggtcacggtgcccaccattcttggcctgttacttacctgagatgagctcttttaactcaagcgaaacttcaaggccagaagatcttgcctgttggtgatcatgctcctcaccaggacagagactgtataggctgaccagaagcatgctgctgaattatcaacgaggattttcaagttaacttttaaatactggttattatttaattttatatccctttgttgttttctagtacacagagatatagagatacacatgcttttttcccacccaaaattgtgacaacattatgtgaatgttttattattttttaaaataaacatttgatataattatcaattaactgaaaaaaaaaag

SEQ ID NO: 351639 - DNA, 1101 bp, Homo sapiens
agagatatgacttgtcatcagtttatttgaaagtctactggtatgagagtaagggagagagccaggcccaacctcagttggccttactcaattctttcattttctggggacagtactagattaattataagcagcatccccttcccccatgcccacttttcaagcttcaacttttcttgagttcctaagcaggagacctggacctccagtgaaaaccatactcactgctcctaagcagaaatcccttccttctcacctgttccaccagcccaggctataccctgggcctgtcagcaacactgcctcctctagcgcaggtctcactctgaatctcattggcaggtcacttggtacatatgaccgtggtctccggcagcaacgtgactctgaacatctctgagagcctgcctgagaactacaaacaactaacctggttttatactttcgaccagaagattgtagaatgggattccagaaaatctaagtactttgaatccaaatttaaaggcagggtcagacttgatcctcagagtggcgcactgtacatctctaaggtccagaaagaggacaacagcacctacatcatgagggtgttgaaaaagactgggaatgagcaagaatggaagatcaagctgcaagtgcttggtgagtcaggggagccaaagagcaaatccccactccagtggccccagatggaccactgtagggcttcctgggaggcatggggcactctcggggaggaggagagaaaaacctcaggacaggtttgattcatttttccttgatccaattctatttgggagtgagcctaggtcaacagatatccaaattaacaatcttaggacatttaacacctcttctgaagttagtgagtctaagctttgaagagaaggaaaactagagatttttcctatttccttcattttgtcctgtgatcaacctaaatcagctcagctcatcttgattatatctccgaaattaggcttcattggacttaagaaaaaagagaatgtattaatataaagaatggggcaggagttatcaggagaatttttcaactttcataatgggcaggacaaaaaaacttccactcatagctcc

SEQ ID NO: 351640 - DNA, 1082 bp, Homo sapiens
gtttggtaagttccgtttttagccccggcctttttctagccaggctctcaactgtctcctgcgttgctgggaagttctggaaggaagcatgtgctccagaggttgggattcgtgtctggctctggaattgctactgctgcctctgtcactcctggtgaccagcattcaaggtcacttggtacatatgaccgtggtctccggcagcaacgtgactctgaacatctctgagagcctgcctgagaactacaaacaactaacctggttttatactttcgaccagaagattgtagaatgggattccagaaaatctaagtactttgaatccaaatttaaaggcagggtcagacttgatcctcagagtggcgcactgtacatctctaaggtccagaaagaggacaacagcacctacatcatgagggtgttgaaaaagactgggaatgagcaagaatggaagatcaagctgcaagtgcttgaactgttatctgaaactgtcatgtgtgatacctggcgagtctgtaaactacacctggtatggggacaaaaggcccttcccaaaggagctccagaacagtgtgcttgaaaccacccttatgccacataattactccaggtgttatacttgccaagtcagcaattctgtgagcagcaagaatggcacggtctgcctcagtccaccctgtaccctggcccggtcctttggagtagaatggattgcaagttggctagtggtcacggtgcccaccattcttggcctgttacttacctgagatgagctcttttaactcaagcgaaacttcaaggccagaagatcttgcctgttggtgatcatgctcctcaccaggacagagactgtataggctgaccagaagcatgctgctgaattatcaacgaggattttcaagttaacttttaaatactggttattatttaattttatatccctttgttgttttctagtacacagagatatagagatacacatgcttttttcccacccaaaattgtgacaacattatgtgaatgttttattattttttaaaataaacatttgatataattatcaattaactgaaaaaaaaaag

SEQ ID NO: 351641 - DNA, 929 bp, Homo sapiens
gtttggtaagttccgtttttagccccggcctttttctagccaggctctcaactgtctcctgcgttgctgggaagttctggaaggaagcatgtgctccagaggttgggattcgtgtctggctctggaattgctactgctgcctctgtcactcctggtgaccagcattcaaggtcacttggtacatatgaccgtggtctccggcagcaacgtgactctgaacatctctgagagcctgcctgagaactacaaacaactaacctggttttatactttcgaccagaagattgtagaatgggattccagaaaatctaagtactttgaatccaaatttaaaggcagggtcagacttgatcctcagagtggcgcactgtacatctctaaggtccagaaagaggacaacagcacctacatcatgagggtgttgaaaaagactgggaatgagcaagaatggaagatcaagctgcaagtgcttggtgagtcaggggagccaaagagcaaatccccactccagtggccccagatggaccactgtagggcttcctgggaggcatggggcactctcggggaggaggagagaaaaacctcaggacaggtttgattcatttttccttgatccaattctatttgggagtgagcctaggtcaacagatatccaaattaacaatcttaggacatttaacacctcttctgaagttagtgagtctaagctttgaagagaaggaaaactagagatttttcctatttccttcattttgtcctgtgatcaacctaaatcagctcagctcatcttgattatatctccgaaattaggcttcattggacttaagaaaaaagagaatgtattaatataaagaatggggcaggagttatcaggagaatttttcaactttcataatgggcaggacaaaaaaacttccactcatagctcc

SEQ ID NO: 351642 - DNA, 507 bp, Homo sapiens
taatttccctgctctgtgagctcccacaccagtgtccagtacacttgccccttctcaatacattagtcaagataaagatacctaagcatatagggttttcttgctctttcagcccggtcctttggagtagaatggattgcaagttggctagtggtcacggtgcccaccattcttggcctgttacttacctgagatgagctcttttaactcaagcgaaacttcaaggccagaagatcttgcctgttggtgatcatgctcctcaccaggacagagactgtataggctgaccagaagcatgctgctgaattatcaacgaggattttcaagttaacttttaaatactggttattatttaattttatatccctttgttgttttctagtacacagagatatagagatacacatgcttttttcccacccaaaattgtgacaacattatgtgaatgttttattattttttaaaataaacatttgatataattatcaattaactgaaaaaaaaaag

SEQ ID NO: 351643 - DNA, 994 bp, Homo sapiens
  misc_feature (885)..(885): n is a, c, g, or t
  misc_feature (894)..(894): n is a, c, g, or t
gtttggtaagttccgtttttagccccggcctttttctagccaggctctcaactgtctcctgcgttgctgggaagttctggaaggaagcatgtgctccagaggttgggattcgtgtctggctctggaattgctactgctgcctctgtcactcctggtgaccagcattcaaggtcacttggtacatatgaccgtggtctccggcagcaacgtgactctgaacatctctgagagcctgcctgagaactacaaacaactaacctggttttatactttcgaccagaagattgtagaatgggattccagaaaatctaagtactttgaatccaaatttaaaggcagggtcagacttgatcctcagagtggcgcactgtacatctctaaggtccagaaagaggacaacagcacctacatcatgagggtgttgaaaaagactgggaatgagcaagaatggaagatcaagctgcaagtgcttgaccctgtacccaagcctgtcatcaaaattgagaagatagaagacatggatgacaactgttatctgaaactgtcatgtgtgatacctggcgagtctgtaaactacacctggtatggggacaaaaggcccttcccaaaggagctccagaacagtgtgcttgaaaccacccttatgccacataattactccaggtgttatacttgccaagtcagcaattctgtgagcagcaagaatggcacggtctgcctcagtccaccctgtaccctggcccggtcctttggagtagaatggattgcaagttggctagtggtcacggtgcccaccattcttggcctgttacttacctgagatgagctcttttaactcaagcgaaacttcaaggccaaaattgccggtggggtcatgcccaccgncgagtttgnggccaccgcctgtgtttcgggtcgcatccacgcgttttccctcggtacaaattagttccccgcgattttttttcatttcaagggggggcttctctagctg

SEQ ID NO: 351644 - DNA, 1307 bp, Homo sapiens
agagatatgacttgtcatcagtttatttgaaagtctactggtatgagagtaagggagagagccaggcccaacctcagttggccttactcaattctttcattttctggggacagtactagattaattataagcagcatccccttcccccatgcccacttttcaagcttcaacttttcttgagttcctaagcaggagacctggacctccagtgaaaaccatactcactgctcctaagcagaaatcccttccttctcacctgttccaccagcccaggctataccctgggcctgtcagcaacactgcctcctctagcgcaggtctcactctgaatctcattggcaggtcacttggtacatatgaccgtggtctccggcagcaacgtgactctgaacatctctgagagcctgcctgagaactacaaacaactaacctggttttatactttcgaccagaagattgtagaatgggattccagaaaatctaagtactttgaatccaaatttaaaggcagggtcagacttgatcctcagagtggcgcactgtacatctctaaggtccagaaagaggacaacagcacctacatcatgagggtgttgaaaaagactgggaatgagcaagaatggaagatcaagctgcaagtgcttgaccctgtacccaagcctgtcatcaaaattgagaagatagaagacatggatgacaactgttatctgaaactgtcatgtgtgatacctggcgagtctgtaaactacacctggtatggggacaaaaggcccttcccaaaggagctccagaacagtgtgcttgaaaccacccttatgccacataattactccaggtgttatacttgccaagtcagcaattctgtgagcagcaagaatggcacggtctgcctcagtccaccctgtaccctggcccggtcctttggagtagaatggattgcaagttggctagtggtcacggtgcccaccattcttggcctgttacttacctgagatgagctcttttaactcaagcgaaacttcaaggccagaagatcttgcctgttggtgatcatgctcctcaccaggacagagactgtataggctgaccagaagcatgctgctgaattatcaacgaggattttcaagttaacttttaaatactggttattatttaattttatatccctttgttgttttctagtacacagagatatagagatacacatgcttttttcccacccaaaattgtgacaacattatgtgaatgttttattattttttaaaataaacatttgatataattatcaattaactgaaaaaaaaaag

SEQ ID NO: 351645 - DNA, 1081 bp, Homo sapiens
gtttggtaagttccgtttttagccccggcctttttctagccaggctctcaactgtctcctgcgttgctgggaagttctggaaggaagcatgtgctccagaggttgggattcgtgtctggctctggaattgctactgctgcctctgtcactcctggtgaccagcattcaaggtcacttggtacatatgaccgtggtctccggcagcaacgtgactctgaacatctctgagagcctgcctgagaactacaaacaactaacctggttttatactttcgaccagaagattgtagaatgggattccagaaaatctaagtactttgaatccaaatttaaaggcagggtcagacttgatcctcagagtggcgcactgtacatctctaaggtccagaaagaggacaacagcacctacatcatgagggtgttgaaaaagactgggaatgagcaagaatggaagatcaagctgcaagtgcttgaccctgtacccaagcctgtcatcaaaattgagaagatagaagacatggatgacaactgttatctgaaactgtcatgtgtgatacctggcgagtctgtaaactacacctggtatggggacccacataattactccaggtgttatacttgccaagtcagcaattctgtgagcagcaagaatggcacggtctgcctcagtccaccctgtaccctggcccggtcctttggagtagaatggattgcaagttggctagtggtcacggtgcccaccattcttggcctgttacttacctgagatgagctcttttaactcaagcgaaacttcaaggccagaagatcttgcctgttggtgatcatgctcctcaccaggacagagactgtataggctgaccagaagcatgctgctgaattatcaacgaggattttcaagttaacttttaaatactggttattatttaattttatatccctttgttgttttctagtacacagagatatagagatacacatgcttttttcccacccaaaattgtgacaacattatgtgaatgttttattattttttaaaataaacatttgatataattatcaattaactgaaaaaaaaaag

SEQ ID NO: 351646 - DNA, 640 bp, Homo sapiens
cagactcacatgtttgagctgaacatgctggaagtgtgggccagacggcaccgcttctgggctccggtgcatgaaacaaacaagaaccaagaactgggataaggagtgctgaaacccgcaaggacaggagctggggagatgggaggccgcctgcgggaatgaaagcacaagagaacgagggccatggggttgggggcggcacaagtgctcaggtccttccagccgcttccctcatacagatgccacttccatccctcagacgtttaaggagtgtgcactgtgagccacgcactgtgacaagcaccatgtcgtgccagcaggtgactgcacttgctgtagctccagggtcatgtgctgtgtcagggctctttgatccctgtgtccctttaaaacgacatgatcttcatgggcagtgtttgttctcttggcccctctcagagccaaatgctgtgctcgtgagggcggtgctggttggcaggggatgggcacagagaaatcaggtggccagggcagctggaggagggacctggagccgaacaaggggagctgggaccacgagcaacccaggtgacatcctggactctgtcaaagataagcaaagcaggacgctaattaaagcagtcaaaacattttattcagt

SEQ ID NO: 351647 - DNA, 1910 bp, Homo sapiens
cccgcccatctccgctggttcccggaagccgccgcggacaagctctcccgggcgcgggcgggggtcgtgtgcttggaggaagccgcggaacccccagcgtccgtccatggcgtggagccttgggagctggctgggtggctgcctgctggtgtcagcattgggaatggtaccacctcccgctgcttttgccaaagggaacctgactttcacagctcagtacctaagttataggatattccaagataaatgcatgaatactaccttgacggaatgtgatttctcaagtctttccaagtatggtgaccacaccttgagagtcagggctgaatttgcagatgagcattcagactgggtaaacatcaccttctgtcctgtggatgacaccattattggaccccctggaatgcaagtagaagtacttgctgattctttacatatgcgtttcttagcccctaaaattgagaatgaatacgaaacttggactatgaagaatgtgtataactcatggacttataatgtgcaatactggaaaaacggtactgatgaaaagtttcaaattactccccagtatgactttgaggtcctcagaaacctggagccatggacaacttattgtgttcaagttcgagggtttcttcctgatcggaacaaagctggggaatggagtgagcctgtctgtgagcaaacaacccatgacgaaacggtcccctcctggatggtggccgtcatcctcatggcctcggtcttcatggtctgcctggcactcctcggctgcttcgccttgctgtggtgcgtttacaagaagacaaagtacgccttctcccctaggaattctcttccacagcacctgaaagagtttttgggccatcctcatcataacacacttctgtttttctcctttccattgtcggatgagaatgatgtttttgacaagctaagtgtcattgcagaagactctgagagcggcaagcagaatcctggtgacagctgcagcctcgggaccccgcctgggcaggggccccaaagctaggctctgagaaggaaacacactcggctgggcacagtgacgtactccatctcacatctgcctcagtgagggatcagggcagcaaacaagggccaagaccatctgagccagccccacatctagaactcccagaccctggacttagccaccagagagctacattttaaaggctgtcttggcaaaaatactccatttgggaactcactgccttataaaggctttcatgatgttttcagaagttggccactgagagtgtaattttcagccttttatatcactaaaataagatcatgttttaattgtgagaaacagggccgagcacagtggctcacgcctgtaataccagcaccttagaggtcgaggcaggcggatcacttgaggtcaggagttcaagaccagcctggccaatatggtgaaacccagtctctactaaaaatacaaaaattagctaggcatgatggcgcatgcctataatcccagctactcgagtgcctgaggcaggagaattgcatgaacccgggaggaggaggaggaggttgcagtgagccgagatagcggcactgcactccagcctgggtgacaaagtgagactccatctcaaaaaaaaaaaaaaaaaattgtgagaaacagaaatacttaaaatgaggaataagaatggagatgttacatctggtagatgtaacattctaccagattatggatggactgatctgaaaatcgacctcaactcaagggtggtcagctcaatgctacacagagcacggacttttggattctttgcagtactttgaatttatttttctacctatatatgttttatatgctgctggtgctccattaaagttttactctgtgttgcactatatgtgttcatgataaaaaa

SEQ ID NO: 351648 - DNA, 1806 bp, Homo sapiens
cccgcccatctccgctggttcccggaagccgccgcggacaagctctcccgggcgcgggcgggggtcgtgtgcttggaggaagccgcggaacccccagcgtccgtccatggcgtggagccttgggagctggctgggtggctgcctgctggtgtcagcattgggaatggtaccacctcccgaaaatgtcagaatgaattctgttaatttcaagaacattctacagtgggagtcacctgcttttgccaaagggaacctgactttcacagctcagtacctaagttataggatattccaagataaatgcatgaatactaccttgacggaatgtgatttctcaagtctttccaagtatggtgaccacaccttgagagtcagggctgaatttgcagatgagcattcagactgggtaaacatcaccttctgtcctgtggatgacaccattattggaccccctggaatgcaagtagaagtacttgctgattctttacatatgcgtttcttagcccctaaaattgagaatgaatacgaaacttggactatgaagaatgtgtataactcatggacttataatgtgcaatactggaaaaacggtactgatgaaaagtttcaaattactccccagtatgactttgaggtcctcagaaacctggagccatggacaacttattgtgttcaagttcgagggtttcttcctgatcggaacaaagctggggaatggagtgagcctgtctgtgagcaaacaacccatgacgtttttgggccatcctcatcataacacacttctgtttttctcctttccattgtcggatgagaatgatgtttttgacaagctaagtgtcattgcagaagactctgagagcggcaagcagaatcctggtgacagctgcagcctcgggaccccgcctgggcaggggccccaaagctaggctctgagaaggaaacacactcggctgggcacagtgacgtactccatctcacatctgcctcagtgagggatcagggcagcaaacaagggccaagaccatctgagccagccccacatctagaactcccagaccctggacttagccaccagagagctacattttaaaggctgtcttggcaaaaatactccatttgggaactcactgccttataaaggctttcatgatgttttcagaagttggccactgagagtgtaattttcagccttttatatcactaaaataagatcatgttttaattgtgagaaacagggccgagcacagtggctcacgcctgtaataccagcaccttagaggtcgaggcaggcggatcacttgaggtcaggagttcaagaccagcctggccaatatggtgaaacccagtctctactaaaaatacaaaaattagctaggcatgatggcgcatgcctataatcccagctactcgagtgcctgaggcaggagaattgcatgaacccgggaggaggaggaggaggttgcagtgagccgagatagcggcactgcactccagcctgggtgacaaagtgagactccatctcaaaaaaaaaaaaaaaaaattgtgagaaacagaaatacttaaaatgaggaataagaatggagatgttacatctggtagatgtaacattctaccagattatggatggactgatctgaaaatcgacctcaactcaagggtggtcagctcaatgctacacagagcacggacttttggattctttgcagtactttgaatttatttttctacctatatatgttttatatgctgctggtgctccattaaagttttactctgtgttgcactatatgtgttcatgataaaaaa

SEQ ID NO: 351649 - DNA, 1419 bp, Homo sapiens
cccgcccatctccgctggttcccggaagccgccgcggacaagctctcccgggcgcgggcgggggtcgtgtgcttggaggaagccgcggaacccccagcgtccgtccatggcgtggagccttgggagctggctgggtggctgcctgctggtgtcagcattgggaatggtaccacctcccgaaaatgtcagaatgaattctgttaatttcaagaacattctacagtgggagtcacctgcttttgccaaagggaacctgactttcacagctcagtacctaagttataggatattccaagataaatgcatgaatactaccttgacggaatgtgatttctcaagtctttccaagtatggtgaccacaccttgagagtcagggctgaatttgcagatgagcattcagactgggtaaacatcaccttctgtcctgtggatgacaccattattggaccccctggaatgcaagtagaagtacttgctgattctttacatatgcgtttcttagcccctaaaattgagaatgaatacgaaacttggactatgaagaatgtgtataactcatggacttataatgtgcaatactggaaaaacggtactgatgaaaagtttcaaattactccccagtatgactttgaggtcctcagaaacctggagccatggacaacttattgtgttcaagttcgagggtttcttcctgatcggaacaaagctggggaatggagtgagcctgtctgtgagcaaacaacccatgacgaaacggtcccctcctggatggtggccgtcatcctcatggcctcggtcttcatggtctgcctggcactcctcggctgcttcgccttgctgtggtgcgtttacaagaagacaaagtacgccttctcccctaggaattctcttccacagcacctgaaagagtttttgggccatcctcatcataacacacttctgtttttctcctttccattgtcggatgagaatgatgtttttgacaagctaagtgtcattgcagaagactctgagagcggcaagcagaatcctggtgacagctgcagcctcgggaccccgcctgggcaggggccccaaagctaggctctgagaaggaaacacactcggctgggcacagtgacgtaactccatctcaaaaaaaaaaaaaaaaaattgtgagaaacagaaatacttaaaatgaggaataagaatggagatgttacatctggtagatgtaacattctaccagattatggatggactgatctgaaaatcgacctcaactcaagggtggtcagctcaatgctacacagagcacggacttttggattctttgcagtactttgaatttatttttctacctatatatgttttatatgctgctggtgctccattaaagttttactctgtgttgcactatatgtgttcatgataaaaaa

SEQ ID NO: 351650 - DNA, 829 bp, Homo sapiens
tgcactccagcctgggtgacagagcaagactctgtctcaaaaaaataaaataaacattaaaaataaataaataaaataaaatagattttccagccaggagttctgtgaaaaaatctttgtaaacccagaaaaagaaatggagaaaattgatcattaactgtcctctttccctccacagtttttgggccatcctcatcataacacacttctgtttttctcctttccattgtcggatgagaatgatgtttttgacaagctaagtgtcattgcagaagactctgagagcggcaagcagaatcctggtgacagctgcagcctcgggaccccgcctgggcaggggccccaaagctaggctctgagaaggaaacacactcggctgggcacagtgacgtactccatctcacatctgcctcagtgagggatcagggcagcaaacaagggccaagaccatctgagccagccccacatctagaactcccagaccctggacttagccaccagagagctacattttaaaggctgtcttggcaaaaatactccatttgggaactcactgccttataaaggctttcatgatgttttcagaagttggccactgagagtgtaattttcagccttttatatcactaaaataagatcatgttttaattgtgagaaacagggccgagcacagtggctcacgcctgtaataccagcaccttagaggtcgaggcaggcggatcacttgaggtcaggagttcaagaccagcctggccaatatggtgaaacccagtctctactaaaaatacaaaaattagctaggcatgatggcgcatgcctataatcccag

SEQ ID NO: 351651 - DNA, 445 bp, Homo sapiens
ccgcggacaagctctcccgggcgcgggcgggggtcgtgtgcttggaggaagccgcggaacccccagcgtccgtccatggcgtggagccttgggagctggctgggtggctgcctgctggtgtcaggtgaggggtccgcggggagggggcgcgcttgggaaccgggaggccccgcgagatgccgcccctgatcccatccctgggcgccctgcaagtgacttaagagccttcggggcctcgggagagaagatgcaaacgccacggccggctgctgagacgcaactaggctgctgctgccgtcgattctgtaacaggagaaagccccatccgcgcccggattacagaccgtctgggccctaaactcagggggagactcccggcgtcttttgattccctgtcctcctgcagctctctgctggcgggcgtctaaataaagtagcttcccca

SEQ ID NO: 351652 - DNA, 1964 bp, Homo sapiens
cccgcccatctccgctggttcccggaagccgccgcggacaagctctcccgggcgcgggcgggggtcgtgtgcttggaggaagccgcggaacccccagcgtccgtccatggcgtggagccttgggagctggctgggtggctgcctgctggtgtcagcattgggaatggtaccacctcccgaaaatgtcagaatgaattctgttaatttcaagaacattctacagtgggagtcacctgcttttgccaaagggaacctgactttcacagctcagtacctaagttataggatattccaagataaatgcatgaatactaccttgacggaatgtgatttctcaagtctttccaagtatggtgaccacaccttgagagtcagggctgaatttgcagatgagcattcagactgggtaaacatcaccttctgtcctgtggatgacaccattattggaccccctggaatgcaagtagaagtacttgctgattctttacatatgcgtttcttagcccctaaaattgagaatgaatacgaaacttggactatgaagaatgtgtataactcatggacttataatgtgcaatactggaaaaacggtactgatgaaaagtttcaaattactccccagtatgactttgaggtcctcagaaacctggagccatggacaacttattgtgttcaagttcgagggtttcttcctgatcggaacaaagctggggaatggagtgagcctgtctgtgagcaaacaacccatgacgaaacggtcccctcctggatggtggccgtcatcctcatggcctcggtcttcatggtctgcctggcactcctcggctgcttcgccttgctgtggtgcgtttacaagaagacaaagtacgccttctcccctaggaattctcttccacagcacctgaaagagtttttgggccatcctcatcataacacacttctgtttttctcctttccattgtcggatgagaatgatgtttttgacaagctaagtgtcattgcagaagactctgagagcggcaagcagaatcctggtgacagctgcagcctcgggaccccgcctgggcaggggccccaaagctaggctctgagaaggaaacacactcggctgggcacagtgacgtactccatctcacatctgcctcagtgagggatcagggcagcaaacaagggccaagaccatctgagccagccccacatctagaactcccagaccctggacttagccaccagagagctacattttaaaggctgtcttggcaaaaatactccatttgggaactcactgccttataaaggctttcatgatgttttcagaagttggccactgagagtgtaattttcagccttttatatcactaaaataagatcatgttttaattgtgagaaacagggccgagcacagtggctcacgcctgtaataccagcaccttagaggtcgaggcaggcggatcacttgaggtcaggagttcaagaccagcctggccaatatggtgaaacccagtctctactaaaaatacaaaaattagctaggcatgatggcgcatgcctataatcccagctactcgagtgcctgaggcaggagaattgcatgaacccgggaggaggaggaggaggttgcagtgagccgagatagcggcactgcactccagcctgggtgacaaagtgagactccatctcaaaaaaaaaaaaaaaaaattgtgagaaacagaaatacttaaaatgaggaataagaatggagatgttacatctggtagatgtaacattctaccagattatggatggactgatctgaaaatcgacctcaactcaagggtggtcagctcaatgctacacagagcacggacttttggattctttgcagtactttgaatttatttttctacctatatatgttttatatgctgctggtgctccattaaagttttactctgtgttgcactatatgtgttcatgataaaaaa

SEQ ID NO: 351653 - DNA, 1757 bp, Homo sapiens
tgtagtgatcatgctcactctgcatgttgcctgaagattccagtgtactccgcatagacaatcaagatgtcttaaacatatctgaacacacaatagctaagaccccaactgggattcgataccccactatgcttagccctaaacctcaacagttaaatcaacaaaacggctgccattgggctggcagccgtgcccgatgtcaaggccgagcttctgtcctgtggatgacaccattattggaccccctggaatgcaagtagaagtacttgctgattctttacatatgcgtttcttagcccctaaaattgagaatgaatacgaaacttggactatgaagaatgtgtataactcatggacttataatgtgcaatactggaaaaacggtactgatgaaaagtttcaaattactccccagtatgactttgaggtcctcagaaacctggagccatggacaacttattgtgttcaagttcgagggtttcttcctgatcggaacaaagctggggaatggagtgagcctgtctgtgagcaaacaacccatgacgaaacggtcccctcctggatggtggccgtcatcctcatggcctcggtcttcatggtctgcctggcactcctcggctgcttcgccttgctgtggtgcgtttacaagaagacaaagtacgccttctcccctaggaattctcttccacagcacctgaaagagtttttgggccatcctcatcataacacacttctgtttttctcctttccattgtcggatgagaatgatgtttttgacaagctaagtgtcattgcagaagactctgagagcggcaagcagaatcctggtgacagctgcagcctcgggaccccgcctgggcaggggccccaaagctaggctctgagaaggaaacacactcggctgggcacagtgacgtactccatctcacatctgcctcagtgagggatcagggcagcaaacaagggccaagaccatctgagccagccccacatctagaactcccagaccctggacttagccaccagagagctacattttaaaggctgtcttggcaaaaatactccatttgggaactcactgccttataaaggctttcatgatgttttcagaagttggccactgagagtgtaattttcagccttttatatcactaaaataagatcatgttttaattgtgagaaacagggccgagcacagtggctcacgcctgtaataccagcaccttagaggtcgaggcaggcggatcacttgaggtcaggagttcaagaccagcctggccaatatggtgaaacccagtctctactaaaaatacaaaaattagctaggcatgatggcgcatgcctataatcccagctactcgagtgcctgaggcaggagaattgcatgaacccgggaggaggaggaggaggttgcagtgagccgagatagcggcactgcactccagcctgggtgacaaagtgagactccatctcaaaaaaaaaaaaaaaaaattgtgagaaacagaaatacttaaaatgaggaataagaatggagatgttacatctggtagatgtaacattctaccagattatggatggactgatctgaaaatcgacctcaactcaagggtggtcagctcaatgctacacagagcacggacttttggattctttgcagtactttgaatttatttttctacctatatatgttttatatgctgctggtgctccattaaagttttactctgtgttgcactatatgtgttcatgataaaaaa

SEQ ID NO: 351654 - DNA, 1191 bp, Homo sapiens
cccgcccatctccgctggttcccggaagccgccgcggacaagctctcccgggcgcgggcgggggtcgtgtgcttggaggaagccgcggaacccccagcgtccgtccatggcgtggagccttgggagctggctgggtggctgcctgctggtgtcagcattgggaatggtaccacctcccgaaaatgtcagaatgaattctgttaatttcaagaacattctacagtgggagtcacctgcttttgccaaagggaacctgactttcacagctcagtacctaagttataggatattccaagataaatgcatgaatactaccttgacggaatgtgatttctcaagtctttccaagtatggtgaccacaccttgagagtcagggctgaatttgcagatgagcattcagactgggtaaacatcaccttctgtcctgtggatgacaccattattggaccccctggaatgcaagtagaagtacttgctgattctttacatatgcgtttcttagcccctaaaattgagaatgaatacgaaacttggactatgaagaatgtgtataactcatggacttataatgtgcaatactggaaaaacggtactgatgaaaagtttcaaattactccccagtatgactttgaggtcctcagaaacctggagccatggacaacttattgtgttcaagttcgagggtttcttcctgatcggaacaaagctggggaatggagtgagcctgtctgtgagcaaacaacccatgacggtaagccctgagatgcacctccgctaagcatcctaaacagctttatagacacctgccctagacatgattgcatccaactcaaattccagctcagttcagaaatctatcgccctgacattatctctcagccctgactgctcagcttcatgctaggaaggagaccacacccgcttctgaggcagctcattcactcttagatcaaaggagttgctagaaaccttttctgtctggtggagcgaggtctgcctccatgagccccccttggcagtacttattctaccatcccaggctccctaaagcaaggcagggcagctggaggagggacctggagccgaacaaggggagctgggaccacgagcaacccaggtgacatcctggactctgtcaaagataagcaaagcaggacgctaattaaagcagtcaaaacattttattcagt

SEQ ID NO: 351655 - DNA, 1593 bp, Homo sapiens
ctggggagctgtggctcagacctctggtttctgcgcctcctcactctccaaacccaacctcgaggttcccccgccgctgcgcaccctgggaagccctttctcaccaggagctctcaccccaatatcattctctccctcctcctccaactcctccgagcccaggtccgacatggtctcgccccagcctggatcacagccgcagcgcctctagcaggctctgctgacccttcgggattcgcggctagctgtgatgtgtccgccaagatctcttctcttgtctgtaaacaacttcactctcaaggaggcagctctggcctctcagcaggtgcggcctacagtgatgtccgtccgggttttacatccttccccgacctcgacatgagtcccagccccctcgggcctctgactctcaggtgtcccctacgatcgccgtcctctcctctcgctcctggctcccctacactgtcacacacccacacaatcacagacgcacacgcatgtacacgtgcaggcttggaaatctgctttacctgacgcactccgcctgccgaaggcccctcacatctcccatttcctctgccatcatcccagactgcaaagctgtgttatttgttgttgctgcaggagctggggaggagtgactgaataactataggatttggtcttgatgggagaatcccagaagccaaatccacgcggtgaataagctgctgatcttccagagcacacatcccctagagattcttcccaatgctaatatgaaaggttacaaccataacccatcatcaggcccaaatatattacttactgaataaatacacaagttacaacaacacacgagattccaaaattatgtcgttttttagatgcaaagataaaaatgttgtaaacaccaaaatttaacagcttttcttatggggaaaagtggggagttagggataacagatgattattattttcttctctacatattggcagttacccagttactacaattaagcatgtcctatttttataataaaatgccagaagcattttaaatgttagaaatctagaatggtaacataagtatatgcaaataaatactcgttttttacatttaaaatgtcagaaatttagctttcaaatttgtcctaacaatgacagtaaccagtgtttactaagttctgacactgtgtgtgggcactgttttaagaattttatgagttatcttattaaatcctcactatcattcctccattgaacatctaaggaaagggagttatagggggttataaactaaaaataacctcctaagccccaccacagccaactgaatggacccctcttggccaagagggccccagaaaccttaaaaactgcgttctcagccatgatgggaagggaggtcgaacatgcctcactaatacccttgtgcagtttagacacaacaactaacaagcattaatgttaaaatagagatcataagactgacagaatggacgctgtggcagtaagataccaacttacaaacaggacctaaggccatgccaggcatgagttaagtcatgcatccctacacttaaaagaataaactatattttaactacctgg

SEQ ID NO: 351656 - DNA, 989 bp, Homo sapiens
tggatttatactttcagaggtagtagacttttagttttattagttgacatttccagaatttgaaagcttagctaaatatttattttatcttgtgtgactgttccttccaaatgtatccagtcttaagtggttccccaaattccagctcttcgtgcgatccaaccctaggtctggctgcggaggtggctctccattgttcttggaacgctgcatttttgtctgagtgatgggtgggcaggaagttgttaagcaggtgttctactagactttgagaaaagaagattaaagcagacaagcctacataatcaccagttataacctggagaaaagcaggaataattttcttaccctcattgggattacgtcacccggcctgtagaccatcaggggcctgagaggcattagagtctctatcgtagaagaacgaggaaatcatccactgccagagacagtgcattcacagcccagtggcccctcgctcactctccgggagttggcagggacccagctccaggactgcaattctgtgacctttggagctgtgcttcctccactcctgccggtggctgagccctgggtggctgccctctgcagccctggtcggcagaggcaatgcagaggctggctgttttgtgacggtcctaggttccccactctccagcagctttcaggggatgttaaacattcatttacccaaaagattctaaaattcccccttggcccctgataagcaagaaacttccatgcctctcaagttgttgactgtggaaaacgtttgcagacctttgaaaatgtggtttttaagagagaagaatatgaaaagaggtggtgggccttaaacactcatccgcttgacaagaaactctcaaatcagtaccagtaaccagtcattataaatctgaatactactacttcttgtctttctggttagagaaatatacaaacagctcaagaaaatggtaaattataaagatggaagtgactattga

SEQ ID NO: 351657 - DNA, 1175 bp, Homo sapiens
caccggctctctgacctggacctcgccgtcgctggcccctgaaatccatcacttttgtcggctgttctgtgacgccacaacgaggagccacctgggctctgctgacccttcgggattcgcggctagctgtgatgtgtccgccaagatctcttctcttgtctgtaaacaacttcactctcaaggaggcagctctggcctctcagcaggagctggggaggagtgactgaataactataggatttggtcttgatgggagaatcccagaagccaaatccacgcggtgaataagctgctgatcttccagagcacacatcccctagagattcttcccaatgctaatatgaaaggttacaaccataacccatcatcaggcccaaatatattacttactgaataaatacacaagttacaacaacacacgagattccaaaattatgtcgttttttagatgcaaagataaaaatgttgtaaacaccaaaatttaacagcttttcttatggggaaaagtggggagttagggataacagatgattattattttcttctctacatattggcagttacccagttactacaattaagcatgtcctatttttataataaaatgccagaagcattttaaatgttagaaatctagaatggtaacataagtatatgcaaataaatactcgttttttacatttaaaatgtcagaaatttagctttcaaatttgtcctaacaatgacagtaaccagtgtttactaagttctgacactgtgtgtgggcactgttttaagaattttatgagttatcttattaaatcctcactatcattcctccattgaacatctaaggaaagggagttatagggggttataaactaaaaataacctcctaagccccaccacagccaactgaatggacccctcttggccaagagggccccagaaaccttaaaaactgcgttctcagccatgatgggaagggaggtcgaacatgcctcactaatacccttgtgcagtttagacacaacaactaacaagcattaatgttaaaatagagatcataagactgacagaatggacgctgtggcagtaagataccaacttacaaacaggacctaaggccatgccaggcatgagttaagtcatgcatccctacacttaaaagaataaactatattttaactacctgg

SEQ ID NO: 351658 - DNA, 509 bp, Homo sapiens
tacacataattccaccactcgctgacaaccattgttggcttagattttagcttctttctttctagaaatagatcctatagttgcctagttacatacgtagatatttaaacattctttgaggttataatgacatgcagttttgaatgatgtgttatttaatgtgtcataagcattttccgtcattaaaatctcccaaccttttttttacaagatgtcattcgtatggatgtatttgaattttctattttttctcaatgatgatgtgacatccattttactttataagtatctttttacttttcaaattattttttgccaatagattcctagaatttctggatcagaggatctgtgtacctagccgttcatgaaaatgcatgaatgctaatcattctaacacagtggccaggtgggaatgtcacccaggatgtctccaaggcagtggaagagagagccgccaggcaccctcgtcattaggaagcctggccccacttcacccagactgcccg

SEQ ID NO: 351659 - DNA, 361 bp, Homo sapiens
ttggcattgccatggtggtggacctgctcagcctcactcatgtttgctctttcagatccgaacgacgtcaggtgctcctccaccctggtgacgcactcaaaaggctatgagaatggtacaaacagattgagactccagaagcaaatcttgaagagcgaaaagaacaagcctctgaaggggactaaagcacctgccccacaggtgatggggcctgagcaggcagcccagggctactgggctggcagtcagattcctagtaatggggggaggctgccatccacaaagcgcgccactctgcactgaccacctgccctcagaacaccttacgtgtgcacacgccagccagactcagagatgaatt

SEQ ID NO: 351660 - DNA, 5584 bp, Homo sapiens
  misc_feature (61)..(61): n is a, c, g, or t
  misc_feature (287)..(287): n is a, c, g, or t
  misc_feature (506)..(507): n is a, c, g, or t
cggcggcgcaggtgaggcgcggggccggggccggaccgggaggcggggaccccccgccccnccgcccgcacctgcggggcagccggcgctcaggcgccgcagccgctcagcacctgcggcgccctcagggagccgggcgcggggccctgcgcactcggagctcggctcctctccttccttttcttttttttcggggggaggtgggggctggtttggatgttttccgagagccggggacggtctcaagctattttcgcggagggaagtctttgaaatacgacatctanaagagtggccctcggcgacaatgccgggcgttcccggaccggggcaacgctgggattccggggaagtggaggcagagggagcgggcacggggccggcagccgctccacggagtccccggcaggggcgagcttagctgtccagccgggtcccctgcccaccccggcccgggccgcggtgacagctgagggtccagagagccggcaggaggggaccctgcnnattgtctgccgcgatggggacgtgggcgtgcccgcggaattcacctcctccggggaccagccgcccagggaggagccggcacagaacgctggctcggagcgccggcaccctgggcctttgcgttgtttgtcggctgagcagctggttcccggagcccgtgggcctcctggccaatgcgagtgacagcgaccttctgggtttataataaagggcttgacgcgccggaaagtcccctcgccgctggccaccagccttccagcccttacggcccacgccgtaatcctggtgaccgagaagagagcagagccactgccagaaggaaggggacaagacccagcaggacaccttctttccacgctttccagcctgtgggagcggcaggggcaacagagagaggatctggagccaggattaatgactcatttatgaagcatcttattctgcgaccgaggctcagtggtcagtggcgacgtaaatggctcgactccccgctggcattcgcttcatcatctcattctccagggatcagtggtacagagccttcatttttattttgacatttctgctgtatgcaagttttcacttatctcgaaagcctatcagcatagttaagggtgagctccacaagtactgcactgcttgggatgaagctgacgtcaggttcagcagccagaacaggaagtctgggtccgctgccccccaccagctccctgacaatgagaccgactgtggctgggcaccgtttgataagaacaactatcagcagctgcttggggccctggactactccttcctgtgcgcctatgccgtggggatgtacctcagtggcatcattggggagcgcctgccgattaggtattacctaactttcgggatgctcgccagcggagccttcaccgccctgttcggcttagggtatttctacaacatccacagtttcggattctacgtggtaactcaggtcatcaacgggctggtgcagaccaccggctggcccagcgtcgtcacctgcctcggcaactggtttggaaaaggaaggagaggtttgattatgggggtctggaactcccacacctccgtgggcaacatcttggggtcattgatcgctggctactgggtgtccacatgctggggcctgtccttcgtcgtgcctggagccatcgtggcagccatggggatagtgtgctttctcttcctcattgaacatccgaacgacgtcaggtgctcctccaccctggtgacgcactcaaaaggctatgagaatggtacaaacagattgagactccagaagcaaatcttgaagagcgaaaagaacaagcctctggacccagagatgcagtgcctgctgctctcagatgggaagggctccatccacccgaaccacgtcgtcattctccccggggacggtgggagtggcacggccgccatcagcttcacaggggccttgaaaattccaggcgtgatagagttctcactgtgtctgctgtttgccaagctggtcagctatactttcctcttctggctgcccctgtacatcacgaatgtggatcaccttgatgccaaaaaggcgggggagctctccaccctgtttgacgtgggcggaatctttggtgggatcctggcaggtgtgatctcagaccgactggagaaaagggcctccacctgcggcctgatgctgctgctcgcggcccccacgctctacatcttctccaccatcagcaagatggggcttgaggccaccatcgccatgctgctgctcagcggagccctggtcagtgggccctacacactcatcaccaccgccgtctccgccgacctggggactcataaaagtctgaaaggcaacgcgcacgccctctccaccgtgacggccatcattgacgggacgggctctgtaggagcagccctgggccccctgctggctgggctcctctccccgtccggctggagcaatgtgttttacatgctgatgtttgcagatgcctgtgccttactgttcctgatccgcctcatacacaaggagctgagctgcccagggtcagctacgggggaccaagttccatttaaggaacagtgacaccccaccccagtcccgtggagggggtctgggcccacccttcacaactgcctttcaaggacagttcagacaaagggccctgcatggaaagagtgacctccctttgccttttgcacacgcacctggaaaagacacagaagccaacctgagaacccctggtgctattttaaaggagacatattgctgaacagcagtgagaaaagtctgcaggaactgctgcctgagccaagccagagaaccgaagacccggccggccctggcctcacaggcgtgtgcccatgcagccacccaaatgcacgcgtgacaacaaggccgggagggtggggggggtgcacaggtagccccgaccctctcaggcattccagccacagaacatcaaagtgagcgagtactgcgctggctgtggcttcagagaacctgtatgtgccacatggaaaaacaggacaccagagcccaccagacagtgccggccagcagagaagcagagagccagcgccacacaacatcaagaaggccgacaaccaggttggaaaccaagacggagctcagacccaccacatcgccccagaggcttttccagcacccatgatgttccggactgacctaaaaactaattgtcgagaagccaagggtgaggaggcaggaagcacctccggttggaggcacccaggcttgccagccacagagcgccccgaagtcaccgtcatcccagcccctggccttcctgccgccctccggggccatggcgctgctgttcagctcaggcacaggggcacagcagaggtttgggaagcggtctccccaccggcactgggattggcgggtccaagcccagcaaccggcttcgctccacaacacacaccacacctgggactgtttttaatacatagcaacagactgggttatttatttaagatgtgtattgtgtcatatgaagtttaagagacataaatggcattttgttatttattaagacaaactccaattgttctctggctgtttttttcagttgtgtctagcaaaatacttatctgccctttgaaataaaatgtttttgtttaaaaaatctcagaacactcaagaatgttgatgatttctgcttacatttccattacgctaaaaaagggaacttccaaatcgtgttgtgtgttttgggttttctcaggcttggacacattgaggtttctcgggtttggacacatactgggaaaagaccatttccagcagaaaaggggcctacctctcggtcccttgtttgcacagaaggccaagctgaagtaaacagccatctgggtattttataaatcacgcagtttaaagaatatcctaagatttgtccttgacgaggaggtgtcacaccccgtggtggtggggaaaggtgctgaccttgggaactacatggtggggtccaggctttcaaacgtcctcagaatgctgaccgtccagatgtgcatggtgcgggctttctctggatggagtgctgtggaagttcacttggggacctctcacagcagcagggcaaaggtcagaaacaacacactgtgtgtcccgcagttctcaggggcctcctgcttgagctctgcggagaagcccacaggaggaacagacctggctgtggcggcttctgtgtgccagctgccccactagattggctcactctctttttaatggcaagttatttatacatttaaaagatttctgctaaaaaagaacttccctaaacaccaaatggatggagtgtgtttcccacacacgcagcgcactcagcttgtgctggcctttcccggtcctccacccaatgcttcccgctcctgggagcctcccactttccctctctccctgacctggctccaggcaccagtccagccctctcccgctggtgtcacagtggcctgggctgccctgagcccctgccggctgccatccctgaggacgggcaccagccccgtgctcaccacagggcacctcttccctctgggtgtgcagcactcgtatccatggggtgaacaagcgagggatgacgcagatggcacagtatcattacaggatgcacagagggctttttccataaacaaaattctttgcattcactgccccctgcctctccagaactgtcccctctgaggcctcatctagtcagaggcccagggctggtgggccggagcggaccttcctcaccccatagccaccagccagcattcagcacagcagctttgaggtggcgatcgctatttccccaactcaatgaactaaagtactagaagaaaatctcccacaactcacaaaggaagagcaacttcccatttctgaaccctctgagctaaaccctgagaacttttggaaatggagagtcgatcctttttttaaaatgaagagtatacacacagctatttttttaaagcaatttagcggaaattcaccttgattcatggatggaagatttcattatgacttttaaggaaaaaagtacatgatttcaatataaaaatacatcttcatttgagcatagctgaggtattttccatctgcaaacagccagctctgagacacacacacttgccgtcctgtggaagcgtggctctgcctgtcacgcacgtctgcgcttgccgtcctgtggaagcgtggctctgcctgtcacgcacgtctgcgcttgccgtcctgtggaagcgtggctctgcctgtcacgcacgtgtgcgcttagtgcacatcactaagactctcctattcatgttgacaaaaaaatgccggatcatggaaacacaagctggtgacagggccaacaaaagagctcaaggtgggactccagctctccagcctgtctgtaggtaggaaaaactactcctggaagctcacctcagtgaatgcacctcagagtccaagagctgccgcgaatacagggcctggtggctgctatactgtgcgtctcagagcagagccagctctcccatcgccagcttgtaaaatccaagaaaacgaaattgcttgataaactacgagctg

SEQ ID NO: 351661 - DNA, 5650 bp, Homo sapiens
  misc_feature (61)..(61): n is a, c, g, or t
  misc_feature (287)..(287): n is a, c, g, or t
  misc_feature (506)..(507): n is a, c, g, or t
cggcggcgcaggtgaggcgcggggccggggccggaccgggaggcggggaccccccgccccnccgcccgcacctgcggggcagccggcgctcaggcgccgcagccgctcagcacctgcggcgccctcagggagccgggcgcggggccctgcgcactcggagctcggctcctctccttccttttcttttttttcggggggaggtgggggctggtttggatgttttccgagagccggggacggtctcaagctattttcgcggagggaagtctttgaaatacgacatctanaagagtggccctcggcgacaatgccgggcgttcccggaccggggcaacgctgggattccggggaagtggaggcagagggagcgggcacggggccggcagccgctccacggagtccccggcaggggcgagcttagctgtccagccgggtcccctgcccaccccggcccgggccgcggtgacagctgagggtccagagagccggcaggaggggaccctgcnnattgtctgccgcgatggggacgtgggcgtgcccgcggaattcacctcctccggggaccagccgcccagggaggagccggcacagaacgctggctcggagcgccggcaccctgggcctttgcgttgtttgtcggctgagcagctggttcccggagcccgtgggcctcctggccaatgcgagtgacagcgaccttctgggtttataataaagggcttgacgcgccggaaagtcccctcgccgctggccaccagccttccagcccttacggcccacgccgtaatcctggtgaccgagaagctctttgcctggaaggtgcctgcctgcctgcctgccggcccttgaacttaaatcgtctgaagttgtagagcagagccactgccagaaggaaggggacaagacccagcaggacaccttctttccacgctttccagcctgtgggagcggcaggggcaacagagagaggatctggagccaggattaatgactcatttatgaagcatcttattctgcgaccgaggctcagtggtcagtggcgacgtaaatggctcgactccccgctggcattcgcttcatcatctcattctccagggatcagtggtacagagccttcatttttattttgacatttctgctgtatgcaagttttcacttatctcgaaagcctatcagcatagttaagggtgagctccacaagtactgcactgcttgggatgaagctgacgtcaggttcagcagccagaacaggaagtctgggtccgctgccccccaccagctccctgacaatgagaccgactgtggctgggcaccgtttgataagaacaactatcagcagctgcttggggccctggactactccttcctgtgcgcctatgccgtggggatgtacctcagtggcatcattggggagcgcctgccgattaggtattacctaactttcgggatgctcgccagcggagccttcaccgccctgttcggcttagggtatttctacaacatccacagtttcggattctacgtggtaactcaggtcatcaacgggctggtgcagaccaccggctggcccagcgtcgtcacctgcctcggcaactggtttggaaaaggaaggagaggtttgattatgggggtctggaactcccacacctccgtgggcaacatcttggggtcattgatcgctggctactgggtgtccacatgctggggcctgtccttcgtcgtgcctggagccatcgtggcagccatggggatagtgtgctttctcttcctcattgaacatccgaacgacgtcaggtgctcctccaccctggtgacgcactcaaaaggctatgagaatggtacaaacagattgagactccagaagcaaatcttgaagagcgaaaagaacaagcctctggacccagagatgcagtgcctgctgctctcagatgggaagggctccatccacccgaaccacgtcgtcattctccccggggacggtgggagtggcacggccgccatcagcttcacaggggccttgaaaattccaggcgtgatagagttctcactgtgtctgctgtttgccaagctggtcagctatactttcctcttctggctgcccctgtacatcacgaatgtggatcaccttgatgccaaaaaggcgggggagctctccaccctgtttgacgtgggcggaatctttggtgggatcctggcaggtgtgatctcagaccgactggagaaaagggcctccacctgcggcctgatgctgctgctcgcggcccccacgctctacatcttctccaccatcagcaagatggggcttgaggccaccatcgccatgctgctgctcagcggagccctggtcagtgggccctacacactcatcaccaccgccgtctccgccgacctggggactcataaaagtctgaaaggcaacgcgcacgccctctccaccgtgacggccatcattgacgggacgggctctgtaggagcagccctgggccccctgctggctgggctcctctccccgtccggctggagcaatgtgttttacatgctgatgtttgcagatgcctgtgccttactgttcctgatccgcctcatacacaaggagctgagctgcccagggtcagctacgggggaccaagttccatttaaggaacagtgacaccccaccccagtcccgtggagggggtctgggcccacccttcacaactgcctttcaaggacagttcagacaaagggccctgcatggaaagagtgacctccctttgccttttgcacacgcacctggaaaagacacagaagccaacctgagaacccctggtgctattttaaaggagacatattgctgaacagcagtgagaaaagtctgcaggaactgctgcctgagccaagccagagaaccgaagacccggccggccctggcctcacaggcgtgtgcccatgcagccacccaaatgcacgcgtgacaacaaggccgggagggtggggggggtgcacaggtagccccgaccctctcaggcattccagccacagaacatcaaagtgagcgagtactgcgctggctgtggcttcagagaacctgtatgtgccacatggaaaaacaggacaccagagcccaccagacagtgccggccagcagagaagcagagagccagcgccacacaacatcaagaaggccgacaaccaggttggaaaccaagacggagctcagacccaccacatcgccccagaggcttttccagcacccatgatgttccggactgacctaaaaactaattgtcgagaagccaagggtgaggaggcaggaagcacctccggttggaggcacccaggcttgccagccacagagcgccccgaagtcaccgtcatcccagcccctggccttcctgccgccctccggggccatggcgctgctgttcagctcaggcacaggggcacagcagaggtttgggaagcggtctccccaccggcactgggattggcgggtccaagcccagcaaccggcttcgctccacaacacacaccacacctgggactgtttttaatacatagcaacagactgggttatttatttaagatgtgtattgtgtcatatgaagtttaagagacataaatggcattttgttatttattaagacaaactccaattgttctctggctgtttttttcagttgtgtctagcaaaatacttatctgccctttgaaataaaatgtttttgtttaaaaaatctcagaacactcaagaatgttgatgatttctgcttacatttccattacgctaaaaaagggaacttccaaatcgtgttgtgtgttttgggttttctcaggcttggacacattgaggtttctcgggtttggacacatactgggaaaagaccatttccagcagaaaaggggcctacctctcggtcccttgtttgcacagaaggccaagctgaagtaaacagccatctgggtattttataaatcacgcagtttaaagaatatcctaagatttgtccttgacgaggaggtgtcacaccccgtggtggtggggaaaggtgctgaccttgggaactacatggtggggtccaggctttcaaacgtcctcagaatgctgaccgtccagatgtgcatggtgcgggctttctctggatggagtgctgtggaagttcacttggggacctctcacagcagcagggcaaaggtcagaaacaacacactgtgtgtcccgcagttctcaggggcctcctgcttgagctctgcggagaagcccacaggaggaacagacctggctgtggcggcttctgtgtgccagctgccccactagattggctcactctctttttaatggcaagttatttatacatttaaaagatttctgctaaaaaagaacttccctaaacaccaaatggatggagtgtgtttcccacacacgcagcgcactcagcttgtgctggcctttcccggtcctccacccaatgcttcccgctcctgggagcctcccactttccctctctccctgacctggctccaggcaccagtccagccctctcccgctggtgtcacagtggcctgggctgccctgagcccctgccggctgccatccctgaggacgggcaccagccccgtgctcaccacagggcacctcttccctctgggtgtgcagcactcgtatccatggggtgaacaagcgagggatgacgcagatggcacagtatcattacaggatgcacagagggctttttccataaacaaaattctttgcattcactgccccctgcctctccagaactgtcccctctgaggcctcatctagtcagaggcccagggctggtgggccggagcggaccttcctcaccccatagccaccagccagcattcagcacagcagctttgaggtggcgatcgctatttccccaactcaatgaactaaagtactagaagaaaatctcccacaactcacaaaggaagagcaacttcccatttctgaaccctctgagctaaaccctgagaacttttggaaatggagagtcgatcctttttttaaaatgaagagtatacacacagctatttttttaaagcaatttagcggaaattcaccttgattcatggatggaagatttcattatgacttttaaggaaaaaagtacatgatttcaatataaaaatacatcttcatttgagcatagctgaggtattttccatctgcaaacagccagctctgagacacacacacttgccgtcctgtggaagcgtggctctgcctgtcacgcacgtctgcgcttgccgtcctgtggaagcgtggctctgcctgtcacgcacgtctgcgcttgccgtcctgtggaagcgtggctctgcctgtcacgcacgtgtgcgcttagtgcacatcactaagactctcctattcatgttgacaaaaaaatgccggatcatggaaacacaagctggtgacagggccaacaaaagagctcaaggtgggactccagctctccagcctgtctgtaggtaggaaaaactactcctggaagctcacctcagtgaatgcacctcagagtccaagagctgccgcgaatacagggcctggtggctgctatactgtgcgtctcagagcagagccagctctcccatcgccagcttgtaaaatccaagaaaacgaaattgcttgataaactacgagctg

SEQ ID NO: 351662 - DNA, 3991 bp, Homo sapiens
gatgattttcatattgtgtgttctttattttatatacatattacgtgcatatacaagcatttatttttttgaacgctggttcatttttatagttttaggcttctaggcactgtttcccctgatctttttcccctcctattgtcctcattttggcttttttcccattgtctatgcaacattttcaaaaccagagctcctggcggctgctcaccgaggacctgcgccagccttggtttctcagctctcccctcctcccttcttcccctggcgtttgctattgatcaggttgaattttaggtcctgcagagacatctgacaggggtcccaggaaggccctggctgtcgaggaatccagcagacacgtggatgtgtctgggaaggaaggccggcgcagctcagggcaggggcgcgcgttgcgcaccttcacgcctctcacgctggctgctctggggcctcagggaggagcaggactgtgcggaacaaacgttttttatttgaagagaatcctaagagttcttgtaactagaaccaagcatttctgatgacttttgactcttaaaaacccttgaagttttaactctccaaggcaagcttggggtggagtttaaataatgggaaacaccctcacgatgagttgttttgcagagcagtttgagtaaatggtcatacagaggcttaggtttacttctcatgctgtggcgataactgcacgtctgtttttcctctcttctaggggactcataaaagtctgaaaggcaacgcgcacgccctctccaccgtgacggccatcattgacgggacgggctctgtaggagcagccctgggccccctgctggctgggctcctctccccgtccggctggagcaatgtgttttacatgctgatgtttgcagatgcctgtgccttactgttcctgatccgcctcatacacaaggagctgagctgcccagggtcagctacgggggaccaagttccatttaaggaacagtgacaccccaccccagtcccgtggagggggtctgggcccacccttcacaactgcctttcaaggacagttcagacaaagggccctgcatggaaagagtgacctccctttgccttttgcacacgcacctggaaaagacacagaagccaacctgagaacccctggtgctattttaaaggagacatattgctgaacagcagtgagaaaagtctgcaggaactgctgcctgagccaagccagagaaccgaagacccggccggccctggcctcacaggcgtgtgcccatgcagccacccaaatgcacgcgtgacaacaaggccgggagggtggggggggtgcacaggtagccccgaccctctcaggcattccagccacagaacatcaaagtgagcgagtactgcgctggctgtggcttcagagaacctgtatgtgccacatggaaaaacaggacaccagagcccaccagacagtgccggccagcagagaagcagagagccagcgccacacaacatcaagaaggccgacaaccaggttggaaaccaagacggagctcagacccaccacatcgccccagaggcttttccagcacccatgatgttccggactgacctaaaaactaattgtcgagaagccaagggtgaggaggcaggaagcacctccggttggaggcacccaggcttgccagccacagagcgccccgaagtcaccgtcatcccagcccctggccttcctgccgccctccggggccatggcgctgctgttcagctcaggcacaggggcacagcagaggtttgggaagcggtctccccaccggcactgggattggcgggtccaagcccagcaaccggcttcgctccacaacacacaccacacctgggactgtttttaatacatagcaacagactgggttatttatttaagatgtgtattgtgtcatatgaagtttaagagacataaatggcattttgttatttattaagacaaactccaattgttctctggctgtttttttcagttgtgtctagcaaaatacttatctgccctttgaaataaaatgtttttgtttaaaaaatctcagaacactcaagaatgttgatgatttctgcttacatttccattacgctaaaaaagggaacttccaaatcgtgttgtgtgttttgggttttctcaggcttggacacattgaggtttctcgggtttggacacatactgggaaaagaccatttccagcagaaaaggggcctacctctcggtcccttgtttgcacagaaggccaagctgaagtaaacagccatctgggtattttataaatcacgcagtttaaagaatatcctaagatttgtccttgacgaggaggtgtcacaccccgtggtggtggggaaaggtgctgaccttgggaactacatggtggggtccaggctttcaaacgtcctcagaatgctgaccgtccagatgtgcatggtgcgggctttctctggatggagtgctgtggaagttcacttggggacctctcacagcagcagggcaaaggtcagaaacaacacactgtgtgtcccgcagttctcaggggcctcctgcttgagctctgcggagaagcccacaggaggaacagacctggctgtggcggcttctgtgtgccagctgccccactagattggctcactctctttttaatggcaagttatttatacatttaaaagatttctgctaaaaaagaacttccctaaacaccaaatggatggagtgtgtttcccacacacgcagcgcactcagcttgtgctggcctttcccggtcctccacccaatgcttcccgctcctgggagcctcccactttccctctctccctgacctggctccaggcaccagtccagccctctcccgctggtgtcacagtggcctgggctgccctgagcccctgccggctgccatccctgaggacgggcaccagccccgtgctcaccacagggcacctcttccctctgggtgtgcagcactcgtatccatggggtgaacaagcgagggatgacgcagatggcacagtatcattacaggatgcacagagggctttttccataaacaaaattctttgcattcactgccccctgcctctccagaactgtcccctctgaggcctcatctagtcagaggcccagggctggtgggccggagcggaccttcctcaccccatagccaccagccagcattcagcacagcagctttgaggtggcgatcgctatttccccaactcaatgaactaaagtactagaagaaaatctcccacaactcacaaaggaagagcaacttcccatttctgaaccctctgagctaaaccctgagaacttttggaaatggagagtcgatcctttttttaaaatgaagagtatacacacagctatttttttaaagcaatttagcggaaattcaccttgattcatggatggaagatttcattatgacttttaaggaaaaaagtacatgatttcaatataaaaatacatcttcatttgagcatagctgaggtattttccatctgcaaacagccagctctgagacacacacacttgccgtcctgtggaagcgtggctctgcctgtcacgcacgtctgcgcttgccgtcctgtggaagcgtggctctgcctgtcacgcacgtctgcgcttgccgtcctgtggaagcgtggctctgcctgtcacgcacgtgtgcgcttagtgcacatcactaagactctcctattcatgttgacaaaaaaatgccggatcatggaaacacaagctggtgacagggccaacaaaagagctcaaggtgggactccagctctccagcctgtctgtaggtaggaaaaactactcctggaagctcacctcagtgaatgcacctcagagtccaagagctgccgcgaatacagggcctggtggctgctatactgtgcgtctcagagcagagccagctctcccatcgccagcttgtaaaatccaagaaaacgaaattgcttgataaactacgagctg

SEQ ID NO: 351663 - DNA, 4282 bp, Homo sapiens
ctggggagctgtggctcagacctctggtttctgcgcctcctcactctccaaacccaacctcgaggttcccccgccgctgcgcaccctgggaagccctttctcaccaggagctctcaccccaatatcattctctccctcctcctccaactcctccgagcccaggtccgacatggtctcgccccagcctggatcacagccgcagcgcctctagcagctttatagaattgagagattgctgagcctaaatacatgttgctgcattgcctccgagaatggccggacctatccccactctcaccaaaacagagtgtgggactcactgctccctcgcctactagagcagagccactgccagaaggaaggggacaagacccagcaggacaccttctttccacgctttccagcctgtgggagcggcaggggcaacagagagaggatctggagccaggattaatgactcatttatgaagcatcttattctgcgaccgaggctcagtggtcagtggcgacgtaaatggctcgactccccgctggcattcgcttcatcatctcattctccagggatcagtggtacagagccttcatttttattttgacatttctgctgtatgcaagttttcacttatctcgaaagcctatcagcatagttaagggtgagctccacaagtactgcactgcttgggatgaagctgacgtcaggttcagcagccagaacaggaagtctgggtccgctgccccccaccagctccctgacaatgagaccgactgtggctgggcaccgtttgataagaacaactatcagcagctgcttggggccctggactactccttcctgtgcgcctatgccgtggggatgtacctcagtggcatcattggggagcgcctgccgattaggtattacctaactttcgggatgctcgccagcggagccttcaccgccctgttcggcttagggtatttctacaacatccacagtttcggattctacgtggtaactcaggtcatcaacgggctggtgcagaccaccggctggcccagcgtcgtcacctgcctcggcaactggtttggaaaaggaaggagaggtttgattatgggggtctggaactcccacacctccgtgggcaacatcttggggtcattgatcgctggctactgggtgtccacatgctggggcctgtccttcgtcgtgcctggagccatcgtggcagccatggggatagtgtgctttctcttcctcattgaacatccgaacgacgtcaggtgctcctccaccctggtgacgcactcaaaaggctatgagaatggtacaaacagattgagactccagaagcaaatcttgaagagcgaaaagaacaagcctctggacccagagatgcagtgcctgctgctctcagatgggaagggctccatccacccgaaccacgtcgtcattctccccggggacggtgggagtggcacggccgccatcagcttcacaggggccttgaaaattccaggcgtgatagagttctcactgtgtctgctgtttgccaagctggtcagctatactttcctcttctggctgcccctgtacatcacgaatgtggatcaccttgatgccaaaaaggcggggtgcacaggtagccccgaccctctcaggcattccagccacagaacatcaaagtgagcgagtactgcgctggctgtggcttcagagaacctgtatgtgccacatggaaaaacaggacaccagagcccaccagacagtgccggccagcagagaagcagagagccagcgccacacaacatcaagaaggccgacaaccaggttggaaaccaagacggagctcagacccaccacatcgccccagaggcttttccagcacccatgatgttccggactgacctaaaaactaattgtcgagaagccaagggtgaggaggcaggaagcacctccggttggaggcacccaggcttgccagccacagagcgccccgaagtcaccgtcatcccagcccctggccttcctgccgccctccggggccatggcgctgctgttcagctcaggcacaggggcacagcagaggtttgggaagcggtctccccaccggcactgggattggcgggtccaagcccagcaaccggcttcgctccacaacacacaccacacctgggactgtttttaatacatagcaacagactgggttatttatttaagatgtgtattgtgtcatatgaagtttaagagacataaatggcattttgttatttattaagacaaactccaattgttctctggctgtttttttcagttgtgtctagcaaaatacttatctgccctttgaaataaaatgtttttgtttaaaaaatctcagaacactcaagaatgttgatgatttctgcttacatttccattacgctaaaaaagggaacttccaaatcgtgttgtgtgttttgggttttctcaggcttggacacattgaggtttctcgggtttggacacatactgggaaaagaccatttccagcagaaaaggggcctacctctcggtcccttgtttgcacagaaggccaagctgaagtaaacagccatctgggtattttataaatcacgcagtttaaagaatatcctaagatttgtccttgacgaggaggtgtcacaccccgtggtggtggggaaaggtgctgaccttgggaactacatggtggggtccaggctttcaaacgtcctcagaatgctgaccgtccagatgtgcatggtgcgggctttctctggatggagtgctgtggaagttcacttggggacctctcacagcagcagggcaaaggtcagaaacaacacactgtgtgtcccgcagttctcaggggcctcctgcttgagctctgcggagaagcccacaggaggaacagacctggctgtggcggcttctgtgtgccagctgccccactagattggctcactctctttttaatggcaagttatttatacatttaaaagatttctgctaaaaaagaacttccctaaacaccaaatggatggagtgtgtttcccacacacgcagcgcactcagcttgtgctggcctttcccggtcctccacccaatgcttcccgctcctgggagcctcccactttccctctctccctgacctggctccaggcaccagtccagccctctcccgctggtgtcacagtggcctgggctgccctgagcccctgccggctgccatccctgaggacgggcaccagccccgtgctcaccacagggcacctcttccctctgggtgtgcagcactcgtatccatggggtgaacaagcgagggatgacgcagatggcacagtatcattacaggatgcacagagggctttttccataaacaaaattctttgcattcactgccccctgcctctccagaactgtcccctctgaggcctcatctagtcagaggcccagggctggtgggccggagcggaccttcctcaccccatagccaccagccagcattcagcacagcagctttgaggtggcgatcgctatttccccaactcaatgaactaaagtactagaagaaaatctcccacaactcacaaaggaagagcaacttcccatttctgaaccctctgagctaaaccctgagaacttttggaaatggagagtcgatcctttttttaaaatgaagagtatacacacagctatttttttaaagcaatttagcggaaattcaccttgattcatggatggaagatttcattatgacttttaaggaaaaaagtacatgatttcaatataaaaatacatcttcatttgagcatagctgaggtattttccatctgcaaacagccagctctgagacacacacacttgccgtcctgtggaagcgtggctctgcctgtcacgcacgtctgcgcttgccgtcctgtggaagcgtggctctgcctgtcacgcacgtctgcgcttgccgtcctgtggaagcgtggctctgcctgtcacgcacgtgtgcgcttagtgcacatcactaagactctcctattcatgttgacaaaaaaatgccggatcatggaaacacaagctggtgacagggccaacaaaagagctcaaggtgggactccagctctccagcctgtctgtaggtaggaaaaactactcctggaagctcacctcagtgaatgcacctcagagtccaagagctgccgcgaatacagggcctggtggctgctatactgtgcgtctcagagcagagccagctctcccatcgccagcttgtaaaatccaagaaaacgaaattgcttgataaactacgagctg

SEQ ID NO: 351664 - DNA, 4663 bp, Homo sapiens
ctggggagctgtggctcagacctctggtttctgcgcctcctcactctccaaacccaacctcgaggttcccccgccgctgcgcaccctgggaagccctttctcaccaggagctctcaccccaatatcattctctccctcctcctccaactcctccgagcccaggtccgacatggtctcgccccagcctggatcacagccgcagcgcctctagcagctttatagaattgagagattgctgagcctaaatacatgttgctgcattgcctccgagaatggccggacctatccccactctcaccaaaacagagtgtgggactcactgctccctcgcctactagagcagagccactgccagaaggaaggggacaagacccagcaggacaccttctttccacgctttccagcctgtgggagcggcaggggcaacagagagaggatctggagccaggattaatgactcatttatgaagcatcttattctgcgaccgaggctcagtggtcagtggcgacgtaaatggctcgactccccgctggcattcgcttcatcatctcattctccagggatcagtggtacagagccttcatttttattttgacatttctgctgtatgcaagttttcacttatctcgaaagcctatcagcatagttaagggtgagctccacaagtactgcactgcttgggatgaagctgacgtcaggttcagcagccagaacaggaagtctgggtccgctgccccccaccagctccctgacaatgagaccgactgtggctgggcaccgtttgataagaacaactatcagcagctgcttggggccctggactactccttcctgtgcgcctatgccgtggggatgtacctcagtggcatcattggggagcgcctgccgattaggtattacctaactttcgggatgctcgccagcggagccttcaccgccctgttcggcttagggtatttctacaacatccacagtttcggattctacgtggtaactcaggtcatcaacgggctggtgcagaccaccggctggcccagcgtcgtcacctgcctcggcaactggtttggaaaaggaaggagaggtttgattatgggggtctggaactcccacacctccgtgggcaacatcttggggtcattgatcgctggctactgggtgtccacatgctggggcctgtccttcgtcgtgcctggagccatcgtggcagccatggggatagtgtgctttctcttcctcattgaacatccgaacgacgtcaggtgctcctccaccctggtgacgcactcaaaaggctatgagaatggtacaaacagattgagactccagaagcaaatcttgaagagcgaaaagaacaagcctctggacccagagatgcagtgcctgctgctctcagatgggaagggctccatccacccgaaccacgtcgtcattctccccggggacggtgggagtggcacggccgccatcagcttcacaggggccttgaaaattccaggcgtgatagagttctcactgtgtctgctgtttgccaagctggtcagctatactttcctcttctggctgcccctgtacatcacgaatgtggatcaccttgatgccaaaaaggcgggggagctctccaccctgtttgacgtgggcggaatctttggtgggatcctggcaggtgtgatctcagaccgactggagaaaagggcctccacctgcggcctgatgctgctgctcgcggcccccacgctctacatcttctccaccatcagcaagatggggcttgaggccaccatcgccatgctgctgctcagcggagccctggtcagtgggccctacacactcatcaccaccgccgtctccgccgacctggggactcataaaagtctgaaaggcaacgcgcacgccctctccaccgtgacggccatcattgacgggacgggctctgtaggagcagccctgggccccctgctggctgggctcctctccccgtccggctggagcaatgtgttttacatgctgatgtttgcagatgcctgtgccttactgttcctgatccgcctcatacacaaggagctgagctgcccagggtcagctacgggggaccaagttccatttaaggaacagtgacaccccaccccagtcccgtggagggggtctgggcccacccttcacaactgcctttcaaggacagttcagacaaagggccctgcatggaaagagtgacctccctttgccttttgcacacgcacctggaaaagacacagaagccaacctgagaacccctggtgctattttaaaggagacatattgctgaacagcagtgagaaaagtctgcaggaactgctgcctgagccaagccagagaaccgaagtcaccgtcatcccagcccctggccttcctgccgccctccggggccatggcgctgctgttcagctcaggcacaggggcacagcagaggtttgggaagcggtctccccaccggcactgggattggcgggtccaagcccagcaaccggcttcgctccacaacacacaccacacctgggactgtttttaatacatagcaacagactgggttatttatttaagatgtgtattgtgtcatatgaagtttaagagacataaatggcattttgttatttattaagacaaactccaattgttctctggctgtttttttcagttgtgtctagcaaaatacttatctgccctttgaaataaaatgtttttgtttaaaaaatctcagaacactcaagaatgttgatgatttctgcttacatttccattacgctaaaaaagggaacttccaaatcgtgttgtgtgttttgggttttctcaggcttggacacattgaggtttctcgggtttggacacatactgggaaaagaccatttccagcagaaaaggggcctacctctcggtcccttgtttgcacagaaggccaagctgaagtaaacagccatctgggtattttataaatcacgcagtttaaagaatatcctaagatttgtccttgacgaggaggtgtcacaccccgtggtggtggggaaaggtgctgaccttgggaactacatggtggggtccaggctttcaaacgtcctcagaatgctgaccgtccagatgtgcatggtgcgggctttctctggatggagtgctgtggaagttcacttggggacctctcacagcagcagggcaaaggtcagaaacaacacactgtgtgtcccgcagttctcaggggcctcctgcttgagctctgcggagaagcccacaggaggaacagacctggctgtggcggcttctgtgtgccagctgccccactagattggctcactctctttttaatggcaagttatttatacatttaaaagatttctgctaaaaaagaacttccctaaacaccaaatggatggagtgtgtttcccacacacgcagcgcactcagcttgtgctggcctttcccggtcctccacccaatgcttcccgctcctgggagcctcccactttccctctctccctgacctggctccaggcaccagtccagccctctcccgctggtgtcacagtggcctgggctgccctgagcccctgccggctgccatccctgaggacgggcaccagccccgtgctcaccacagggcacctcttccctctgggtgtgcagcactcgtatccatggggtgaacaagcgagggatgacgcagatggcacagtatcattacaggatgcacagagggctttttccataaacaaaattctttgcattcactgccccctgcctctccagaactgtcccctctgaggcctcatctagtcagaggcccagggctggtgggccggagcggaccttcctcaccccatagccaccagccagcattcagcacagcagctttgaggtggcgatcgctatttccccaactcaatgaactaaagtactagaagaaaatctcccacaactcacaaaggaagagcaacttcccatttctgaaccctctgagctaaaccctgagaacttttggaaatggagagtcgatcctttttttaaaatgaagagtatacacacagctatttttttaaagcaatttagcggaaattcaccttgattcatggatggaagatttcattatgacttttaaggaaaaaagtacatgatttcaatataaaaatacatcttcatttgagcatagctgaggtattttccatctgcaaacagccagctctgagacacacacacttgccgtcctgtggaagcgtggctctgcctgtcacgcacgtctgcgcttgccgtcctgtggaagcgtggctctgcctgtcacgcacgtctgcgcttgccgtcctgtggaagcgtggctctgcctgtcacgcacgtgtgcgcttagtgcacatcactaagactctcctattcatgttgacaaaaaaatgccggatcatggaaacacaagctggtgacagggccaacaaaagagctcaaggtgggactccagctctccagcctgtctgtaggtaggaaaaactactcctggaagctcacctcagtgaatgcacctcagagtccaagagctgccgcgaatacagggcctggtggctgctatactgtgcgtctcagagcagagccagctctcccatcgccagcttgtaaaatccaagaaaacgaaattgcttgataaactacgagctg

SEQ ID NO: 351665 - DNA, 4853 bp, Homo sapiens
ctggggagctgtggctcagacctctggtttctgcgcctcctcactctccaaacccaacctcgaggttcccccgccgctgcgcaccctgggaagccctttctcaccaggagctctcaccccaatatcattctctccctcctcctccaactcctccgagcccaggtccgacatggtctcgccccagcctggatcacagccgcagcgcctctagcagctttatagaattgagagattgctgagcctaaatacatgttgctgcattgcctccgagaatggccggacctatccccactctcaccaaaacagagtgtgggactcactgctccctcgcctactagagcagagccactgccagaaggaaggggacaagacccagcaggacaccttctttccacgctttccagcctgtgggagcggcaggggcaacagagagaggatctggagccaggattaatgactcatttatgaagcatcttattctgcgaccgaggctcagtggtcagtggcgacgtaaatggctcgactccccgctggcattcgcttcatcatctcattctccagggatcagtggtacagagccttcatttttattttgacatttctgctgtatgcaagttttcacttatctcgaaagcctatcagcatagttaagggtgagctccacaagtactgcactgcttgggatgaagctgacgtcaggttcagcagccagaacaggaagtctgggtccgctgccccccaccagctccctgacaatgagaccgactgtggctgggcaccgtttgataagaacaactatcagcagctgcttggggccctggactactccttcctgtgcgcctatgccgtggggatgtacctcagtggcatcattggggagcgcctgccgattaggtattacctaactttcgggatgctcgccagcggagccttcaccgccctgttcggcttagggtatttctacaacatccacagtttcggattctacgtggtaactcaggtcatcaacgggctggtgcagaccaccggctggcccagcgtcgtcacctgcctcggcaactggtttggaaaaggaaggagaggtttgattatgggggtctggaactcccacacctccgtgggcaacatcttggggtcattgatcgctggctactgggtgtccacatgctggggcctgtccttcgtcgtgcctggagccatcgtggcagccatggggatagtgtgctttctcttcctcattgaacatccgaacgacgtcaggtgctcctccaccctggtgacgcactcaaaaggctatgagaatggtacaaacagattgagactccagaagcaaatcttgaagagcgaaaagaacaagcctctggacccagagatgcagtgcctgctgctctcagatgggaagggctccatccacccgaaccacgtcgtcattctccccggggacggtgggagtggcacggccgccatcagcttcacaggggccttgaaaattccaggcgtgatagagttctcactgtgtctgctgtttgccaagctggtcagctatactttcctcttctggctgcccctgtacatcacgaatgtggatcaccttgatgccaaaaaggcgggggagctctccaccctgtttgacgtgggcggaatctttggtgggatcctggcaggtgtgatctcagaccgactggagaaaagggcctccacctgcggcctgatgctgctgctcgcggcccccacgctctacatcttctccaccatcagcaagatggggcttgaggccaccatcgccatgctgctgctcagcggagccctggtcagtgggccctacacactcatcaccaccgccgtctccgccgacctggggactcataaaagtctgaaaggcaacgcgcacgccctctccaccgtgacggccatcattgacgggacgggctctgtaggagcagccctgggccccctgctggctgggctcctctccccgtccggctggagcaatgtgttttacatgctgatgtttgcagatgcctgtgccttactgttcctgatccgcctcatacacaaggagctgagctgcccagggtcagctacgggggaccaagttccatttaaggaacagtgacaccccaccccagtcccgtggagggggtctgggcccacccttcacaactgcctttcaaggacagttcagacaaagggccctgcatggaaagagtgacctccctttgccttttgcacacgcacctggaaaagacacagaagccaacctgagaacccctggtgctattttaaaggagacatattgctgaacagcagtgagaaaagtctgcaggaactgctgcctgagccaagccagagaaccgaagacccggccggccctggcctcacaggcgtgtgcccatgcagccacccaaatgcacgcgtgacaacaaggccgggagggtggggggggtgcacaggtagccccgaccctctcaggcattccagccacagaacatcaaagtgagcgagtactgcgctggctgtggcttcagagaacctgtatgtgccacatggaaaaacaggacaccagagcccaccagacagtgccggccagcagagaagcagagagaaaagtctgcaggaactgctgcctgagccaagcttgggaagcggtctccccaccggcactgggattggcgggtccaagcccagcaaccggcttcgctccacaacacacaccacacctgggactgtttttaatacatagcaacagactgggttatttatttaagatgtgtattgtgtcatatgaagtttaagagacataaatggcattttgttatttattaagacaaactccaattgttctctggctgtttttttcagttgtgtctagcaaaatacttatctgccctttgaaataaaatgtttttgtttaaaaaatctcagaacactcaagaatgttgatgatttctgcttacatttccattacgctaaaaaagggaacttccaaatcgtgttgtgtgttttgggttttctcaggcttggacacattgaggtttctcgggtttggacacatactgggaaaagaccatttccagcagaaaaggggcctacctctcggtcccttgtttgcacagaaggccaagctgaagtaaacagccatctgggtattttataaatcacgcagtttaaagaatatcctaagatttgtccttgacgaggaggtgtcacaccccgtggtggtggggaaaggtgctgaccttgggaactacatggtggggtccaggctttcaaacgtcctcagaatgctgaccgtccagatgtgcatggtgcgggctttctctggatggagtgctgtggaagttcacttggggacctctcacagcagcagggcaaaggtcagaaacaacacactgtgtgtcccgcagttctcaggggcctcctgcttgagctctgcggagaagcccacaggaggaacagacctggctgtggcggcttctgtgtgccagctgccccactagattggctcactctctttttaatggcaagttatttatacatttaaaagatttctgctaaaaaagaacttccctaaacaccaaatggatggagtgtgtttcccacacacgcagcgcactcagcttgtgctggcctttcccggtcctccacccaatgcttcccgctcctgggagcctcccactttccctctctccctgacctggctccaggcaccagtccagccctctcccgctggtgtcacagtggcctgggctgccctgagcccctgccggctgccatccctgaggacgggcaccagccccgtgctcaccacagggcacctcttccctctgggtgtgcagcactcgtatccatggggtgaacaagcgagggatgacgcagatggcacagtatcattacaggatgcacagagggctttttccataaacaaaattctttgcattcactgccccctgcctctccagaactgtcccctctgaggcctcatctagtcagaggcccagggctggtgggccggagcggaccttcctcaccccatagccaccagccagcattcagcacagcagctttgaggtggcgatcgctatttccccaactcaatgaactaaagtactagaagaaaatctcccacaactcacaaaggaagagcaacttcccatttctgaaccctctgagctaaaccctgagaacttttggaaatggagagtcgatcctttttttaaaatgaagagtatacacacagctatttttttaaagcaatttagcggaaattcaccttgattcatggatggaagatttcattatgacttttaaggaaaaaagtacatgatttcaatataaaaatacatcttcatttgagcatagctgaggtattttccatctgcaaacagccagctctgagacacacacacttgccgtcctgtggaagcgtggctctgcctgtcacgcacgtctgcgcttgccgtcctgtggaagcgtggctctgcctgtcacgcacgtctgcgcttgccgtcctgtggaagcgtggctctgcctgtcacgcacgtgtgcgcttagtgcacatcactaagactctcctattcatgttgacaaaaaaatgccggatcatggaaacacaagctggtgacagggccaacaaaagagctcaaggtgggactccagctctccagcctgtctgtaggtaggaaaaactactcctggaagctcacctcagtgaatgcacctcagagtccaagagctgccgcgaatacagggcctggtggctgctatactgtgcgtctcagagcagagccagctctcccatcgccagcttgtaaaatccaagaaaacgaaattgcttgataaactacgagctg

SEQ ID NO: 351666 - DNA, 3092 bp, Homo sapiens
ctggggagctgtggctcagacctctggtttctgcgcctcctcactctccaaacccaacctcgaggttcccccgccgctgcgcaccctgggaagccctttctcaccaggagctctcaccccaatatcattctctccctcctcctccaactcctccgagcccaggtccgacatggtctcgccccagcctggatcacagccgcagcgcctctagcagctttatagaattgagagattgctgagcctaaatacatgttgctgcattgcctccgagaatggccggacctatccccactctcaccaaaacagagtgtgggactcactgctccctcgcctactagagcagagccactgccagaaggaaggggacaagacccagcaggacaccttctttccacgctttccagcctgtgggagcggcaggggcaacagagagaggatctggagccaggattaatgactcatttatgaagcatcttattctgcgaccgaggctcagtggtcagtggcgacgtaaatggctcgactccccgctggcattcgcttcatcatctcattctccagggatcagtggtacagagccttcatttttattttgacatttctgctgtatgcaagttttcacttatctcgaaagcctatcagcatagttaagggtgagctccacaagtactgcactgcttgggatgaagctgacgtcaggttcagcagccagaacaggaagtctgggtccgctgccccccaccagctccctgacaatgagaccgactgtggctgggcaccgtttgataagaacaactatcagcagctgcttggggccctggactactccttcctgtgcgcctatgccgtggggatgtacctcagtggcatcattggggagcgcctgccgattaggtattacctaactttcgggatgctcgccagcggagccttcaccgccctgttcggcttagggtatttctacaacatccacagtttcggattctacgtggtaactcaggtcatcaacgggctggtgcagaccaccggctggcccagcgtcgtcacctgcctcggcaactggtttggaaaaggaaggagaggtttgattatgggggtctggaactcccacacctccgtgggcaacatcttggggtcattgatcgctggctactgggtgtccacatgctggggcctgtccttcgtcgtgcctggagccatcgtggcagccatggggatagtgtgctttctcttcctcattgaacatccgaacgacgtcaggtgctcctccaccctggtgacgcactcaaaaggctatgagaatggtacaaacagattgagactccagaagcaaatcttgaagagcgaaaagaacaagcctctggacccagagatgcagtgcctgctgctctcagatgggaagggctccatccacccgaaccacgtcgtcattctccccggggacggtgggagtggcacggccgccatcagcttcacaggggccttgaaaattccaggcgtgatagagttctcactgtgtctgctgtttgccaagctggtcagctatactttcctcttctggctgcccctgtacatcacgaatgtggatcaccttgatgccaaaaaggcgggggagctctccaccctgtttgacgtgggcggaatctttggtgggatcctggcaggtgtgatctcagaccgactggagaaaagggcctccacctgcggcctgatgctgctgctcgcggcccccacgctctacatcttctccaccatcagcaagatggggcttgaggccaccatcgccatgctgctgctcagcggagccctggtcagtgggccctacacactcatcaccaccgccgtctccgccgacctggggactcataaaagtctgaaaggcaacgcgcacgccctctccaccgtgacggccatcattgacgggacgggctctgtaggagcagccctgggccccctgctggctgggctcctctccccgtccggctggagcaatgtgttttacatgctgatgtttgcagatgcctgtgccttactgttcctgatccgcctcatacacaaggagctgagctgcccagggtcagctacgggggaccaagttccatttaaggaacagtgacaccccaccccagtcccgtggagggggtctgggcccacccttcacaactgcctttcaaggacagttcagacaaagggccctgcatggaaagagtgacctccctttgccttttgcacacgcacctggaaaagacacagaagccaacctgagaacccctggtgctattttaaaggagacatattgctgaacagcagtgagaaaagtctgcaggaactgctgcctgagccaagccagagaaccgaagacccggccggccctggcctcacaggcgtgtgcccatgcagccacccaaatgcacgcgtgacaacaaggccgggagggtggggggggtgcacaggtagccccgaccctctcaggcattccagccacagaacatcaaagtgagcgagtactgcgctggctgtggcttcagagaacctgtatgtgccacatggaaaaacaggacaccagagcccaccagacagtgccggccagcagagaagcagagagccagcgccacacaacatcaagaaggccgacaaccaggttggaaaccaagacggagctcagacccaccacatcgccccagaggcttttccagcacccatgatgttccggactgacctaaaaactaattgtcgagaagccaagggtgaggaggcaggaagcacctccggttggaggcacccaggcttgccagccacagagcgccccgaagtcaccgtcatcccagcccctggccttcctgccgccctccggggccatggcgctgctgttcagctcaggcacaggggcacagcagaggtttgggaagcggtctccccaccggcactgggattggcgggtccaagcccagcaaccggcttcgctccacaacacacaccacacctgggactgtttttaatacatagcaacagactgggttatttatttaagatgtgtattgtgtcatatgaagtttaagagacataaatggcattttgttatttattaagac

SEQ ID NO: 351667 - DNA, 1996 bp, Homo sapiens
ctggggagctgtggctcagacctctggtttctgcgcctcctcactctccaaacccaacctcgaggttcccccgccgctgcgcaccctgggaagccctttctcaccaggagctctcaccccaatatcattctctccctcctcctccaactcctccgagcccaggtccgacatggtctcgccccagcctggatcacagccgcagcgcctctagcagctttatagaattgagagattgctgagcctaaatacatgttgctgcattgcctccgagaatggccggacctatccccactctcaccaaaacagagtgtgggactcactgctccctcgcctactagagcagagccactgccagaaggaaggggacaagacccagcaggacaccttctttccacgctttccagcctgtgggagcggcaggggcaacagagagaggatctggagccaggattaatgactcatttatgaagcatcttattctgcgaccgaggctcagtggtcagtggcgacgtaaatggctcgactccccgctggcattcgcttcatcatctcattctccagggatcagtggtacagagccttcatttttattttgacatttctgctgtatgcaagttttcacttatctcgaaagcctatcagcatagttaagggtgagctccacaagtactgcactgcttgggatgaagctgacgtcaggttcagcagccagaacaggaagtctgggtccgctgccccccaccagctccctgacaatgagaccgactgtggctgggcaccgtttgataagaacaactatcagcagctgcttggggccctggactactccttcctgtgcgcctatgccgtggggatgtacctcagtggcatcattggggagcgcctgccgattaggtattacctaactttcgggatgctcgccagcggagccttcaccgccctgttcggcttagggtatttctacaacatccacagtttcggattctacgtggtaactcaggtcatcaacgggctggtgcagaccaccggctggcccagcgtcgtcacctgcctcggcaactggtttggaaaaggaaggagaggtttgattatgggggtctggaactcccacacctccgtgggcaacatcttggggtcattgatcgctggctactgggtgtccacatgctggggcctgtccttcgtcgtgcctggagccatcgtggcagccatggggatagtgtgctttctcttcctcattgaacatccgaacgacgtcaggtgctcctccaccctggtgacgcactcaaaaggctatgagaatggtacaaacagattgagactccagaagcaaatcttgaagagcgaaaagaacaagcctctggacccagagatgcagtgcctgctgctctcagatgggaagggctccatccacccgaaccacgtcgtcattctccccggggacggtgggagtggcacggccgccatcagcttcacaggggccttgaaaattccaggcgtgatagagttctcactgtgtctgctgtttgccaagctggtcagctatactttcctcttctggctgcccctgtacatcacgaatgtggatcaccttgatgccaaaaaggcgggggagctctccaccctgtttgacgtgggcggaatctttggtgagttcattaagacttgttctgctgcaacaataatttcgcaaggcgcatgatctctgagttgattcactgctcaggggaacagggttccccaaggtctcatatcccctgagtgggcccagcccaagagggtcaggctgtcacctgggggtggttttattgtctcccgtccctccccagggccctgactctgcacttgaacagcttccctcagaaatagcatgccagctggactcaggggctcatgcctgttatccagcactgtgggatgctgagttgggaggatcgcttgaggtcttcttgttatgaagaccaacccgggcaacataacaagacccctctctaca

SEQ ID NO: 351668 - DNA, 776 bp, Homo sapiens
ctggggagctgtggctcagacctctggtttctgcgcctcctcactctccaaacccaacctcgaggttcccccgccgctgcgcaccctgggaagccctttctcaccaggagctctcaccccaatatcattctctccctcctcctccaactcctccgagcccaggtccgacatggtctcgccccagcctggatcacagccgcagcgcctctagcagctttatagaattgagagattgctgagcctaaatacatgttgctgcattgcctccgagaatggccggacctatccccactctcaccaaaacagagtgtgggactcactgctccctcgcctactgcataaactcaagaggaatttacaacagatgggctcaggcaacaagttagccccagagtggagctcagctacagaggaatgcttcactgaaagaaatgacagacaggtctgtcccacccacggtgactcagtcattgttgttcatggccgctgcccgttcttcacgatcaaggaggagaaatctttggaggaaacagagctttcatacgtgaatcgactgggaagcgagtcaaaagtactgcaactggaagtgtggcatggggagggggccgtggccagtctcctcactgggctcctgtaggactgggaacgcctactccttcacacctaattatgtttgctggattgggttatagttcttcagtgtgtggactcttgtcagttttatatccgtaggccgagcacaatgcctggaatacagagcatgcttaataatcaga

SEQ ID NO: 351669 - DNA, 463 bp, Homo sapiens
ggttatgtctttttattttttcagattgtgggatatttgcattacactggttgagcatctcaaatcccaattctgaaatgccccagtgagcatttcctttgagtgtcagcactcaaaaagttacaaattctggagattttggatttcaggttttcagatttggaaggctcaacctatactaggccttgtacccgctcccaatctgataggccaggatgaggtagtgtagttccatatgtgttcctttcattgtgagtgaggtgttgagccccattctctgtggctgctagttatgtgctgggattttctctaaacagcaccatgtgtgtccatttgcctgatttcaggagcagccctgggccccctgctggctgggctcctctccccgtccggctggagcaatgtgttttacatgctgatgtttgcagatgcctgtgccttactggtaagtcggcctattttt

SEQ ID NO: 351670 - DNA, 403 bp, Homo sapiens
ttgagccccattctctgtggctgctagttatgtgctgggattttctctaaacagcaccatgtgtgtccatttgcctgatttcaggagcagccctgggccccctgctggctgggctcctctccccgtccggctggagcaatgtgttttacatgctgatgtttgcagatgcctgtgccttactggtaagtcggcctatttttagtccaatccaccttgaatgcagatctctgtggttgtgtccaaacactggtggaactttctcccatgcattcctgagttatcagagaggtttgggtcttcccatcttttctaaatatgcgtggtctaaagctccttctctctctgattagaaaaagtcagaaacagaagcaggacagtcttgctctgcagccttgggcgggat

SEQ ID NO: 351671 - DNA, 886 bp, Homo sapiens
gcagggacagggcctgccccaagggccagtgactggggaggcagcaaggagcacccttggatcctgaggttccttccctgccttgtgacccccgcctcactttggccagtgagctgcacacagctgggccttctttctcccttcttcccctgtggttgcaaaaggggtgacgttctcaggacttgagtcttgaactgctgacatttccagtctgtttgaaaaaagcaaaattttctgtccatgccattgatgattcggaacggctgggtttgacccacagccccagatgccgtgcagtttcctctcccacacccggctggctcagtccaccttaaagcccagaacctgtacaaaacctcatggagggcaccctgagctggtgccgggaggcctctgtgtcctcatctgcagttctaaagccgtgtgacaggatgatcgagcatccaggcgccttccacacctccacttctgtcctgtgttaatctaactttatggcggaggggcccctgggggggtctctgaaccaaaggtgggataattagactgagcagaggaaagccacggtttttggttaagagtgttttcatcctttctgtgttacttgttttttaaatctgagttaactactaattgctcctcggtataaatcaagcttatgaagccagagtcccgtgcacgggtcctgttctgccatggtgtgtcgctgcgatgcgtgaaggagatcctcactgtttcacactccgttgtcatttcaatagatcaccttgatgccaaaaaggcgggggagctctccaccctgtttgacgtgggcggaatctttggtgagttcattaagacttgttctgctgcaacaataatttcgcaaggcgcatgatctctgagttga

SEQ ID NO: 351672 - DNA, 496 bp, Homo sapiens
ccccgctaacaccccagcccgcggccccaggtttgaatttccaaaggaggaattgctaaagcctgccctttccgggtctcccttagctctttgcctggaaggtgcctgcctgcctgcctgccggcccttgaacttaaatcgtctgaagttgtgtaagtggataaatattttagacttcccccgttgtttttttattaatcccctttgagagcaagcttgaaaacacctggccccagacctgtgattcaccaagtcattttggacctgcatttacacgttctgtttcatgcagcccacctgtgatgttctctttgttgggggttggaggcaggtaagggaggtggtgcaaatggaattcaggttccttgtacttcagccaaggggaaagagatagtgaccattttcattcatctttaatatggaaagcgcctttaaaagcaaaaagccatagaaagagcacactctggacaggaagttgtattctatctcgtaattt

SEQ ID NO: 351673 - DNA, 483 bp, Homo sapiens
acgtggcaatattttttaatgttccaatattatagtgacataagtaatattgataatggctgtagaactgaatgaataatacacagcataagaacgtttcagaacacagtgatatgtattcctaacataacttctgttatttcatatcatcctctcccactgttttgtgtttcaggtacagagccttcatttttattttgacatttctgctgtatgcaagttttcacttatctcgaaagcctatcagcatagttaaggtaagaatcatggaaagcactgcctgtcgtctctgtgaggagttcgtcacttgaaaagcttgtggggcagaggatggggatggtagcaggtacatggggaaacagattatgtagaaacaagttattctgctgctttggcttttcggtttccctttgctaaaattaaagtcttttaaatgttttttggatttatactttcagaggtagtagacttttagttttatta

SEQ ID NO: 351674 - DNA, 751 bp, Homo sapiens
gtgggaagttcgcgcaagtgcggctctgcagggaggagggagggccgaggggaaggccctcgagagagtggagggcaacagtggccacggttcctctgtacttcgtttcttccctttatagaattgagagattgctgagcctaaatacatgttgctgcattgcctccgagaatggccggacctatccccactctcaccaaaacagagtgtgggactcactgctccctcgcctactgcataaactcaagaggaatttacaacagatgggctcaggcaacaagttagccccagagtggagctcagctacagaggaatgcttcactgaaagaaatcttttctatggacctctggttttagagacaacatctagttctcttacatcccttgccacttcccctgatgctgtaggacagacaggtctgtcccacccacggtgactcagtcattgttgttcatggccgctgcccgttcttcacgatcaaggaggagaaatctttggaggaaacagagctttcatacgtgaatcgactgggaagcgagtcaaaagtactgcaactggaagtgtggcatggggagggggccgtggccagtctcctcactgggctcctgtaggactgggaacgcctactccttcacacctaattatgtttgctggattgggttatagttcttcagtgtgtggactcttgtcagttttatatccgtaggccgagcacaatgcctggaatacagagcatgcttaataatcaga

SEQ ID NO: 351675 - DNA, 521 bp, Homo sapiens
gtgggaagttcgcgcaagtgcggctctgcagggaggagggagggccgaggggaaggccctcgagagagtggagggcaacagtggccacggttcctctgtacttcgtttcttccctttatagaattgagagattgctgagcctaaatacatgttgctgcattgcctccgagaatggccggacctatccccactctcaccaaaacagagtgtgggactcactgctccctcgcctactatgtaaccttcctagggatgctgtttctaactgctgccggccccttcttaccatctctctggttgtgcttctgacgcattccctacacaactggaacgtgtttccaggtcagcctccctaagcacctcccaaggcctccaccccacagtgtcgcacagaacttgacacataccagatgctccaattattaaatattactgagtacttttagaaaattgggaacatacaataaagtataatgaagaaaataaagaaaaccaataatctcacttcccaaagataataa

SEQ ID NO: 351676 - DNA, 5015 bp, Homo sapiens
gtgggaagttcgcgcaagtgcggctctgcagggaggagggagggccgaggggaaggccctcgagagagtggagggcaacagtggccacggttcctctgtacttcgtttcttccctttatagaattgagagattgctgagcctaaatacatgttgctgcattgcctccgagaatggccggacctatccccactctcaccaaaacagagtgtgggactcactgctccctcgcctactagagcagagccactgccagaaggaaggggacaagacccagcaggacaccttctttccacgctttccagcctgtgggagcggcaggggcaacagagagaggatctggagccaggattaatgactcatttatgaagcatcttattctgcgaccgaggctcagtggtcagtggcgacgtaaatggctcgactccccgctggcattcgcttcatcatctcattctccagggatcagtggtacagagccttcatttttattttgacatttctgctgtatgcaagttttcacttatctcgaaagcctatcagcatagttaagggtgagctccacaagtactgcactgcttgggatgaagctgacgtcaggttcagcagccagaacaggaagtctgggtccgctgccccccaccagctccctgacaatgagaccgactgtggctgggcaccgtttgataagaacaactatcagcagctgcttggggccctggactactccttcctgtgcgcctatgccgtggggatgtacctcagtggcatcattggggagcgcctgccgattaggtattacctaactttcgggatgctcgccagcggagccttcaccgccctgttcggcttagggtatttctacaacatccacagtttcggattctacgtggtaactcaggtcatcaacgggctggtgcagaccaccggctggcccagcgtcgtcacctgcctcggcaactggtttggaaaaggaaggagaggtttgattatgggggtctggaactcccacacctccgtgggcaacatcttggggtcattgatcgctggctactgggtgtccacatgctggggcctgtccttcgtcgtgcctggagccatcgtggcagccatggggatagtgtgctttctcttcctcattgaacatccgaacgacgtcaggtgctcctccaccctggtgacgcactcaaaaggctatgagaatggtacaaacagattgagactccagaagcaaatcttgaagagcgaaaagaacaagcctctggacccagagatgcagtgcctgctgctctcagatgggaagggctccatccacccgaaccacgtcgtcattctccccggggacggtgggagtggcacggccgccatcagcttcacaggggccttgaaaattccaggcgtgatagagttctcactgtgtctgctgtttgccaagctggtcagctatactttcctcttctggctgcccctgtacatcacgaatgtggatcaccttgatgccaaaaaggcgggggagctctccaccctgtttgacgtgggcggaatctttggtgggatcctggcaggtgtgatctcagaccgactggagaaaagggcctccacctgcggcctgatgctgctgctcgcggcccccacgctctacatcttctccaccatcagcaagatggggcttgaggccaccatcgccatgctgctgctcagcggagccctggtcagtgggccctacacactcatcaccaccgccgtctccgccgacctggggactcataaaagtctgaaaggcaacgcgcacgccctctccaccgtgacggccatcattgacgggacgggctctgtaggagcagccctgggccccctgctggctgggctcctctccccgtccggctggagcaatgtgttttacatgctgatgtttgcagatgcctgtgccttactgttcctgatccgcctcatacacaaggagctgagctgcccagggtcagctacgggggaccaagttccatttaaggaacagtgacaccccaccccagtcccgtggagggggtctgggcccacccttcacaactgcctttcaaggacagttcagacaaagggccctgcatggaaagagtgacctccctttgccttttgcacacgcacctggaaaagacacagaagccaacctgagaacccctggtgctattttaaaggagacatattgctgaacagcagtgagaaaagtctgcaggaactgctgcctgagccaagccagagaaccgaagacccggccggccctggcctcacaggcgtgtgcccatgcagccacccaaatgcacgcgtgacaacaaggccgggagggtggggggggtgcacaggtagccccgaccctctcaggcattccagccacagaacatcaaagtgagcgagtactgcgctggctgtggcttcagagaacctgtatgtgccacatggaaaaacaggacaccagagcccaccagacagtgccggccagcagagaagcagagagccagcgccacacaacatcaagaaggccgacaaccaggttggaaaccaagacggagctcagacccaccacatcgccccagaggcttttccagcacccatgatgttccggactgacctaaaaactaattgtcgagaagccaagggtgaggaggcaggaagcacctccggttggaggcacccaggcttgccagccacagagcgccccgaagtcaccgtcatcccagcccctggccttcctgccgccctccggggccatggcgctgctgttcagctcaggcacaggggcacagcagaggtttgggaagcggtctccccaccggcactgggattggcgggtccaagcccagcaaccggcttcgctccacaacacacaccacacctgggactgtttttaatacatagcaacagactgggttatttatttaagatgtgtattgtgtcatatgaagtttaagagacataaatggcattttgttatttattaagacaaactccaattgttctctggctgtttttttcagttgtgtctagcaaaatacttatctgccctttgaaataaaatgtttttgtttaaaaaatctcagaacactcaagaatgttgatgatttctgcttacatttccattacgctaaaaaagggaacttccaaatcgtgttgtgtgttttgggttttctcaggcttggacacattgaggtttctcgggtttggacacatactgggaaaagaccatttccagcagaaaaggggcctacctctcggtcccttgtttgcacagaaggccaagctgaagtaaacagccatctgggtattttataaatcacgcagtttaaagaatatcctaagatttgtccttgacgaggaggtgtcacaccccgtggtggtggggaaaggtgctgaccttgggaactacatggtggggtccaggctttcaaacgtcctcagaatgctgaccgtccagatgtgcatggtgcgggctttctctggatggagtgctgtggaagttcacttggggacctctcacagcagcagggcaaaggtcagaaacaacacactgtgtgtcccgcagttctcaggggcctcctgcttgagctctgcggagaagcccacaggaggaacagacctggctgtggcggcttctgtgtgccagctgccccactagattggctcactctctttttaatggcaagttatttatacatttaaaagatttctgctaaaaaagaacttccctaaacaccaaatggatggagtgtgtttcccacacacgcagcgcactcagcttgtgctggcctttcccggtcctccacccaatgcttcccgctcctgggagcctcccactttccctctctccctgacctggctccaggcaccagtccagccctctcccgctggtgtcacagtggcctgggctgccctgagcccctgccggctgccatccctgaggacgggcaccagccccgtgctcaccacagggcacctcttccctctgggtgtgcagcactcgtatccatggggtgaacaagcgagggatgacgcagatggcacagtatcattacaggatgcacagagggctttttccataaacaaaattctttgcattcactgccccctgcctctccagaactgtcccctctgaggcctcatctagtcagaggcccagggctggtgggccggagcggaccttcctcaccccatagccaccagccagcattcagcacagcagctttgaggtggcgatcgctatttccccaactcaatgaactaaagtactagaagaaaatctcccacaactcacaaaggaagagcaacttcccatttctgaaccctctgagctaaaccctgagaacttttggaaatggagagtcgatcctttttttaaaatgaagagtatacacacagctatttttttaaagcaatttagcggaaattcaccttgattcatggatggaagatttcattatgacttttaaggaaaaaagtacatgatttcaatataaaaatacatcttcatttgagcatagctgaggtattttccatctgcaaacagccagctctgagacacacacacttgccgtcctgtggaagcgtggctctgcctgtcacgcacgtctgcgcttgccgtcctgtggaagcgtggctctgcctgtcacgcacgtctgcgcttgccgtcctgtggaagcgtggctctgcctgtcacgcacgtgtgcgcttagtgcacatcactaagactctcctattcatgttgacaaaaaaatgccggatcatggaaacacaagctggtgacagggccaacaaaagagctcaaggtgggactccagctctccagcctgtctgtaggtaggaaaaactactcctggaagctcacctcagtgaatgcacctcagagtccaagagctgccgcgaatacagggcctggtggctgctatactgtgcgtctcagagcagagccagctctcccatcgccagcttgtaaaatccaagaaaacgaaattgcttgataaactacgagctg

SEQ ID NO: 351677 - DNA, 5116 bp, Homo sapiens
ctggggagctgtggctcagacctctggtttctgcgcctcctcactctccaaacccaacctcgaggttcccccgccgctgcgcaccctgggaagccctttctcaccaggagctctcaccccaatatcattctctccctcctcctccaactcctccgagcccaggtccgacatggtctcgccccagcctggatcacagccgcagcgcctctagcagctttatagaattgagagattgctgagcctaaatacatgttgctgcattgcctccgagaatggccggacctatccccactctcaccaaaacagagtgtgggactcactgctccctcgcctactagagcagagccactgccagaaggaaggggacaagacccagcaggacaccttctttccacgctttccagcctgtgggagcggcaggggcaacagagagaggatctggagccaggattaatgactcatttatgaagcatcttattctgcgaccgaggctcagtggtcagtggcgacgtaaatggctcgactccccgctggcattcgcttcatcatctcattctccagggatcagtggtacagagccttcatttttattttgacatttctgctgtatgcaagttttcacttatctcgaaagcctatcagcatagttaagggtgagctccacaagtactgcactgcttgggatgaagctgacgtcaggttcagcagccagaacaggaagtctgggtccgctgccccccaccagctccctgacaatgagaccgactgtggctgggcaccgtttgataagaacaactatcagcagctgcttggggccctggactactccttcctgtgcgcctatgccgtggggatgtacctcagtggcatcattggggagcgcctgccgattaggtattacctaactttcgggatgctcgccagcggagccttcaccgccctgttcggcttagggtatttctacaacatccacagtttcggattctacgtggtaactcaggtcatcaacgggctggtgcagaccaccggctggcccagcgtcgtcacctgcctcggcaactggtttggaaaaggaaggagaggtttgattatgggggtctggaactcccacacctccgtgggcaacatcttggggtcattgatcgctggctactgggtgtccacatgctggggcctgtccttcgtcgtgcctggagccatcgtggcagccatggggatagtgtgctttctcttcctcattgaacatccgaacgacgtcaggtgctcctccaccctggtgacgcactcaaaaggctatgagaatggtacaaacagattgagactccagaagcaaatcttgaagagcgaaaagaacaagcctctggacccagagatgcagtgcctgctgctctcagatgggaagggctccatccacccgaaccacgtcgtcattctccccggggacggtgggagtggcacggccgccatcagcttcacaggggccttgaaaattccaggcgtgatagagttctcactgtgtctgctgtttgccaagctggtcagctatactttcctcttctggctgcccctgtacatcacgaatgtggatcaccttgatgccaaaaaggcgggggagctctccaccctgtttgacgtgggcggaatctttggtgggatcctggcaggtgtgatctcagaccgactggagaaaagggcctccacctgcggcctgatgctgctgctcgcggcccccacgctctacatcttctccaccatcagcaagatggggcttgaggccaccatcgccatgctgctgctcagcggagccctggtcagtgggccctacacactcatcaccaccgccgtctccgccgacctggggactcataaaagtctgaaaggcaacgcgcacgccctctccaccgtgacggccatcattgacgggacgggctctgtaggagcagccctgggccccctgctggctgggctcctctccccgtccggctggagcaatgtgttttacatgctgatgtttgcagatgcctgtgccttactgttcctgatccgcctcatacacaaggagctgagctgcccagggtcagctacgggggaccaagttccatttaaggaacagtgacaccccaccccagtcccgtggagggggtctgggcccacccttcacaactgcctttcaaggacagttcagacaaagggccctgcatggaaagagtgacctccctttgccttttgcacacgcacctggaaaagacacagaagccaacctgagaacccctggtgctattttaaaggagacatattgctgaacagcagtgagaaaagtctgcaggaactgctgcctgagccaagccagagaaccgaagacccggccggccctggcctcacaggcgtgtgcccatgcagccacccaaatgcacgcgtgacaacaaggccgggagggtggggggggtgcacaggtagccccgaccctctcaggcattccagccacagaacatcaaagtgagcgagtactgcgctggctgtggcttcagagaacctgtatgtgccacatggaaaaacaggacaccagagcccaccagacagtgccggccagcagagaagcagagagccagcgccacacaacatcaagaaggccgacaaccaggttggaaaccaagacggagctcagacccaccacatcgccccagaggcttttccagcacccatgatgttccggactgacctaaaaactaattgtcgagaagccaagggtgaggaggcaggaagcacctccggttggaggcacccaggcttgccagccacagagcgccccgaagtcaccgtcatcccagcccctggccttcctgccgccctccggggccatggcgctgctgttcagctcaggcacaggggcacagcagaggtttgggaagcggtctccccaccggcactgggattggcgggtccaagcccagcaaccggcttcgctccacaacacacaccacacctgggactgtttttaatacatagcaacagactgggttatttatttaagatgtgtattgtgtcatatgaagtttaagagacataaatggcattttgttatttattaagacaaactccaattgttctctggctgtttttttcagttgtgtctagcaaaatacttatctgccctttgaaataaaatgtttttgtttaaaaaatctcagaacactcaagaatgttgatgatttctgcttacatttccattacgctaaaaaagggaacttccaaatcgtgttgtgtgttttgggttttctcaggcttggacacattgaggtttctcgggtttggacacatactgggaaaagaccatttccagcagaaaaggggcctacctctcggtcccttgtttgcacagaaggccaagctgaagtaaacagccatctgggtattttataaatcacgcagtttaaagaatatcctaagatttgtccttgacgaggaggtgtcacaccccgtggtggtggggaaaggtgctgaccttgggaactacatggtggggtccaggctttcaaacgtcctcagaatgctgaccgtccagatgtgcatggtgcgggctttctctggatggagtgctgtggaagttcacttggggacctctcacagcagcagggcaaaggtcagaaacaacacactgtgtgtcccgcagttctcaggggcctcctgcttgagctctgcggagaagcccacaggaggaacagacctggctgtggcggcttctgtgtgccagctgccccactagattggctcactctctttttaatggcaagttatttatacatttaaaagatttctgctaaaaaagaacttccctaaacaccaaatggatggagtgtgtttcccacacacgcagcgcactcagcttgtgctggcctttcccggtcctccacccaatgcttcccgctcctgggagcctcccactttccctctctccctgacctggctccaggcaccagtccagccctctcccgctggtgtcacagtggcctgggctgccctgagcccctgccggctgccatccctgaggacgggcaccagccccgtgctcaccacagggcacctcttccctctgggtgtgcagcactcgtatccatggggtgaacaagcgagggatgacgcagatggcacagtatcattacaggatgcacagagggctttttccataaacaaaattctttgcattcactgccccctgcctctccagaactgtcccctctgaggcctcatctagtcagaggcccagggctggtgggccggagcggaccttcctcaccccatagccaccagccagcattcagcacagcagctttgaggtggcgatcgctatttccccaactcaatgaactaaagtactagaagaaaatctcccacaactcacaaaggaagagcaacttcccatttctgaaccctctgagctaaaccctgagaacttttggaaatggagagtcgatcctttttttaaaatgaagagtatacacacagctatttttttaaagcaatttagcggaaattcaccttgattcatggatggaagatttcattatgacttttaaggaaaaaagtacatgatttcaatataaaaatacatcttcatttgagcatagctgaggtattttccatctgcaaacagccagctctgagacacacacacttgccgtcctgtggaagcgtggctctgcctgtcacgcacgtctgcgcttgccgtcctgtggaagcgtggctctgcctgtcacgcacgtctgcgcttgccgtcctgtggaagcgtggctctgcctgtcacgcacgtgtgcgcttagtgcacatcactaagactctcctattcatgttgacaaaaaaatgccggatcatggaaacacaagctggtgacagggccaacaaaagagctcaaggtgggactccagctctccagcctgtctgtaggtaggaaaaactactcctggaagctcacctcagtgaatgcacctcagagtccaagagctgccgcgaatacagggcctggtggctgctatactgtgcgtctcagagcagagccagctctcccatcgccagcttgtaaaatccaagaaaacgaaattgcttgataaactacgagctg

SEQ ID NO: 351678 - DNA, 3684 bp, Homo sapiens
gatctaaggatcccctggtacgggagtggacggcgccatcatcacagggccttgaaaattccaggcgtgatagagttctcactgtgtctgctgtttgccaagctggtcagctatactttcctcttctggctgcccctgtacatcacgaatgtggatcaccttgatgccaaaaaggcgggggagctctccaccctgtttgacgtgggcggaatctttggtgggatcctggcaggtgtgatctcagaccgactggagaaaagggcctccacctgcggcctgatgctgctgctcgcggcccccacgctctacatcttctccaccatcagcaagatggggcttgaggccaccatcgccatgctgctgctcagcggagccctggtcagtgggccctacacactcatcaccaccgccgtctccgccgacctggggactcataaaagtctgaaaggcaacgcgcacgccctctccaccgtgacggccatcattgacgggacgggctctgtaggagcagccctgggccccctgctggctgggctcctctccccgtccggctggagcaatgtgttttacatgctgatgtttgcagatgcctgtgccttactgttcctgatccgcctcatacacaaggagctgagctgcccagggtcagctacgggggaccaagttccatttaaggaacagtgacaccccaccccagtcccgtggagggggtctgggcccacccttcacaactgcctttcaaggacagttcagacaaagggccctgcatggaaagagtgacctccctttgccttttgcacacgcacctggaaaagacacagaagccaacctgagaacccctggtgctattttaaaggagacatattgctgaacagcagtgagaaaagtctgcaggaactgctgcctgagccaagccagagaaccgaagacccggccggccctggcctcacaggcgtgtgcccatgcagccacccaaatgcacgcgtgacaacaaggccgggagggtggggggggtgcacaggtagccccgaccctctcaggcattccagccacagaacatcaaagtgagcgagtactgcgctggctgtggcttcagagaacctgtatgtgccacatggaaaaacaggacaccagagcccaccagacagtgccggccagcagagaagcagagagccagcgccacacaacatcaagaaggccgacaaccaggttggaaaccaagacggagctcagacccaccacatcgccccagaggcttttccagcacccatgatgttccggactgacctaaaaactaattgtcgagaagccaagggtgaggaggcaggaagcacctccggttggaggcacccaggcttgccagccacagagcgccccgaagtcaccgtcatcccagcccctggccttcctgccgccctccggggccatggcgctgctgttcagctcaggcacaggggcacagcagaggtttgggaagcggtctccccaccggcactgggattggcgggtccaagcccagcaaccggcttcgctccacaacacacaccacacctgggactgtttttaatacatagcaacagactgggttatttatttaagatgtgtattgtgtcatatgaagtttaagagacataaatggcattttgttatttattaagacaaactccaattgttctctggctgtttttttcagttgtgtctagcaaaatacttatctgccctttgaaataaaatgtttttgtttaaaaaatctcagaacactcaagaatgttgatgatttctgcttacatttccattacgctaaaaaagggaacttccaaatcgtgttgtgtgttttgggttttctcaggcttggacacattgaggtttctcgggtttggacacatactgggaaaagaccatttccagcagaaaaggggcctacctctcggtcccttgtttgcacagaaggccaagctgaagtaaacagccatctgggtattttataaatcacgcagtttaaagaatatcctaagatttgtccttgacgaggaggtgtcacaccccgtggtggtggggaaaggtgctgaccttgggaactacatggtggggtccaggctttcaaacgtcctcagaatgctgaccgtccagatgtgcatggtgcgggctttctctggatggagtgctgtggaagttcacttggggacctctcacagcagcagggcaaaggtcagaaacaacacactgtgtgtcccgcagttctcaggggcctcctgcttgagctctgcggagaagcccacaggaggaacagacctggctgtggcggcttctgtgtgccagctgccccactagattggctcactctctttttaatggcaagttatttatacatttaaaagatttctgctaaaaaagaacttccctaaacaccaaatggatggagtgtgtttcccacacacgcagcgcactcagcttgtgctggcctttcccggtcctccacccaatgcttcccgctcctgggagcctcccactttccctctctccctgacctggctccaggcaccagtccagccctctcccgctggtgtcacagtggcctgggctgccctgagcccctgccggctgccatccctgaggacgggcaccagccccgtgctcaccacagggcacctcttccctctgggtgtgcagcactcgtatccatggggtgaacaagcgagggatgacgcagatggcacagtatcattacaggatgcacagagggctttttccataaacaaaattctttgcattcactgccccctgcctctccagaactgtcccctctgaggcctcatctagtcagaggcccagggctggtgggccggagcggaccttcctcaccccatagccaccagccagcattcagcacagcagctttgaggtggcgatcgctatttccccaactcaatgaactaaagtactagaagaaaatctcccacaactcacaaaggaagagcaacttcccatttctgaaccctctgagctaaaccctgagaacttttggaaatggagagtcgatcctttttttaaaatgaagagtatacacacagctatttttttaaagcaatttagcggaaattcaccttgattcatggatggaagatttcattatgacttttaaggaaaaaagtacatgatttcaatataaaaatacatcttcatttgagcatagctgaggtattttccatctgcaaacagccagctctgagacacacacacttgccgtcctgtggaagcgtggctctgcctgtcacgcacgtctgcgcttgccgtcctgtggaagcgtggctctgcctgtcacgcacgtctgcgcttgccgtcctgtggaagcgtggctctgcctgtcacgcacgtgtgcgcttagtgcacatcactaagactctcctattcatgttgacaaaaaaatgccggatcatggaaacacaagctggtgacagggccaacaaaagagctcaaggtgggactccagctctccagcctgtctgtaggtaggaaaaactactcctggaagctcacctcagtgaatgcacctcagagtccaagagctgccgcgaatacagggcctggtggctgctatactgtgcgtctcagagcagagccagctctcccatcgccagcttgtaaaatccaagaaaacgaaattgcttgataaactacgagctg

SEQ ID NO: 351679 - DNA, 4959 bp, Homo sapiens
ctggggagctgtggctcagacctctggtttctgcgcctcctcactctccaaacccaacctcgaggttcccccgccgctgcgcaccctgggaagccctttctcaccaggagctctcaccccaatatcattctctccctcctcctccaactcctccgagcccaggtccgacatggtctcgccccagcctggatcacagccgcagcgcctctagcagctttatagaattgagagattgctgagcctaaatacatgttgctgcattgcctccgagaatggccggacctatccccactctcaccaaaacagagtgtgggactcactgctccctcgcctactagagcagagccactgccagaaggaaggggacaagacccagcaggacaccttctttccacgctttccagcctgtgggagcggcaggggcaacagagagaggatctggagccaggattaatgactcatttatgaagcatcttattctgcgaccgaggctcagtggtcagtggcgacgtaaatggctcgactccccgctggcattcgcttcatcatctcattctccagggatcagtggtacagagccttcatttttattttgacatttctgctgtatgcaagttttcacttatctcgaaagcctatcagcatagttaagggtgagctccacaagtactgcactgcttgggatgaagctgacgtcaggttcagcagccagaacaggaagtctgggtccgctgccccccaccagctccctgacaatgagaccgactgtggctgggcaccgtttgataagaacaactatcagcagctgcttggggccctggactactccttcctgtgcgcctatgccgtggggatgtacctcagtggcatcattggggagcgcctgccgattaggtattacctaactttcgggatgctcgccagcggagccttcaccgccctgttcggcttagggtatttctacaacatccacagtttcggattctacgtggtaactcaggtcatcaacgggctggtgcagaccaccggctggcccagcgtcgtcacctgcctcggcaactggtttggaaaaggaaggagaggtttgattatgggggtctggaactcccacacctccgtgggcaacatcttggggtcattgatcgctggctactgggtgtccacatgctggggcctgtccttcgtcgtgcctggagccatcgtggcagccatggggatagtgtgctttctcttcctcattgaacatccgaacgacgtcaggtgctcctccaccctggtgacgcactcaaaaggctatgagaatggtacaaacagattgagactccagaagcaaatcttgaagagcgaaaagaacaagcctctggacccagagatgcagtgcctgctgctctcagatgggaagggctccatccacccgaaccacgtcgtcattctccccggggacggtgggagtggcacggccgccatcagcttcacaggggccttgaaaattccaggcgtgatagagttctcactgtgtctgctgtttgccaagctggtcagctatactttcctcttctggctgcccctgtacatcacgaatgtggatcaccttgatgccaaaaaggcgggggagctctccaccctgtttgacgtgggcggaatctttggtgggatcctggcaggtgtgatctcagaccgactggagaaaagggcctccacctgcggcctgatgctgctgctcgcggcccccacgctctacatcttctccaccatcagcaagatggggcttgaggccaccatcgccatgctgctgctcagcggagccctggtcagtgggccctacacactcatcaccaccgccgtctccgccgacctggggactcataaaagtctgaaaggcaacgcgcacgccctctccaccgtgacggccatcattgacgggacgggctctgtaggagcagccctgggccccctgctggctgggctcctctccccgtccggctggagcaatgtgttttacatgctgatgtttgcagatgcctgtgccttactgttcctgatccgcctcatacacaaggagctgagctgcccagggtcagctacgggggaccaagttccatttaaggaacagtgacaccccaccccagtcccgtggagggggtctgggcccacccttcacaactgcctttcaaggacagttcagacaaagggccctgcatggaaagagtgacctccctttgccttttgcacacgcacctggaaaagacacagaagccaacctgagaacccctggtgctattttaaaggagacatattgctgaacagcagtgagaaaagtctgcaggaactgctgcctgagccaagccagagaaccgaagacccggccggccctggcctcacaggcgtgtgcccatgcagccacccaaatgcacgcgtgacaacaaggccgggagggtggggggggtgcacaggtagccccgaccctctcaggcattccagccacagaacatcaaagtgagcgagtactgcgctggctgtggcttcagagaacctgtatgtgccacatggaaaaacaggacaccagagcccaccagacagtgccggccagcagagaagcagagagccagcgccacacaacatcaagaaggcttgccagccacagagcgccccgaagtcaccgtcatcccagcccctggccttcctgccgccctccggggccatggcgctgctgttcagctcaggcacaggggcacagcagaggtttgggaagcggtctccccaccggcactgggattggcgggtccaagcccagcaaccggcttcgctccacaacacacaccacacctgggactgtttttaatacatagcaacagactgggttatttatttaagatgtgtattgtgtcatatgaagtttaagagacataaatggcattttgttatttattaagacaaactccaattgttctctggctgtttttttcagttgtgtctagcaaaatacttatctgccctttgaaataaaatgtttttgtttaaaaaatctcagaacactcaagaatgttgatgatttctgcttacatttccattacgctaaaaaagggaacttccaaatcgtgttgtgtgttttgggttttctcaggcttggacacattgaggtttctcgggtttggacacatactgggaaaagaccatttccagcagaaaaggggcctacctctcggtcccttgtttgcacagaaggccaagctgaagtaaacagccatctgggtattttataaatcacgcagtttaaagaatatcctaagatttgtccttgacgaggaggtgtcacaccccgtggtggtggggaaaggtgctgaccttgggaactacatggtggggtccaggctttcaaacgtcctcagaatgctgaccgtccagatgtgcatggtgcgggctttctctggatggagtgctgtggaagttcacttggggacctctcacagcagcagggcaaaggtcagaaacaacacactgtgtgtcccgcagttctcaggggcctcctgcttgagctctgcggagaagcccacaggaggaacagacctggctgtggcggcttctgtgtgccagctgccccactagattggctcactctctttttaatggcaagttatttatacatttaaaagatttctgctaaaaaagaacttccctaaacaccaaatggatggagtgtgtttcccacacacgcagcgcactcagcttgtgctggcctttcccggtcctccacccaatgcttcccgctcctgggagcctcccactttccctctctccctgacctggctccaggcaccagtccagccctctcccgctggtgtcacagtggcctgggctgccctgagcccctgccggctgccatccctgaggacgggcaccagccccgtgctcaccacagggcacctcttccctctgggtgtgcagcactcgtatccatggggtgaacaagcgagggatgacgcagatggcacagtatcattacaggatgcacagagggctttttccataaacaaaattctttgcattcactgccccctgcctctccagaactgtcccctctgaggcctcatctagtcagaggcccagggctggtgggccggagcggaccttcctcaccccatagccaccagccagcattcagcacagcagctttgaggtggcgatcgctatttccccaactcaatgaactaaagtactagaagaaaatctcccacaactcacaaaggaagagcaacttcccatttctgaaccctctgagctaaaccctgagaacttttggaaatggagagtcgatcctttttttaaaatgaagagtatacacacagctatttttttaaagcaatttagcggaaattcaccttgattcatggatggaagatttcattatgacttttaaggaaaaaagtacatgatttcaatataaaaatacatcttcatttgagcatagctgaggtattttccatctgcaaacagccagctctgagacacacacacttgccgtcctgtggaagcgtggctctgcctgtcacgcacgtctgcgcttgccgtcctgtggaagcgtggctctgcctgtcacgcacgtctgcgcttgccgtcctgtggaagcgtggctctgcctgtcacgcacgtgtgcgcttagtgcacatcactaagactctcctattcatgttgacaaaaaaatgccggatcatggaaacacaagctggtgacagggccaacaaaagagctcaaggtgggactccagctctccagcctgtctgtaggtaggaaaaactactcctggaagctcacctcagtgaatgcacctcagagtccaagagctgccgcgaatacagggcctggtggctgctatactgtgcgtctcagagcagagccagctctcccatcgccagcttgtaaaatccaagaaaacgaaattgcttgataaactacgagctg

SEQ ID NO: 351680 - DNA, 4978 bp, Homo sapiens
ctggggagctgtggctcagacctctggtttctgcgcctcctcactctccaaacccaacctcgaggttcccccgccgctgcgcaccctgggaagccctttctcaccaggagctctcaccccaatatcattctctccctcctcctccaactcctccgagcccaggtccgacatggtctcgccccagcctggatcacagccgcagcgcctctagcagctttatagaattgagagattgctgagcctaaatacatgttgctgcattgcctccgagaatggccggacctatccccactctcaccaaaacagagtgtgggactcactgctccctcgcctactagagcagagccactgccagaaggaaggggacaagacccagcaggacaccttctttccacgctttccagcctgtgggagcggcaggggcaacagagagaggatctggagccaggattaatgactcatttatgaagcatcttattctgcgaccgaggctcagtggtcagtggcgacgtaaatggctcgactccccgctggcattcgcttcatcatctcattctccagggatcagtggtacagagccttcatttttattttgacatttctgctgtatgcaagttttcacttatctcgaaagcctatcagcatagttaagggtgagctccacaagtactgcactgcttgggatgaagctgacgtcaggttcagcagccagaacaggaagtctgggtccgctgccccccaccagctccctgacaatgagaccgactgtggctgggcaccgtttgataagaacaactatcagcagctgcttggggccctggactactccttcctgtgcgcctatgccgtggggatgtacctcagtggcatcattggggagcgcctgccgattaggtattacctaactttcgggatgctcgccagcggagccttcaccgccctgttcggcttagggtatttctacaacatccacagtttcggattctacgtggtaactcaggtcatcaacgggctggtgcagaccaccggctggcccagcgtcgtcacctgcctcggcaactggtttggaaaaggaaggagaggtttgattatgggggtctggaactcccacacctccgtgggcaacatcttggggtcattgatcgctggctactgggtgtccacatgctggggcctgtccttcgtcgtgcctggagccatcgtggcagccatggggatagtgtgctttctcttcctcattgaacatccgaacgacgtcaggtgctcctccaccctggtgacgcactcaaaaggctatgagaatggtacaaacagattgagactccagaagcaaatcttgaagagcgaaaagaacaagcctctggacccagagatgcagtgcctgctgctctcagatgggaagggctccatccacccgaaccacgtcgtcattctccccggggacggtgggagtggcacggccgccatcagcttcacaggggccttgaaaattccaggcgtgatagagttctcactgtgtctgctgtttgccaagctggtcagctatactttcctcttctggctgcccctgtacatcacgaatgtggatcaccttgatgccaaaaaggcgggggagctctccaccctgtttgacgtgggcggaatctttggtgggatcctggcaggtgtgatctcagaccgactggagaaaagggcctccacctgcggcctgatgctgctgctcgcggcccccacgctctacatcttctccaccatcagcaagatggggcttgaggccaccatcgccatgctgctgctcagcggagccctggtcagtgggccctacacactcatcaccaccgccgtctccgccgacctggggactcataaaagtctgaaaggcaacgcgcacgccctctccaccgtgacggccatcattgacgggacgggctctgtaggagcagccctgggccccctgctggctgggctcctctccccgtccggctggagcaatgtgttttacatgctgatgtttgcagatgcctgtgccttactgttcctgatccgcctcatacacaaggagctgagctgcccagggtcagctacgggggaccaagttccatttaaggaacagtgacaccccaccccagtcccgtggagggggtctgggcccacccttcacaactgcctttcaaggacagttcagacaaagggccctgcatggaaagagtgacctccctttgccttttgcacacgcacctggaaaagacacagaagccaacctgagaacccctggtgctattttaaaggagacatattgctgaacagcagtgagaaaagtctgcaggaactgctgcctgagccaagccagagaaccgaagacccggccggccctggcctcacaggcgtgtgcccatgcagccacccaaatgcacgcgtgacaacaaggccgggagggtggggggggtgcacaggtagccccgaccctctcaggcattccagccacagaacatcaaagtgagcgagtactgcgctggctgtggcttcagagaacctgtatgtgccacatggaaaaacaggacaccagagcccaccagacagtgccggccagcagagaagcagagagccagcgccacacaacatcaagaaggccgacaaccaggttggaaaccaagacggagctcagacccaccacatcgccccagaggcttttccagcacccatgatgttccggactgacctaaaaactaattgtcgagaagccaagggtgaggaggcaggaagttgggaagcggtctccccaccggcactgggattggcgggtccaagcccagcaaccggcttcgctccacaacacacaccacacctgggactgtttttaatacatagcaacagactgggttatttatttaagatgtgtattgtgtcatatgaagtttaagagacataaatggcattttgttatttattaagacaaactccaattgttctctggctgtttttttcagttgtgtctagcaaaatacttatctgccctttgaaataaaatgtttttgtttaaaaaatctcagaacactcaagaatgttgatgatttctgcttacatttccattacgctaaaaaagggaacttccaaatcgtgttgtgtgttttgggttttctcaggcttggacacattgaggtttctcgggtttggacacatactgggaaaagaccatttccagcagaaaaggggcctacctctcggtcccttgtttgcacagaaggccaagctgaagtaaacagccatctgggtattttataaatcacgcagtttaaagaatatcctaagatttgtccttgacgaggaggtgtcacaccccgtggtggtggggaaaggtgctgaccttgggaactacatggtggggtccaggctttcaaacgtcctcagaatgctgaccgtccagatgtgcatggtgcgggctttctctggatggagtgctgtggaagttcacttggggacctctcacagcagcagggcaaaggtcagaaacaacacactgtgtgtcccgcagttctcaggggcctcctgcttgagctctgcggagaagcccacaggaggaacagacctggctgtggcggcttctgtgtgccagctgccccactagattggctcactctctttttaatggcaagttatttatacatttaaaagatttctgctaaaaaagaacttccctaaacaccaaatggatggagtgtgtttcccacacacgcagcgcactcagcttgtgctggcctttcccggtcctccacccaatgcttcccgctcctgggagcctcccactttccctctctccctgacctggctccaggcaccagtccagccctctcccgctggtgtcacagtggcctgggctgccctgagcccctgccggctgccatccctgaggacgggcaccagccccgtgctcaccacagggcacctcttccctctgggtgtgcagcactcgtatccatggggtgaacaagcgagggatgacgcagatggcacagtatcattacaggatgcacagagggctttttccataaacaaaattctttgcattcactgccccctgcctctccagaactgtcccctctgaggcctcatctagtcagaggcccagggctggtgggccggagcggaccttcctcaccccatagccaccagccagcattcagcacagcagctttgaggtggcgatcgctatttccccaactcaatgaactaaagtactagaagaaaatctcccacaactcacaaaggaagagcaacttcccatttctgaaccctctgagctaaaccctgagaacttttggaaatggagagtcgatcctttttttaaaatgaagagtatacacacagctatttttttaaagcaatttagcggaaattcaccttgattcatggatggaagatttcattatgacttttaaggaaaaaagtacatgatttcaatataaaaatacatcttcatttgagcatagctgaggtattttccatctgcaaacagccagctctgagacacacacacttgccgtcctgtggaagcgtggctctgcctgtcacgcacgtctgcgcttgccgtcctgtggaagcgtggctctgcctgtcacgcacgtctgcgcttgccgtcctgtggaagcgtggctctgcctgtcacgcacgtgtgcgcttagtgcacatcactaagactctcctattcatgttgacaaaaaaatgccggatcatggaaacacaagctggtgacagggccaacaaaagagctcaaggtgggactccagctctccagcctgtctgtaggtaggaaaaactactcctggaagctcacctcagtgaatgcacctcagagtccaagagctgccgcgaatacagggcctggtggctgctatactgtgcgtctcagagcagagccagctctcccatcgccagcttgtaaaatccaagaaaacgaaattgcttgataaactacgagctg

SEQ ID NO: 351681 - DNA, 2216 bp, Homo sapiens
ctggggagctgtggctcagacctctggtttctgcgcctcctcactctccaaacccaacctcgaggttcccccgccgctgcgcaccctgggaagccctttctcaccaggagctctcaccccaatatcattctctccctcctcctccaactcctccgagcccaggtccgacatggtctcgccccagcctggatcacagccgcagcgcctctagcagctttatagaattgagagattgctgagcctaaatacatgttgctgcattgcctccgagaatggccggacctatccccactctcaccaaaacagagtgtgggactcactgctccctcgcctactagagcagagccactgccagaaggaaggggacaagacccagcaggacaccttctttccacgctttccagcctgtgggagcggcaggggcaacagagagaggatctggagccaggattaatgactcatttatgaagcatcttattctgcgaccgaggctcagtggtcagtggcgacgtaaatggctcgactccccgctggcattcgcttcatcatctcattctccagggatcagtggtacagagccttcatttttattttgacatttctgctgtatgcaagttttcacttatctcgaaagcctatcagcatagttaagggtgagctccacaagtactgcactgcttgggatgaagctgacgtcaggttcagcagccagaacaggaagtctgggtccgctgccccccaccagctccctgacaatgagaccgactgtggctgggcaccgtttgataagaacaactatcagcagctgcttggggccctggactactccttcctgtgcgcctatgccgtggggatgtacctcagtggcatcattggggagcgcctgccgattaggtattacctaactttcgggatgctcgccagcggagccttcaccgccctgttcggcttagggtatttctacaacatccacagtttcggattctacgtggtaactcaggtcatcaacgggctggtgcagaccaccggctggcccagcgtcgtcacctgcctcggcaactggtttggaaaaggaaggagaggtttgattatgggggtctggaactcccacacctccgtgggcaacatcttggggtcattgatcgctggctactgggtgtccacatgctggggcctgtccttcgtcgtgcctggagccatcgtggcagccatggggatagtgtgctttctcttcctcattgaacatccgaacgacgtcaggtgctcctccaccctggtgacgcactcaaaaggctatgagaatggtacaaacagattgagactccagaagcaaatcttgaagagcgaaaagaacaagcctctggacccagagatgcagtgcctgctgctctcagatgggaagggctccatccacccgaaccacgtcgtcattctccccggggacggtgggagtggcacggccgccatcagcttcacaggggccttgaaaattccaggcgtgatagagttctcactgtgtctgctgtttgccaagctggtcagctatactttcctcttctggctgcccctgtacatcacgaatgtggatcaccttgatgccaaaaaggcgggggagctctccaccctgtttgacgtgggcggaatctttggtgggatcctggcaggtgtgatctcagaccgactggagaaaagggcctccacctgcggcctgatgctgctgctcgcggcccccacgctctacatcttctccaccatcagcaagatggggcttgaggccaccatcgccatgctgctgctcagcggagccctggtcagtgggccctacacactcatcaccaccgccgtctccgccgacctggggactcataaaagtctgaaaggcaacgcgcacgccctctccaccgtgacggccatcattgacgggacgggctctgtaggagcagccctgggccccctgctggctgggctcctctccccgtccggctggagcaatgtgttttacatgctgatgtttgcagatgcctgtgccttactggaaattctaaaactcaacttccccaccacatacaaaatcaaataccaactctcaacctatgaacttactaggtttaagtggctgttctttggatcatctgtgggttcttttaatgcctgaatgttctaatgaagcctccagatggatttccactaagtagcagtaaaattcctgtcattac

SEQ ID NO: 351682 - DNA, 1859 bp, Homo sapiens
ctggggagctgtggctcagacctctggtttctgcgcctcctcactctccaaacccaacctcgaggttcccccgccgctgcgcaccctgggaagccctttctcaccaggagctctcaccccaatatcattctctccctcctcctccaactcctccgagcccaggtccgacatggtctcgccccagcctggatcacagccgcagcgcctctagcagctttatagaattgagagattgctgagcctaaatacatgttgctgcattgcctccgagaatggccggacctatccccactctcaccaaaacagagtgtgggactcactgctccctcgcctactagagcagagccactgccagaaggaaggggacaagacccagcaggacaccttctttccacgctttccagcctgtgggagcggcaggggcaacagagagaggatctggagccaggattaatgactcatttatgaagcatcttattctgcgaccgaggctcagtggtcagtggcgacgtaaatggctcgactccccgctggcattcgcttcatcatctcattctccagggatcagtggtacagagccttcatttttattttgacatttctgctgtatgcaagttttcacttatctcgaaagcctatcagcatagttaagggtgagctccacaagtactgcactgcttgggatgaagctgacgtcaggttcagcagccagaacaggaagtctgggtccgctgccccccaccagctccctgacaatgagaccgactgtggctgggcaccgtttgataagaacaactatcagcagctgcttggggccctggactactccttcctgtgcgcctatgccgtggggatgtacctcagtggcatcattggggagcgcctgccgattaggtattacctaactttcgggatgctcgccagcggagccttcaccgccctgttcggcttagggtatttctacaacatccacagtttcggattctacgtggtaactcaggtcatcaacgggctggtgcagaccaccggctggcccagcgtcgtcacctgcctcggcaactggtttggaaaaggaaggagaggtttgattatgggggtctggaactcccacacctccgtgggcaacatcttggggtcattgatcgctggctactgggtgtccacatgctggggcctgtccttcgtcgtgcctggagccatcgtggcagccatggggatagtgtgctttctcttcctcattgaacatccgaacgacgtcaggtgctcctccaccctggtgacggtaaggaccctgttttcttgtccttttctagaacagtgtgcggttctgaccacttccccagcctgctcctgcctgtgcggtgtcagacagaaacacacagggtagacagaagtcccaccctcaaaacattggcagttctaggaatagagaatattctgttttgggtttcgctgataataaccttatcagcaaaacccagacaagaggttcaatgctgtccagatgaaggacttcatgctaaggggaaccaaaggctgggccctggccaggcctcctcaggagtggagacctcctggtttccccaggggcctcagtgtgacggggaaaaacgcacgtgtcagctgcctgccatcacttaagttggtggctgcacgtctcaggtggccgagaggtctgcccagcacgccattccttctcttctgtacccctgcccagctcagccagcgtaggccctgcaggcaggattgctgaccacgttggctgccatgaatgagccctgccctagctgcctccacccgcagccagtcaccactggccactttcccacctggctaaggccagccctcccgcggtaccg

SEQ ID NO: 351683 - DNA, 474 bp, Homo sapiens
attaggaagcctggccccacttcacccagactgcccggctggtaacacctttcctttttgttcccaatggatttgcctccaggacccagagatgcagtgcctgctgctctcagatgggaagggctccatccacccgaaccacgtcgtcattctccccggggacggtgggagtggcacggccgccatcagcttcacaggggccttgaaaattccagtaagtaaacgtgcccaggaggagtttcagaaagggctgctgtgctggctgtgggaagtctggtcggttgatgattaagcttaaaaagacatctgtggttgtagaacccggggattcgaatccatagccaaagctagacgctgcacagtgctagcttcaggactgaatatggctgcagtgatatttgttcgcctcataccatgtttaaattttttttgaaattcgttttctccatttagaaattcaggttcatagaaaaa

SEQ ID NO: 351684 - DNA, 3434 bp, Homo sapiens
tgcccaggaggacccggaccaagcaggccattttcacctgcgtaataacaggattgggaatagcgaagcagcggcggcagcagcgagtggagtaggaggaggagcgcaggcagcggccgcggcggggccggaggaagaggaggggggagaaggaggagctgaagcgggaagagcggcaggcagcggctcggcggagttgcagcagaggcggcggcgacgctgagacaccgcagcttccctgagcgccgagtccctccggggacagcagcagggagcgcccgcgcagccaccgagcctctgcccagccaagccgccgtcgccgcgccgggggaccgccagccatggccgcgccgggggatccgcaggacgagctgctgccgctggccggccccgggtcccagtggctcaggcaccggggggagggggagaacgaagcggtgacgccgaaaggggccacgccggcgccgcaggctggggagcccagcccggggttgggcgccagggcccgggaagcggcgtcgcgggaagccggctcgggccccgcccggcagtcgcccgttgccatggaaactgcatccacaggtgtggcaggtgtttccagtgccatggaccacaccttctcaacaacatcaaaagatggggaaggatcgtgttacacatctctcatttctgacatctgctatccacctcaggaggattctacatattttactggaattcttcagaaggaaaatggccacgtcaccatttcagagagccctgaggagctgggtacacccggcccctccttaccagatgtgcctgggatagagtctcgtggcttatttagttctgattctggaatagagatgactcctgcagagtccacggaagtgaacaagatcttagcagaccctctggaccagatgaaagcagaggcctataaatacattgacataaccagacccgaggaggtgaagcaccaagaacaacatcaccccgagctggaagataaagacttggactttaagaataaagacactgacatctcaattaaacctgaaggagtccgtgaacctgacaaaccagctcctgtggagggaaaaatcatcaaggaccatttattggaagaatccacatttgctccatacatagatgatctctctgaagaacagcgcagggctcctcagatcaccacccctgtcaaaatcacactgacggaaatagaaccttctgttgaaaccactacccaagagaagacccctgagaagcaagatatatgtctaaagccaagtcctgacacagtccccactgtcactgtctcggagcctgaagacgacagcccaggatctatcacccctccatcttctggaacagaaccatctgctgcagaatcccaggggaaaggcagcatctccgaggatgagctgatcaccgccatcaaagaagcaaagggattatcgtatgaaaccgccgagaacccacggccggtgggccagctggccgacaggcccgaggtcaaggccaggtccggaccgccaaccatccccagccccctggaccacgaggccagcagcgcggagtcgggggactcagagatcgagctggtgtccgaggaccccatggccgcggaggacgcgctgccctcaggctatgtgagctttggccacgtgggcggcccgccgccctcgcccgcctcgccatccatccagtacagcatcctgagggaggagcgcgaggccgagctggacagcgagctcatcatcgagtcgtgcgacgcctcctcggcctcggaggagagccccaagcgggagcaggactcacccccgatgaagcccagcgccctggatgccatccgggaggagactggcgtccgggccgaggagcgtgcgccaagccggcggggcctggccgagccgggttccttcctcgactacccctcaactgagccccagcctggccccgagctgccccctggagacggagccctggagcctgagacgcccatgttgccacggaagcctgaagaagactcgagttccaaccaaagtcctgcggccacaaagggccctgggcctctaggtcctggcgccccgcccccactgctgtttctcaataagcaaaaagctattgacctgttgtattggcgggacatcaagcagacgggcatcgtgtttgggagtttcctgctgctgctcttctccctgacccagttcagcgtggtgagcgtcgtggcctacctggccctggccgcactctcagccaccatcagtttccgcatctacaagtctgttttacaagcagtgcagaaaaccgacgaaggccaccctttcaaggcctacttggagcttgagatcaccctttctcaggagcagattcagaagtacacggactgcctgcagttctacgtgaacagcacacttaaggaactgaggaggctcttccttgtccaggacctggtggattccttaaaatttgcagtcctgatgtggctcctgacctacgttggcgctctcttcaatggcctgaccctgctgctcatggctgtggtttcaatgtttactctacctgtagtgtatgttaagcaccaggcacagattgaccaatatctgggacttgtgaggactcacataaatgctgttgtggcaaagattcaggctaaaatcccaggcgctaagaggcacgctgagtaaactgatttcccaccggggactggacacaaacaggaatgtctggagtggtaacagctctcttcttactcattactgcaaattgattgtctttcccccctccctccagtaccataatcttagagacaaaccttaaaacagctgtttttaggctgttccttgtactcttaggatatttgagtcacttgtgtcaaccactaaagtatagagaaaagtgtattagatgtggtttttaattttgtgttgctaaaaaaagtgcatgatggtgagagcccaagttatctttccctcttcggtgttcttcttctcttctctgcaatgcttctgtagcttctaatgttccccgtggctaggcctttcctgccgagtgctctgatgcaatagtggaaatcgcttatatgtccttgggttgctggttggattaatctttaataacaatatatagaattgtagactgatgttttagcatttttccaacacacacaacgtaaaaataaaagcagtcgaccgcacttatggtaatcagttttgtataacttaaaataattaaataaatgaataaatccaaaacaaacatgcagtacttttgttgtatgggattggtgggctgatttacatgtatggttactaaaaagtaccagcatgttaactttattacaatttgtattactttctctgtagttcctaatggattcaattacggactctggatatttgcacttatgtacttgatactgaatgcataaataaatgttactaaatgta

SEQ ID NO: 351685 - DNA, 2123 bp, Homo sapiens
cgtgtgtgtgcctccgtggctctccttcgctctgtgggacgacagaaccatctgctgcagaatcccaggggaaaggcagcatctccgaggatgagctgatcaccgccatcaaagaagcaaagggattatcgtatgaaaccgccgagaacccacggccggtgggccagctggccgacaggcccgaggtcaaggccaggtccggaccgccaaccatccccagccccctggaccacgaggccagcagcgcggagtcgggggactcagagatcgagctggtgtccgaggaccccatggccgcggaggacgcgctgccctcaggctatgtgagctttggccacgtgggcggcccgccgccctcgcccgcctcgccatccatccagtacagcatcctgagggaggagcgcgaggccgagctggacagcgagctcatcatcgagtcgtgcgacgcctcctcggcctcggaggagagccccaagcgggagcaggactcacccccgatgaagcccagcgccctggatgccatccgggaggagactggcgtccgggccgaggagcgtgcgccaagccggcggggcctggccgagccgggttccttcctcgactacccctcaactgagccccagcctggccccgagctgccccctggagacggagccctggagcctgagacgcccatgttgccacggaagcctgaagaagactcgagttccaaccaaagtcctgcggccacaaagggccctgggcctctaggtcctggcgccccgcccccactgctgtttctcaataagcaaaaagctattgacctgttgtattggcgggacatcaagcagacgggcatcgtgtttgggagtttcctgctgctgctcttctccctgacccagttcagcgtggtgagcgtcgtggcctacctggccctggccgcactctcagccaccatcagtttccgcatctacaagtctgttttacaagcagtgcagaaaaccgacgaaggccaccctttcaaggcctacttggagcttgagatcaccctttctcaggagcagattcagaagtacacggactgcctgcagttctacgtgaacagcacacttaaggaactgaggaggctcttccttgtccaggacctggtggattccttaaaatttgcagtcctgatgtggctcctgacctacgttggcgctctcttcaatggcctgaccctgctgctcatggctgtggtttcaatgtttactctacctgtagtgtatgttaagcaccaggcacagattgaccaatatctgggacttgtgaggactcacataaatgctgttgtggcaaagattcaggctaaaatcccaggcgctaagaggcacgctgagtaaactgatttcccaccggggactggacacaaacaggaatgtctggagtggtaacagctctcttcttactcattactgcaaattgattgtctttcccccctccctccagtaccataatcttagagacaaaccttaaaacagctgtttttaggctgttccttgtactcttaggatatttgagtcacttgtgtcaaccactaaagtatagagaaaagtgtattagatgtggtttttaattttgtgttgctaaaaaaagtgcatgatggtgagagcccaagttatctttccctcttcggtgttcttcttctcttctctgcaatgcttctgtagcttctaatgttccccgtggctaggcctttcctgccgagtgctctgatgcaatagtggaaatcgcttatatgtccttgggttgctggttggattaatctttaataacaatatatagaattgtagactgatgttttagcatttttccaacacacacaacgtaaaaataaaagcagtcgaccgcacttatggtaatcagttttgtataacttaaaataattaaataaatgaataaatccaaaacaaacatgcagtacttttgttgtatgggattggtgggctgatttacatgtatggttactaaaaagtaccagcatgttaactttattacaatttgtattactttctctgtagttcctaatggattcaattacggactctggatatttgcacttatgtacttgatactgaatgcataaataaatgttactaaatgta

SEQ ID NO: 351686 - DNA, 1688 bp, Homo sapiens
atccttaattaaattaattccccccccccgagcccagccaacgctgtcgcgtggagcggcgcccgcatccccatgcgcgcaggcggctccggggccgcgccgcgctgattcgctgccggccgcgcagactgcggcgccagcgacgctcccgcccctcaccgcgcgccgcctggtgcagcctcagtctctccgcagccgcgcggccactgcgagcccagccgcagcagccgggcaccaacgcttgagtgcacgctcggcgcccccgaggagagccacggcgagcccccaaagcccgcacgatgcaggccactgccgattccaccaagatggactgtgtgtggagcaactggaaaagtcaggctattgacctgttgtattggcgggacatcaagcagacgggcatcgtgtttgggagtttcctgctgctgctcttctccctgacccagttcagcgtggtgagcgtcgtggcctacctggccctggccgcactctcagccaccatcagtttccgcatctacaagtctgttttacaagcagtgcagaaaaccgacgaaggccaccctttcaaggcctacttggagcttgagatcaccctttctcaggagcagattcagaagtacacggactgcctgcagttctacgtgaacagcacacttaaggaactgaggaggctcttccttgtccaggacctggtggattccttaaaatttgcagtcctgatgtggctcctgacctacgttggcgctctcttcaatggcctgaccctgctgctcatggctgtggtttcaatgtttactctacctgtagtgtatgttaagcaccaggcacagattgaccaatatctgggacttgtgaggactcacataaatgctgttgtggcaaagattcaggctaaaatcccaggcgctaagaggcacgctgagtaaactgatttcccaccggggactggacacaaacaggaatgtctggagtggtaacagctctcttcttactcattactgcaaattgattgtctttcccccctccctccagtaccataatcttagagacaaaccttaaaacagctgtttttaggctgttccttgtactcttaggatatttgagtcacttgtgtcaaccactaaagtatagagaaaagtgtattagatgtggtttttaattttgtgttgctaaaaaaagtgcatgatggtgagagcccaagttatctttccctcttcggtgttcttcttctcttctctgcaatgcttctgtagcttctaatgttccccgtggctaggcctttcctgccgagtgctctgatgcaatagtggaaatcgcttatatgtccttgggttgctggttggattaatctttaataacaatatatagaattgtagactgatgttttagcatttttccaacacacacaacgtaaaaataaaagcagtcgaccgcacttatggtaatcagttttgtataacttaaaataattaaataaatgaataaatccaaaacaaacatgcagtacttttgttgtatgggattggtgggctgatttacatgtatggttactaaaaagtaccagcatgttaactttattacaatttgtattactttctctgtagttcctaatggattcaattacggactctggatatttgcacttatgtacttgatactgaatgcataaataaatgttactaaatgta

SEQ ID NO: 351687 - DNA, 1794 bp, Homo sapiens
cgcggccagaaccgctttacccgtctccagggtagcacccttgggcagcccagccaacgctgtcgcgtggagcggcgcccgcatccccatgcgcgcaggcggctccggggccgcgccgcgctgattcgctgccggccgcgcagactgcggcgccagcgacgctcccgcccctcaccgcgcgccgcctggtgcagcctcagtctctccgcagccgcgcggccactgcgagcccagccgcagcagccgggcaccaacgcttgagtgcacgctcggcgcccccgaggagagccacggcgagcccccaaagcccgcacgatgcaggccactgccgattccaccaagatggactgtgtgtggagcaactggaaaagtcaggctattgacctgttgtattggcgggacatcaagcagacgggcatcgtgtttgggagtttcctgctgctgctcttctccctgacccagttcagcgtggtgagcgtcgtggcctacctggccctggccgcactctcagccaccatcagtttccgcatctacaagtctgttttacaagcagtgcagaaaaccgacgaaggccaccctttcaaggcctacttggagcttgagatcaccctttctcaggagcagattcagaagtacacggactgcctgcagttctacgtgaacagcacacttaaggaactgaggaggctcttccttgtccaggacctggtggattccttaaaatttgcagtcctgatgtggctcctgacctacgttggcgctctcttcaatggcctgaccctgctgctcatggctgtggtttcaatgtttactctacctgtagtgtatgttaagcaccaggcacagattgaccaatatctgggacttgtgaggactcacataaatgctgttgtggcaaagattcaggctaaaatcccaggcgctaagaggcacgctgagtaaactgatttcccaccggggactggacacaaacaggaatgtctggagtggtaacagctctcttcttactcattactgcaaattgattgtctttcccccctccctccagtaccataatcttagagacaaaccttaaaacagctgtttttaggctgttccttgtactcttaggatatttgagtcacttgtgtcaaccactaaagtatagagaaaagtgtattagatgtggtttttaattttgtgttgctaaaaaaagtgcatgatggtgagagcccaagttatctttccctcttcggtgttcttcttctcttctctgcaatgcttctgtagcttctaatgttccccgtggctaggcctttcctgccgagtgctctgatgcaatagtggaaatcgcttatatgtccttgggttgctggttggattaatctttaataacaatatatagaattgtagactgatgttttagcatttttccaacacacacaacgtaaaaataaaagcagtcgaccgcacttatggtaatcagttttgtataacttaaaataattaaataaatgaataaatccaaaacaaacatgcagtacttttgttgtatgggattggtgggctgatttacatgtatggttactaaaaagtaccagcatgttaactttattacaatttgtattactttctctgtagttcctaatggattcaattacggactctggatatttgcacttatgtacttgatactgaatgcataaataaatgttactaaatgtaaaaaaaaaactcaatatcctactacccacaataactacacaaaaaaactcgcggggggcccggtcccaattcgccctaagtgaggcgatt

SEQ ID NO: 351688 - DNA, 1506 bp, Homo sapiens
cgcggccagaaccgctttacccgtctccagggtagcacccttgggcagcccagccaacgctgtcgcgtggagcggcgcccgcatccccatgcgcgcaggcggctccggggccgcgccgcgctgattcgctgccggccgcgcagactgcggcgccagcgacgctcccgcccctcaccgcgcgccgcctggtgcagcctcagtctctccgcagccgcgcggccactgcgagcccagccgcagcagccgggcaccaacgcttgagtgcacgctcggcgcccccgaggagagccacggcgagcccccaaagcccgcacgatgcaggccactgccgattccaccaagatggactgtgtgtggagcaactggaaaagtcaggctattgacctgttgtattggcgggacatcaagcagacgggcatcgtgtttgggagtttcctgctgctgctcttctccctgacccagttcagcgtggtgagcgtcgtggcctacctggccctggccgcactctcagccaccatcagtttccgcatctacaagtctgttttacaagcagtgcagaaaaccgacgaaggccaccctttcaaggcctacttggagcttgagatcaccctttctcaggagcagattcagaagtacacggactgcctgcagttctacgtgaacagcacacttaaggaactgaggaggctcttccttgtccaggacctggtggattccttaaaatttgcagtcctgatgtggctcctgacctacgttggcgctctcttcaatggcctgaccctgctgctcatggctgtggtttcaatgtttactctacctgtagtgtatgttaagcaccaggcacagattgaccaatatctgggacttgtgaggactcacataaatgctgttgtggcaaagattcaggctaaaatcccaggcgctaagaggcacgctgagtaaactgatttcccaccggggactggacacaaacaggaatgtctggagtggtaacagctctcttcttactcattactgcaaattgattgtctttcccccctccctccagtaccataatcttagagacaaaccttaaaacagctgtttttaggctgttccttgtactcttaggatatttgagtcacttgtgtcaaccactaaagtatagagaaaagtgtattagatgtggtttttaattttgtgttgctaaaaaaagtgcatgatggtgagagcccaagttatctttccctcttcggtgttcttcttctcttctctgcaatgcttctgtagcttctaatgttccccgtggctaggcctttcctgccgagtgctctgatgcaatagtggaaatcgcttatatgtccttgggttgctggttggattaatctttaataacaatatatagaattgtagactgatgttttagcatttttccaacacacacaacgtaaaaataaaagcagtcgaccgcacttatggtaatcagttttgtataacttaaaataattaaataaatgaataaatcca

SEQ ID NO: 351689 - DNA, 940 bp, Homo sapiens
ttaatactatatttgtttttcatccacagctgtggtttcaatgtttactctacctgtagtgtatgttaagcaccaggcacagattgaccaatatctgggacttgtgaggactcacataaatgctgttgtggcaaagattcaggctaaaatcccaggcgctaagaggcacgctgagtaaactgatttcccaccggggactggacacaaacaggaatgtctggagtggtaacagctctcttcttactcattactgcaaattgattgtctttcccccctccctccagtaccataatcttagagacaaaccttaaaacagctgtttttaggctgttccttgtactcttaggatatttgagtcacttgtgtcaaccactaaagtatagagaaaagtgtattagatgtggtttttaattttgtgttgctaaaaaaagtgcatgatggtgagagcccaagttatctttccctcttcggtgttcttcttctcttctctgcaatgcttctgtagcttctaatgttccccgtggctaggcctttcctgccgagtgctctgatgcaatagtggaaatcgcttatatgtccttgggttgctggttggattaatctttaataacaatatatagaattgtagactgatgttttagcatttttccaacacacacaacgtaaaaataaaagcagtcgaccgcacttatggtaatcagttttgtataacttaaaataattaaataaatgaataaatccaaaacaaacatgcagtacttttgttgtatgggattggtgggctgatttacatgtatggttactaaaaagtaccagcatgttaactttattacaatttgtattactttctctgtagttcctaatggattcaattacggactctggatatttgcacttatgtacttgatactgaatgcataaataaatgttactaaatgta

SEQ ID NO: 351690 - DNA, 961 bp, Homo sapiens
  misc_feature (919)..(919): n is a, c, g, or t
cgcggccagaaccgctttacccgtctccagggtagcacccttgggcagcccagccaacgctgtcgcgtggagcggcgcccgcatccccatgcgcgcaggcggctccggggccgcgccgcgctgattcgctgccggccgcgcagactgcggcgccagcgacgctcccgcccctcaccgcgcgccgcctggtgcagcctcagtctctccgcagccgcgcggccactgcgagcccagccgcagcagccgggcaccaacgcttgagtgcacgctcggcgcccccgaggagagccacggcgagcccccaaagcccgcacgatgcaggccactgccgattccaccaagatggactgtgtgtggagcaactggaaaagtcaggctattgacctgttgtattggcgggacatcaagcagacgggcatcgtgtttgggagtttcctgctgctgctcttctccctgacccagttcagcgtggtgagcgtcgtggcctacctggccctggccgcactctcagccaccatcagtttccgcatctacaagtctgttttacaagcagtgcagaaaaccgacgaaggccaccctttcaaggcctacttggagcttgagatcaccctttctcaggagcagattcagaagtacacggactgcctgcagttctacgtgaacagcacacttaaggaactgaggaggctcttccttgtccaggacctggtggattccttaaaatttgcagtcctgatgtggctcctgacctacgttggcgctctcttcaatggcctgaccctgctgctcatggctgtggtttcaatgtttactctacctgtagtgtatgttaagcaccaggcacagattgaccaatatctgggacttgtgaggactcacataaatgctgttgtggcaaagatcaggctacacaacaggnatgtttgagtggtacaggtctcttctactcatactgaaattg

SEQ ID NO: 351691 - DNA, 1637 bp, Homo sapiens
tgcccaggaggacccggaccaagcaggccattttcacctgcgtaataacaggattgggaatagcgaagcagcggcggcagcagcgagtggagtaggaggaggagcgcaggcagcggccgcggcggggccggaggaagaggaggggggagaaggaggagctgaagcgggaagagcggcaggcagcggctcggcggagttgcagcagaggcggcggcgacgctgagacaccgcagcttccctgagcgccgagtccctccggggacagcagcagggagcgcccgcgcagccaccgagcctctgcccagccaagccgccgtcgccgcgccgggggaccgccagccatggccgcgccgggggatccgcaggacgagctgctgccgctggccggccccgggtcccagtggctcaggcaccggggggagggggagaacgaagcggtgacgccgaaaggggccacgccggcgccgcaggctggggagcccagcccggggttgggcgccagggcccgggaagcggcgtcgcgggaagccggctcgggccccgcccggcagtcgcccgttgccatggaaactgcatccacaggtgtggcaggtgtttccagtgccatggaccacaccttctcaacaacatcaaaagatggggaaggatcgtgttacacatctctcatttctgacatctgctatccacctcaggaggattctacatattttactggaattcttcagaaggaaaatggccacgtcaccatttcagagagccctgaggagctgggtacacccggcccctccttaccagatgtgcctgggatagagtctcgtggcttatttagttctgattctggaatagagatgactcctgcagagtccacggaagtgaacaagatcttagcagaccctctggaccagatgaaagcagaggcctataaatacattgacataaccagacccgaggaggtgaagcaccaagaacaacatcaccccgagctggaagataaagaacaaaccttaaaacagctgtttttaggctgttccttgtactcttaggatatttgagtcacttgtgtcaaccactaaagtatagagaaaagtgtattagatgtggtttttaattttgtgttgctaaaaaaagtgcatgatggtgagagcccaagttatctttccctcttcggtgttcttcttctcttctctgcaatgcttctgtagcttctaatgttccccgtggctaggcctttcctgccgagtgctctgatgcaatagtggaaatcgcttatatgtccttgggttgctggttggattaatctttaataacaatatatagaattgtagactgatgttttagcatttttccaacacacacaacgtaaaaataaaagcagtcgaccgcacttatggtaatcagttttgtataacttaaaataattaaataaatgaataaatccaaaacaaacatgcagtacttttgttgtatgggattggtgggctgatttacatgtatggttactaaaaagtaccagcatgttaactttattacaatttgtattactttctctgtagttcctaatggattcaattacggactctggatatttgcacttatgtacttgatactgaatgcataaataaatgttactaaatgta

SEQ ID NO: 351692 - DNA, 868 bp, Homo sapiens
atccttaattaaattaattccccccccccgagcccagccaacgctgtcgcgtggagcggcgcccgcatccccatgcgcgcaggcggctccggggccgcgccgcgctgattcgctgccggccgcgcagactgcggcgccagcgacgctcccgcccctcaccgcgcgccgcctggtgcagcctcagtctctccgcagccgcgcggccactgcgagcccagccgcagcagccgggcaccaacgcttgagtgcacgctcggcgcccccgaggagagccacggcgagcccccaaagcccgcacgatgcaggccactgccgattccaccaagatggactgtgtgtggagcaactggaaaagtcaggctattgacctgttgtattggcgggacatcaagcagacgggcatcgtgtttgggagtttcctgctgctgctcttctccctgacccagttcagcgtggtgagcgtcgtggcctacctggccctggccgcactctcagccaccatcagtttccgcatctacaagtctgttttacaagcagtgcagaaaaccgacgaaggccaccctttcaaggcctacttggagcttgagatcaccctttctcaggagcagattcagaagtacacggactgcctgcagttctacgtgaacagcacacttaaggaactgaggaggctcttccttgtccaggacctggtggattccttaaaatttgcagtcctgatgtggctcctgacctacgttggcgctctcttcaatggcctgaccctgctgctcatgggtaagagcagataagactgtatacgtcttccttcaccccctctgtgaaaacgctgcttcctaggctgtaagctttttgtttgtttaaagag

SEQ ID NO: 351693 - DNA, 2691 bp, Homo sapiens
  misc_feature (2649)..(2649): n is a, c, g, or t
tgcccaggaggacccggaccaagcaggccattttcacctgcgtaataacaggattgggaatagcgaagcagcggcggcagcagcgagtggagtaggaggaggagcgcaggcagcggccgcggcggggccggaggaagaggaggggggagaaggaggagctgaagcgggaagagcggcaggcagcggctcggcggagttgcagcagaggcggcggcgacgctgagacaccgcagcttccctgagcgccgagtccctccggggacagcagcagggagcgcccgcgcagccaccgagcctctgcccagccaagccgccgtcgccgcgccgggggaccgccagccatggccgcgccgggggatccgcaggacgagctgctgccgctggccggccccgggtcccagtggctcaggcaccggggggagggggagaacgaagcggtgacgccgaaaggggccacgccggcgccgcaggctggggagcccagcccggggttgggcgccagggcccgggaagcggcgtcgcgggaagccggctcgggccccgcccggcagtcgcccgttgccatggaaactgcatccacaggtgtggcaggtgtttccagtgccatggaccacaccttctcaacaacatcaaaagatggggaaggatcgtgttacacatctctcatttctgacatctgctatccacctcaggaggattctacatattttactggaattcttcagaaggaaaatggccacgtcaccatttcagagagccctgaggagctgggtacacccggcccctccttaccagatgtgcctgggatagagtctcgtggcttatttagttctgattctggaatagagatgactcctgcagagtccacggaagtgaacaagatcttagcagaccctctggaccagatgaaagcagaggcctataaatacattgacataaccagacccgaggaggtgaagcaccaagaacaacatcaccccgagctggaagataaagacttggactttaagaataaagacactgacatctcaattaaacctgaaggagtccgtgaacctgacaaaccagctcctgtggagggaaaaatcatcaaggaccatttattggaagaatccacatttgctccatacatagatgatctctctgaagaacagcgcagggctcctcagatcaccacccctgtcaaaatcacactgacggaaatagaaccttctgttgaaaccactacccaagagaagacccctgagaagcaagatatatgtctaaagccaagtcctgacacagtccccactgtcactgtctcggagcctgaagacgacagcccaggatctatcacccctccatcttctggaacagaaccatctgctgcagaatcccaggggaaaggcagcatctccgaggatgagctgatcaccgccatcaaagaagcaaagggattatcgtatgaaaccgccgagaacccacggccggtgggccagctggccgacaggcccgaggtcaaggccaggtccggaccgccaaccatccccagccccctggaccacgaggccagcagcgcggagtcgggggactcagagatcgagctggtgtccgaggaccccatggccgcggaggacgcgctgccctcaggctatgtgagctttggccacgtgggcggcccgccgccctcgcccgcctcgccatccatccagtacagcatcctgagggaggagcgcgaggccgagctggacagcgagctcatcatcgagtcgtgcgacgcctcctcggcctcggaggagagccccaagcgggagcaggactcacccccgatgaagcccagcgccctggatgccatccgggaggagactggcgtccgggccgaggagcgtgcgccaagccggcggggcctggccgagccgggttccttcctcgactacccctcaactgagccccagcctggccccgagctgccccctggagacggagccctggagcctgagacgcccatgttgccacggaagcctgaagaagactcgagttccaaccaaagtcctgcggccacaaagggccctgggcctctaggtcctggcgccccgcccccactgctgtttctcaataagcaaaaagctattgacctgttgtattggcgggacatcaagcagacgggcatcgtgtttgggagtttcctgctgctgctcttctccctgacccagttcagcgtggtgagcgtcgtggcctacctggccctggccgcactctcagccaccatcagtttccgcatctacaagtctgttttacaagcagtgcagaaaaccgacgaaggccaccctttcaaggcctacttggagcttgagatcaccctttctcaggagcagattcagaagtacacggactgcctgcagttctacgtgaacagcacacttaaggaactgaggaggctcttccttgtccaggacctggtggattccttaaaatttgcagtcctgatgtggctcctgacctacgttggcgctctcttcaatggcctgaccctgctgctcatggctgtggtttcaatgtttactctacctgtagtgtatgttaagcaccaggcacagattgaccaatatctgggacttgtgaggactcacataaatgctgttgtggcaaagatcaggctacacaacaggnatgtttgagtggtacaggtctcttctactcatactgaaattg

SEQ ID NO: 351694 - DNA, 2236 bp, Homo sapiens
tgcccaggaggacccggaccaagcaggccattttcacctgcgtaataacaggattgggaatagcgaagcagcggcggcagcagcgagtggagtaggaggaggagcgcaggcagcggccgcggcggggccggaggaagaggaggggggagaaggaggagctgaagcgggaagagcggcaggcagcggctcggcggagttgcagcagaggcggcggcgacgctgagacaccgcagcttccctgagcgccgagtccctccggggacagcagcagggagcgcccgcgcagccaccgagcctctgcccagccaagccgccgtcgccgcgccgggggaccgccagccatggccgcgccgggggatccgcaggacgagctgctgccgctggccggccccgggtcccagtggctcaggcaccggggggagggggagaacgaagcggtgacgccgaaaggggccacgccggcgccgcaggctggggagcccagcccggggttgggcgccagggcccgggaagcggcgtcgcgggaagccggctcgggccccgcccggcagtcgcccgttgccatggaaactgcatccacaggtgtggcaggtgtttccagtgccatggaccacaccttctcaacaacatcaaaagatggggaaggatcgtgttacacatctctcatttctgacatctgctatccacctcaggaggattctacatattttactggaattcttcagaaggaaaatggccacgtcaccatttcagagagccctgaggagctgggtacacccggcccctccttaccagatgtgcctgggatagagtctcgtggcttatttagttctgattctggaatagagatgactcctgcagagtccacggaagtgaacaagatcttagcagaccctctggaccagatgaaagcagaggcctataaatacattgacataaccagacccgaggaggtgaagcaccaagaacaacatcaccccgagctggaagataaagacttggactttaagaataaagacactgacatctcaattaaacctgaaggagtccgtgaacctgacaaaccagctcctgtggagggaaaaatcatcaaggaccatttattggaagaatccacatttgctccatacatagatgatctctctgaagaacagcgcagggctcctcagatcaccacccctgtcaaaatcacactgacggaaatagaaccttctgttgaaaccactacccaagagaagacccctgagaagcaagatatatgtctaaagccaagtcctgacacagtccccactgtcactgtctcggagcctgaagacgacagcccaggatctatcacccctccatcttctggaacagaaccatctgctgcagaatcccaggggaaaggcagcatctccgaggatgagctgatcaccgccatcaaagaagcaaagggattatcgtatgaaaccgccgagaacccacggccggtgggccagctggccgacaggcccgaggtcaaggccaggtccggaccgccaaccatccccagccccctggaccacgaggccagcagcgcggagtcgggggactcagagatcgagctggtgtccgaggaccccatggccgcggaggacgcgctgccctcaggctatgtgagctttggccacgtgggcggcccgccgccctcgcccgcctcgccatccatccagtacagcatcctgagggaggagcgcgaggccgagctggacagcgagctcatcatcgagtcgtgcgacgcctcctcggcctcggaggagagccccaagcgggagcaggactcacccccgatgaagcccagcgccctggatgccatccgggaggagactggcgtccgggccgaggagcgtgcgccaagccggcggggcctggccgagccgggttccttcctcgactacccctcaactgagccccagcctggccccgagctgccccctggagacggagccctggagcctgagacgcccatgttgccacggaagcctgaagaagactcgagttccaaccaaagtcctgcggccacaaagggccctgggcctctaggtcctggcgccccgcccccactgctgtttctcaataagcaaaaagcagtggggtaccagcatccctggaaaaagatgtcttgaatatcctacaatgaatatcaaatggagagagcctctgcctgttcaaggctgaaaatctgagaaaaataaaactcacgttgctttttaaattc

SEQ ID NO: 351695 - DNA, 232 bp, Homo sapiens
ccccaaagcccgcacgatgcaggccactgccgattccaccaagatggactgtgtgtggagcaactggaaaagtcagggtattctctttatttcagtagtgcatgcctgaggcgcacgggaaacccgggacctggactcgtccattgtgcatcatttcacctgtgggacctgtgcatgctttataccccagagctttgtgttggggggtagtaaacctcttatttcaagaatc

SEQ ID NO: 351696 - DNA, 1704 bp, Homo sapiens
cgcggccagaaccgctttacccgtctccagggtagcacccttgggcagcccagccaacgctgtcgcgtggagcggcgcccgcatccccatgcgcgcaggcggctccggggccgcgccgcgctgattcgctgccggccgcgcagactgcggcgccagcgacgctcccgcccctcaccgcgcgccgcctggtgcagcctcagtctctccgcagccgcgcggccactgcgagcccagccgcagcagccgggcaccaacgcttgagtgcacgctcggcgcccccgaggagagccacggcgagcccccaaagcccgcacgatgcaggccactgccgattccaccaagatggactgtgtgtggagcaactggaaaagtcaggctattgacctgttgtattggcgggacatcaagcagacgggcatcgtgtttgggagtttcctgctgctgctcttctccctgacccagttcagcgtggtgagcgtcgtggcctacctggccctggccgcactctcagccaccatcagtttccgcatctacaagtctgttttacaagcagtgcagaaaaccgacgaaggccaccctttcaaggcctacttggagcttgagatcaccctttctcaggagcagattcagaagtacacggactgcctgcagttctacgtgaacagcacacttaaggaactgaggaggctcttccttgtccaggacctggtggattccttaaaatttgcagtcctgatgtggctcctgacctacgttggcgctctcttcaatggcctgaccctgctgctcatggctgtggtttcaatgtttactctacctgtagtgtatgttaagcaccaggcacagattgaccaatatctgggacttgtgaggactcacataaatgctgttgtggcaaagattcaggctaaaatcccaggcgctaagaggcacgctgagtaaactgatttcccaccggggactggacacaaacaggaatgtctggagtggtaacagctctcttcttactcattactgcaaattgattgtctttcccccctccctccagtaccataatcttagagacaaaccttaaaacagctgtttttaggctgttccttgtactcttaggatatttgagtcacttgtgtcaaccactaaagtatagagaaaagtgtattagatgtggtttttaattttgtgttgctaaaaaaagtgcatgatggtgagagcccaagttatctttccctcttcggtgttcttcttctcttctctgcaatgcttctgtagcttctaatgttccccgtggctaggcctttcctgccgagtgctctgatgcaatagtggaaatcgcttatatgtccttgggttgctggttggattaatctttaataacaatatatagaattgtagactgatgttttagcatttttccaacacacacaacgtaaaaataaaagcagtcgaccgcacttatggtaatcagttttgtataacttaaaataattaaataaatgaataaatccaaaacaaacatgcagtacttttgttgtatgggattggtgggctgatttacatgtatggttactaaaaagtaccagcatgttaactttattacaatttgtattactttctctgtagttcctaatggattcaattacggactctggatatttgcacttatgtacttgatactgaatgcataaataaatgttactaaatgta

SEQ ID NO: 351697 - DNA, 1451 bp, Homo sapiens
cgcggccagaaccgctttacccgtctccagggtagcacccttgggcagcccagccaacgctgtcgcgtggagcggcgcccgcatccccatgcgcgcaggcggctccggggccgcgccgcgctgattcgctgccggccgcgcagactgcggcgccagcgacgctcccgcccctcaccgcgcgccgcctggtgcagcctcagtctctccgcagccgcgcggccactgcgagcccagccgcagcagccgggcaccaacgcttgagtgcacgctcggcgcccccgaggagagccacggcgagcccccaaagcccgcacgatgcaggccactgccgattccaccaagatggactgtgtgtggagcaactggaaaagtcaggctattgacctgttgtattggcgggacatcaagcagacgggcatcgtgtttgggagtttcctgctgctgctcttctccctgacccagttcagcgtggtgagcgtcgtggcctacctggccctggccgcactctcagccaccatcagtttccgcatctacaagtctgttttacaagcagtgcagaaaaccgacgaaggccaccctttcaaggcctacttggagcttgagatcaccctttctcaggagcagattcagaagtacacggactgcctgcagttctacgtgaacagcacacttaaggaactgaggaggctcttccttgtccaggacctggtggattccttaaaatttgcagtcctgatgtggctcctgacctacgttggcgctctcttcaatggcctgaccctgctgctcatggctgtggtttcaatgtttactctacctgtagtgtatgttaagcaccaggcacagattgaccaatatctgggacttgtgaggactcacataaatgctgttgtggcaaagattcaggctaaaatcccaggcgctaagaggcacgctgagtaaactgatttcccaccggggactggacacaaacaggaatgtctggagtggtaacagctctcttcttactcattactgcaaattgattgtctttcccccctccctccagtaccataatcttagagacaaaccttaaaacagctgtttttaggctgttccttgtactcttaggatatttgagtcacttgtgtcaaccactaaagtatagagaaaagtgtattagatgtggtttttaattttgtgttgctaaaaaaagtgcatgatggtgagagcccaagttatctttccctcttcggtgttcttcttctcttctctgcaatgcttctgtagcttctaatgttccccgtggctaggcctttcctgccgagtgctctgatgcaatagtggaaatcgcttatatgtccttgggttgctggttggattaatctttaataacaatatatagaattgtagactgatgttttagcatttttccaacacacacaacgtaaaaataaaagcagtcgaccgca

SEQ ID NO: 351698 - DNA, 1536 bp, Homo sapiens
atccttaattaaattaattccccccccccgagtctctccgcagccgcgcggccactgcgagcccagccgcagcagccgggcaccaacgcttgagtgcacgctcggcgcccccgaggagagccacggcgagcccccaaagcccgcacgatgcaggccactgccgattccaccaagatggactgtgtgtggagcaactggaaaagtcaggctattgacctgttgtattggcgggacatcaagcagacgggcatcgtgtttgggagtttcctgctgctgctcttctccctgacccagttcagcgtggtgagcgtcgtggcctacctggccctggccgcactctcagccaccatcagtttccgcatctacaagtctgttttacaagcagtgcagaaaaccgacgaaggccaccctttcaaggcctacttggagcttgagatcaccctttctcaggagcagattcagaagtacacggactgcctgcagttctacgtgaacagcacacttaaggaactgaggaggctcttccttgtccaggacctggtggattccttaaaatttgcagtcctgatgtggctcctgacctacgttggcgctctcttcaatggcctgaccctgctgctcatggctgtggtttcaatgtttactctacctgtagtgtatgttaagcaccaggcacagattgaccaatatctgggacttgtgaggactcacataaatgctgttgtggcaaagattcaggctaaaatcccaggcgctaagaggcacgctgagtaaactgatttcccaccggggactggacacaaacaggaatgtctggagtggtaacagctctcttcttactcattactgcaaattgattgtctttcccccctccctccagtaccataatcttagagacaaaccttaaaacagctgtttttaggctgttccttgtactcttaggatatttgagtcacttgtgtcaaccactaaagtatagagaaaagtgtattagatgtggtttttaattttgtgttgctaaaaaaagtgcatgatggtgagagcccaagttatctttccctcttcggtgttcttcttctcttctctgcaatgcttctgtagcttctaatgttccccgtggctaggcctttcctgccgagtgctctgatgcaatagtggaaatcgcttatatgtccttgggttgctggttggattaatctttaataacaatatatagaattgtagactgatgttttagcatttttccaacacacacaacgtaaaaataaaagcagtcgaccgcacttatggtaatcagttttgtataacttaaaataattaaataaatgaataaatccaaaacaaacatgcagtacttttgttgtatgggattggtgggctgatttacatgtatggttactaaaaagtaccagcatgttaactttattacaatttgtattactttctctgtagttcctaatggattcaattacggactctggatatttgcacttatgtacttgatactgaatgcataaataaatgttactaaatgta

SEQ ID NO: 351699 - DNA, 1215 bp, Homo sapiens
atccttaattaaattaattccccccccccgagtctctccgcagccgcgcggccactgcgagcccagccgcagcagccgggcaccaacgcttgagtgcacgctcggcgcccccgaggagagccacggcgagcccccaaagcccgcacgatgcaggccactgccgattccaccaagatggactgtgtgtggagcaactggaaaagtcaggctattgacctgttgtattggcgggacatcaagcagacgggcatcgtgtttgggagtttcctgctgctgctcttctccctgacccagttcagcgtggtgagcgtcgtggcctacctggccctggccgcactctcagccaccatcagtttccgcatctacaagtctgttttacaagcagtgcagaaaaccgacgaaggccaccctttcaaggcctacttggagcttgagatcaccctttctcaggagcagattcagaagtacacggatggacacaaacaggaatgtctggagtggtaacagctctcttcttactcattactgcaaattgattgtctttcccccctccctccagtaccataatcttagagacaaaccttaaaacagctgtttttaggctgttccttgtactcttaggatatttgagtcacttgtgtcaaccactaaagtatagagaaaagtgtattagatgtggtttttaattttgtgttgctaaaaaaagtgcatgatggtgagagcccaagttatctttccctcttcggtgttcttcttctcttctctgcaatgcttctgtagcttctaatgttccccgtggctaggcctttcctgccgagtgctctgatgcaatagtggaaatcgcttatatgtccttgggttgctggttggattaatctttaataacaatatatagaattgtagactgatgttttagcatttttccaacacacacaacgtaaaaataaaagcagtcgaccgcacttatggtaatcagttttgtataacttaaaataattaaataaatgaataaatccaaaacaaacatgcagtacttttgttgtatgggattggtgggctgatttacatgtatggttactaaaaagtaccagcatgttaactttattacaatttgtattactttctctgtagttcctaatggattcaattacggactctggatatttgcacttatgtacttgatactgaatgcataaataaatgttactaaatgta

SEQ ID NO: 351700 - DNA, 2614 bp, Homo sapiens
tgcccaggaggacccggaccaagcaggccattttcacctgcgtaataacaggattgggaatagcgaagcagcggcggcagcagcgagtggagtaggaggaggagcgcaggcagcggccgcggcggggccggaggaagaggaggggggagaaggaggagctgaagcgggaagagcggcaggcagcggctcggcggagttgcagcagaggcggcggcgacgctgagacaccgcagcttccctgagcgccgagtccctccggggacagcagcagggagcgcccgcgcagccaccgagcctctgcccagccaagccgccgtcgccgcgccgggggaccgccagccatggccgcgccgggggatccgcaggacgagctgctgccgctggccggccccgggtcccagtggctcaggcaccggggggagggggagaacgaagcggtgacgccgaaaggggccacgccggcgccgcaggctggggagcccagcccggggttgggcgccagggcccgggaagcggcgtcgcgggaagccggctcgggccccgcccggcagtcgcccgttgccatggaaactgcatccacaggtgtggcaggtgtttccagtgccatggaccacaccttctcaacaacatcaaaagatggggaaggatcgtgttacacatctctcatttctgacatctgctatccacctcaggaggattctacatattttactggaattcttcagaaggaaaatggccacgtcaccatttcagagagccctgaggagctgggtacacccggcccctccttaccagatgtgcctgggatagagtctcgtggcttatttagttctgattctggaatagagatgactcctgcagagtccacggaagtgaacaagatcttagcagaccctctggaccagatgaaagcagaggcctataaatacattgacataaccagacccgaggaggtgaagcaccaagaacaacatcaccccgagctggaagataaagacttggactttaagaataaagacactgacatctcaattaaacctgaaggagtccgtgaacctgacaaaccagctcctgtggagggaaaaatcatcaaggaccatttattggaagaatccacatttgctccatacatagatgatctctctgaagaacagcgcagggctcctcagatcaccacccctgtcaaaatcacactgacggaaatagaaccttctgttgaaaccactacccaagagaagacccctgagaagcaagatatatgtctaaagccaagtcctgacacagtccccactgtcactgtctcggagcctgaagacgacagcccaggatctatcacccctccatcttctggaacagaaccatctgctgcagaatcccaggggaaaggcagcatctccgaggatgagctgatcaccgccatcaaagaagcaaagggattatcgtatgaaaccgccgagaacccacggccggtgggccagctggccgacaggcccgaggtcaaggccaggtccggaccgccaaccatccccagccccctggaccacgaggccagcagcgcggagtcgggggactcagagatcgagctggtgtccgaggaccccatggccgcggaggacgcgctgccctcaggctatgtgagctttggccacgtgggcggcccgccgccctcgcccgcctcgccatccatccagtacagcatcctgagggaggagcgcgaggccgagctggacagcgagctcatcatcgagtcgtgcgacgcctcctcggcctcggaggagagccccaagcgggagcaggactcacccccgatgaagcccagcgccctggatgccatccgggaggagactggcgtccgggccgaggagcgtgcgccaagccggcggggcctggccgagccgggttccttcctcgactacccctcaactgagccccagcctggccccgagctgccccctggagacggagccctggagcctgagacgcccatgttgccacggaagcctgaagaagactcgagttccaaccaaagtcctgcggccacaaagggccctgggcctctaggtcctggcgccccgcccccactgctgtttctcaataagcaaaaagctattgacctgttgtattggcgggacatcaagcagacgggcatcgtgtttgggagtttcctgctgctgctcttctccctgacccagttcagcgtggtgagcgtcgtggcctacctggccctggccgcactctcagccaccatcagtttccgcatctacaagtctgttttacaagcagtgcagaaaaccgacgaaggccaccctttcaaggcctacttggagcttgagatcaccctttctcaggagcagattcagaagtacacggactgcctgcagttctacgtgaacagcacacttaaggaactgaggaggctcttccttgtccaggacctggtggattccttaaaatttgcagtcctgatgtggctcctgacctacgttggcgctctcttcaatggcctgaccctgctgctcatgggtaagagcagataagactgtatacgtcttccttcaccccctctgtgaaaacgctgcttcctaggctgtaagctttttgtttgtttaaagag

SEQ ID NO: 351701 - DNA, 918 bp, Homo sapiens
cgcggccagaaccgctttacccgtctccagggtagcacccttgggcagcccagccaacgctgtcgcgtggagcggcgcccgcatccccatgcgcgcaggcggctccggggccgcgccgcgctgattcgctgccggccgcgcagactgcggcgccagcgacgctcccgcccctcaccgcgcgccgcctggtgcagcctcagtctctccgcagccgcgcggccactgcgagcccagccgcagcagccgggcaccaacgcttgagtgcacgctcggcgcccccgaggagagccacggcgagcccccaaagcccgcacgatgcaggccactgccgattccaccaagatggactgtgtgtggagcaactggaaaagtcaggctattgacctgttgtattggcgggacatcaagcagacgggcatcgtgtttgggagtttcctgctgctgctcttctccctgacccagttcagcgtggtgagcgtcgtggcctacctggccctggccgcactctcagccaccatcagtttccgcatctacaagtctgttttacaagcagtgcagaaaaccgacgaaggccaccctttcaaggcctacttggagcttgagatcaccctttctcaggagcagattcagaagtacacggatggacacaaacaggaatgtctggagtggtaacagctctcttcttactcattactgcaaattgattgtctttcccccctccctccagtaccataatcttagagacaaaccttaaaacagctgtttttaggctgttccttgtactcttaggatatttgagtcacttgtgtcaaccactaaagtatagagaaaagtgtattagatgtggtttttaatttggcggtgctgcgcatgatggcgagagcccgtatcttatcctctacggggaccttctttttt

SEQ ID NO: 351702 - DNA, 1204 bp, Homo sapiens
  misc_feature (1148)..(1148): n is a, c, g, or t
cgcggccagaaccgctttacccgtctccagggtagcacccttgggcagcccagccaacgctgtcgcgtggagcggcgcccgcatccccatgcgcgcaggcggctccggggccgcgccgcgctgattcgctgccggccgcgcagactgcggcgccagcgacgctcccgcccctcaccgcgcgccgcctggtgcagcctcagtctctccgcagccgcgcggccactgcgagcccagccgcagcagccgggcaccaacgcttgagtgcacgctcggcgcccccgaggagagccacggcgagcccccaaagcccgcacgatgcaggccactgccgattccaccaagatggactgtgtgtggagcaactggaaaagtcaggctattgacctgttgtattggcgggacatcaagcagacgggcatcgtgtttgggagtttcctgctgctgctcttctccctgacccagttcagcgtggtgagcgtcgtggcctacctggccctggccgcactctcagccaccatcagtttccgcatctacaagtctgttttacaagcagtgcagtctcaggagcagattcagaagtacacggactgcctgcagttctacgtgaacagcacacttaaggaactgaggaggctcttccttgtccaggacctggtggattccttaaaatttgcagtcctgatgtggctcctgacctacgttggcgctctcttcaatggcctgaccctgctgctcatggctgtggtttcaatgtttactctacctgtagtgtatgttaagcaccaggcacagattgaccaatatctgggacttgtgaggactcacataaatgctgttgtggcaaagattcaggctaaaatcccaggcgctaagaggcacgctgagtaaactgatttcccaccggggactggacacaaacaggaatgtctggagtggtaacagctctcttcttactcattactgcaaattgattgtctttcccccctccctccagtaccataatcttagagacaaaccttaaaacagctgtttttaggctgttcctgactctaagaactgagtacttggtaacccctagttaggaaacgcgttaaggcgctaattgggggtaaacggctgaggagagccagtatttcctttggggctcntcttttcaggcttgagcttatgtcccgggttggcttctgcgagctatgcaaatgat

SEQ ID NO: 351703 - DNA, 256 bp, Homo sapiens
gcagccaagtaactttgagaaacactttatatcttaaatcattcttggagatttacattataaattagcatagtaaaggctcagagaagtctgcatcaagaaaaaaatcaatttagctttaaactcagcatttcccaagcatatttaaccatggaactttgtattcatgaaacacctgttaacactgcagaataactaggaatatggtttacagtttctaaatattataactcagaatattattattttggatgtg

SEQ ID NO: 351704 - DNA, 1793 bp, Homo sapiens
agctccgcaaggacccggacgcgaccaggggaggcagaaggactctgcacttgtccaagagaagaatccagagaaatcagagcaggtcaaatagttctaaaagccatggcccagggactggtgacattcagggacgtggccatagagttctctctggaagaatggaagtgcctggaacctgctcagagggacttgtacagggaggtgactctggagaactttggtcacttggcctcactaggactctccatttctaagcctgatgtcgtctccttattggagcaagggaaagagccctggatgattgcaaatgatgtgacaggaccatggtgcccagacttggagtccaggtgtgagaaatttctacaaaaagacatttttgaaatcggggcattcaactgggagataatggaaagccttaaatgcagtgacctggagggctccgattttagagctgactgggaatgcgaaggccagtttgagagacaagtcaatgaagagtgctattttaagcaagtgaacgtcacctatggacatatgcccgtgttccagcatcacacgtctcacactgtacgtcagagcagggagactggtgagaaactgatggaatgtcatgaatgtgggaaagcatttagccgtggctcacaccttattcaacatcagaaaactcacactggtgaaaaaccctttggatgtaaggaatgtgggaaggccttcagccgtgcctcacaccttgttcagcatcagagaattcacacgggtgagaaaccttatgactgtaaggactgtgggaaggcctttggtcgtacatcagaacttattctacatcagagacttcatactggtgtcaaaccttatgaatgtaaagaatgtgggaagacctttaggcagcattcacagctgattctgcatcaaagaactcacacaggcgagaaaccctacgtatgtaaagactgtggcaaggctttcattcgtggctcccaactcactgtgcatcggagaatccacacaggggccagaccctatgagtgtaaagaatgcgggaaagcctttagacagcactcacagctgactgtacaccagcgaatccacactggtgagaaaccctacgagtgtaaggaatgcggaaagggctttattcacagctcagaagttactcgacatcaaagaattcattctggggagaaaccctatgagtgtaaggaatgtgggaaggccttcagacagcacgcacagctcacacgacatcagagagtccatactggcgacagaccctatgaatgtaaggactgcgggaaggcatttagtcgtagctcatacctcattcaacatcaaagaattcatacaggtgacaaaccctacgaatgtaaggaatgtgggaaggcctttattcgtgtttcacaactgactcatcatcagcgaattcacacttgtgagaaaccctatgaatgcagggagtgtggaatggcctttattcgtagttcacaacttaccgaacatcagagaattcatcctggtatcaaaccttacgaatgtagagagtgtgggcaggcatttattcttggctcacaactcattgaacactacagaattcatactggttagaaagccttgagtgtaagggataaagataagcctttatgtggagttcacatctggctcagtactaggtaatttttaatgtagtgtaattaatgtcagaaaacacctgtcacttccatcatagaacatcagaaaactcacacccaaagaaaattaaataaatgtgggaattctttttgcctcaaacactg

SEQ ID NO: 351705 - DNA, 2063 bp, Homo sapiens
ggggcccagctggtcgcggtccccccctcaacatggcggcagcggtgctctaggcgccggaagggggcgtgaatcggtgcgaccgcgcgcgtgcgcagtaccgggtccgcgcctgtccccgaaacttcgcaccccgtcgaactctcgcgagagcggtatctgcgtgtcgggacgtgcggaggctctcactttccgtcatggcgctgaaggtagcgaccgtcgccggcagcgccgcgaaggcggtgctcgggccagcccttctctgccgtccctgggaggttctaggcgcccacgaggtcccctcgaggaacatcttttcagaacaaacaattcctccgtccgctaagtatggcgggcggcacacggtgaccatgatcccaggggatggcatcgggccagagctcatgctgcatgtcaagtccgtcttcaggcacgcatgtgtaccagtggactttgaagaggtgcacgtgagttccaatgctgatgaagaggacattcgcaatgccatcatggccatccgccggaaccgcgtggccctgaagggcaacatcgaaaccaaccataacctgccaccgtcgcacaaatctcgaaacaacatccttcgcaccagcctggacctctatgccaacgtcatccactgtaagagccttccaggcgtggtgacccggcacaaggacatagacatcctcattgtccgggagaacacagagggcgagtacagcagcctggagcatgagagtgtggcgggagtggtggagagcctgaagatcatcaccaaggccaagtccctgcgcattgccgagtatgccttcaagctggcgcaggagagcgggcgcaagaaagtgacggccgtgcacaaggccaacatcatgaaactgggcgatgggcttttcctccagtgctgcagggaggtggcagcccgctaccctcagatcaccttcgagaacatgattgtggataacaccaccatgcagctggtgtcccggccccagcagtttgatgtcatggtgatgcccaatctctatggcaacatcgtcaacaatgtctgcgcgggactggtcgggggcccaggccttgtggctggggccaactatggccatgtgtacgcggtgtttgaaacagctacgaggaacaccggcaagagtatcgccaataagaacatcgccaaccccacggccaccctgctggccagctgcatgatgctggaccacctcaagctgcactcctatgccacctccatccgtaaggctgtcctggcatccatggacaatgagaatatgcacactccggacatcgggggccagggcacaacatctgaagccatccaggacgtcatccgccacatccgcgtcatcaacggccgggccgtggaggcctaggctggccctaggaccttcttggtttgctccttggattccccttcccactccagcaccccagccagcctggtacgcagatcccagaataaagcaccttctccctaaaaaaaaaaaaaaaaaaaaaaaaaaaaaaaaaaaaaaaaaaaaaaaaaaaaaaaaaaaaaaaaaaaaaaaaaaaaaaggggggggcgcgcgcgcaaaaataatattcccccccgggggggcccaccacacatgctcccggacaccaccacgcagtttttgttgtaaaacaagggcgtgccccccataaggtggtgcgttgttattattaatgaaggggaggggcggcggcgttataacaacaatgtgcgtaaggcggagacagaaaggcggagcgcacgcggagcacgacacttcgaggcgagaagggcaccccctactacctcgcgggggggggcggacaccccagcgggcggcgacacccaccccccctccgacagcagtatattaaacagcgccctctcatgggggagcaaatatgtacacacatatcatacagaggagagaatcctatgaagggggttcaacaacacaccagccccggcttacactctaggccgcgcggacgtaaaagaacaatgtcgcttccccacggcagacatgtcattatcgcactgccacactctttttcctagcagggag

SEQ ID NO: 351706 - DNA, 2335 bp, Homo sapiens
ccaaatcaataggtcttttattgcatcatttaaatatcacaagtaggtcttaagtgtcatctggcatcttctttctgtagccaggtaactcttagatcttattcatcagcctgctgaacagttcctttttcagagacatagataccatccaaaaatttcctgatatccttgtttttaactgttgtggcttgctgaatcaaagccgctgaatttgaaacaagctcaatgtcatttccttcaaggattaattcatctttctgggcttgagatactgaacaagcaacacctggtctcatccgaaccctgcggatatatttttcacccaagaaatttcggatttcaacaagagacccattctcctggataacaacgttgatggggaagtgagcatacacagacctcatcttgtaacggaagcccagtgtaacacccttgatcatgttctgtacatgactacaaatagtccgaacggtagccagttcctttctgttaccccaccatttgtcaacccggagcctcttttttttctttccaagaaggctgagttctacattgatgtgattgaagtccctccgcagggttcctctggggcccttcacgataactgtgcgtcccttcagagtaatgtcgacattttctggaatgtcgacagtctgattgctgagaatagtcttcattctcgcgagagcggtatctgcgtgtcgggacgtgcggaggctctcactttccgtcatggcgctgaaggtagcgaccgtcgccggcagcgccgcgaaggcggtgctcgggccagcccttctctgccgtccctgggaggttctaggcgcccacgaggtcccctcgaggaacatcttttcagaacaaacaattcctccgtccgctaagtatggcgggcggcacacggtgaccatgatcccaggggatggcatcgggccagagctcatgctgcatgtcaagtccgtcttcaggcacgcatgtgtaccagtggactttgaagaggtgcacgtgagttccaatgctgatgaagaggacattcgcaatgccatcatggccatccgccggaaccgcgtggccctgaagggcaacatcgaaaccaaccataacctgccaccgtcgcacaaatctcgaaacaacatccttcgcaccagcctggacctctatgccaacgtcatccactgtaagagccttccaggcgtggtgacccggcacaaggacatagacatcctcattgtccgggagaacacagagggcgagtacagcagcctggagcatgagagtgtggcgggagtggtggagagcctgaagatcatcaccaaggccaagtccctgcgcattgccgagtatgccttcaagctggcgcaggagagcgggcgcaagaaagtgacggccgtgcacaaggccaacatcatgaaactgggcgatgggcttttcctccagtgctgcagggaggtggcagcccgctaccctcagatcaccttcgagaacatgattgtggataacaccaccatgcagctggtgtcccggccccagcagtttgatgtcatggtgatgcccaatctctatggcaacatcgtcaacaatgtctgcgcgggactggtcgggggcccaggccttgtggctggggccaactatggccatgtgtacgcggtgtttgaaacagctacgaggaacaccggcaagagtatcgccaataagaacatcgccaaccccacggccaccctgctggccagctgcatgatgctggaccacctcaagtgagtggctcccagtgccccgcaagcccctggccagccctccgggccccagggactgaaggctggctgtcccatcctcgctgcactcctatgccacctccatccgtaaggctgtcctggcatccatggacaatgagaatgtgaggttcccctcgcaccctaccctgctgccccgcccagtctccccctgcagcctcctgtagcccgcctcatgcactgaccacagcccccaggggaggatggtactggatctggccccatcttctggcccttagctggtgccacttccctcctgtggcaatcccagtcctgcacgtcacaggagacagcggggggtggcagggcctggtgtgtgccgagcctgcctgtgtcctacagatgcacactccggacatcgggggccagggcacaacatctgaagccatccaggacgtcatccgccacatccgcgtcatcaacggccgggccgtggaggcctaggctggccctaggaccttcttggtttgctccttggattccccttcccactccagcaccccagccagcctggtacgcagatcccagaataaagcaccttctcccta

SEQ ID NO: 351707 - DNA, 397 bp, Homo sapiens
ggatccccgggcagtacggatgtggggccagtacgatgtgccgtccctgggaggtctaggcgccacgaggtcccctctaggaacatcttttcagaacaaacaattcctccgtccgctaagtatggcgggcggcacacggtgaccatgatcccaggggatggcatcgggccagagctcatgctgcatgtcaagtccgtcttcaggcacgcatgtgtaccagtggactttgaagaggtgcacgtgagttccaatgctgatgaagaggacattcgcaatgccatcatggccatccgccggaaccgcgtggccctgaagggcaacatcgaaaccaaccataacctgccaccgtcgcacaaatctcgaaacaacatccttcggtgagatccgggtgtgcggg

SEQ ID NO: 351708 - DNA, 356 bp, Homo sapiens
  misc_feature (262)..(262): n is a, c, g, or t
ccagctagacttcctgggtgatgtggggacttggagaacttttctgtctagctagaggattgtaaacacaccaatcagcgctctgtgtctagctaaaggattgtaaatgcaccaatcagcagtctgtaaaaacgcaccaagcagcgctgtgtctactaaagcagcactgtgtctactaaagcagcgctgtgtctactaaacgcaccaatcagcactctgtaaaaacacaccactccgcactctgttaaatggaccaatcagnggaccttcttggtttgctccttggattccccttcccactccagcaccccagccagcctggtacgcagatcccagaataaagcaccttctcccta

SEQ ID NO: 351709 - DNA, 1721 bp, Homo sapiens
ggggcccagctggtcgcggtccccccctcaacatggcggcagcggtgctctaggcgccggaagggggcgtgaatcggtgcgaccgcgcgcgtgcgcagtaccgggtccgcgcctgtccccgaaacttcgcaccccgtcgaactctcgcgagagcggtatctgcgtgtcgggacgtgcggaggctctcactttccgtcatggcgctgaaggtagcgaccgtcgccggcagcgccgcgaaggcggtgctcgggccagcccttctctgccgtccctgggaggttctaggcgcccacgaggtcccctcgaggaacatcttttcagaacaaacaattcctccgtccgctaagtatggcgggcggcacacggtgaccatgatcccaggggatggcatcgggccagagctcatgctgcatgtcaagtccgtcttcaggcacgcatgtgtaccagtggactttgaagaggtgcacgtgagttccaatgctgatgaagaggacattcgcaatgccatcatggccatccgccggaaccgcgtggccctgaagggcaacatcgaaaccaaccataacctgccaccgtcgcacaaatctcgaaacaacatccttcgcaccagcctggacctctatgccaacgtcatccactgtaagagccttccaggcgtggtgacccggcacaaggacatagacatcctcattgtccgggagaacacagagggcgagtacagcagcctggagcatgagagtgtggcgggagtggtggagagcctgaagatcatcaccaaggccaagtccctgcgcattgccgagtatgccttcaagctggcgcaggagagcgggcgcaagaaagtgacggccgtgcacaaggccaacatcatgaaactgggcgatgggcttttcctccagtgctgcagggaggtggcagcccgctaccctcagatcaccttcgagaacatgattgtggataacaccaccatgcagctggtgtcccggccccagcagtttgatgtcatggtgatgcccaatctctatggcaacatcgtcaacaatgtctgcgcgggactggtcgggggcccaggccttgtggctggggccaactatggccatgtgtacgcggtgtttgaaacagctacgaggaacaccggcaagagtatcgccaataagaacatcgccaaccccacggccaccctgctggccagctgcatgatgctggaccacctcaagctgcactcctatgccacctccatccgtaaggctgtcctggcatccatggacaatgagaatgtgaggttcccctcgcaccctaccctgctgccccgcccagtctccccctgcagcctcctgtagcccgcctcatgcactgaccacagcccccaggggaggatggtactggatctggccccatcttctggcccttagctggtgccacttccctcctgtggcaatcccagtcctgcacgtcacaggagacagcggggggtggcagggcctggtgtgtgccgagcctgcctgtgtcctacagatgcacactccggacatcgggggccagggcacaacatctgaagccatccaggacgtcatccgccacatccgcgtcatcaacggccgggccgtggaggcctaggctggccctaggaccttcttggtttgctccttggattccccttcccactccagcaccccagccagcctggtacgcagatcccagaataaagcaccttctcccta

SEQ ID NO: 351710 - DNA, 1336 bp, Homo sapiens
ggggcccagctggtcgcggtccccccctcaacatggcggcagcggtgctctaggcgccggaagggggcgtgaatcggtgcgaccgcgcgcgtgcgcagtaccgggtccgcgcctgtccccgaaacttcgcaccccgtcgaactctcgcgagagcggtatctgcgtgtcgggacgtgcggaggctctcactttccgtcatggcgctgaaggtagcgaccgtcgccggcagcgccgcgaaggcggtgctcgggccagcccttctctgccgtccctgggaggttctaggcgcccacgaggtcccctcgaggaacatcttttcagaacaaacaattcctccgtccgctaagtatggcgggcggcacacggtgaccatgatcccaggggatggcatcgggccagagctcatgctgcatgtcaagtccgtcttcaggcacgcatgtgtaccagtggactttgaagaggtgcacgtgagttccaatgctgatgaagaggacattcgcaatgccatcatggccatccgccggaaccgcgtggccctgaagggcaacatcgaaaccaaccataacctgccaccgtcgcacaaatctcgaaacaacatccttcgcaccagcctggacctctatgccaacgtcatccactgtaagagccttccaggcgtggtgacccggcacaaggacatagacatcctcattgtccgggagaacacagagggcgagtacagcagcctggagcatgagagtgtggcgggagtggtggagagcctgaagatcatcaccaaggccaagtccctgcgcattgccgagtatgccttcaagctggcgcaggagagcgggcgcaagaaagtgacggccgtgcacaaggccaacatcatgaaactgggcgatgggcttttcctccagtgctgcagggaggtggcagcccgctaccctcagatcaccttcgagaacatgattgtggataacaccaccatgcaggctacgaggaacaccggcaagagtatcgccaataagaacatcgccaaccccacggccaccctgctggccagctgcatgatgctggaccacctcaagctgcactcctatgccacctccatccgtaaggctgtcctggcatccatggacaatgagaatatgcacactccggacatcgggggccagggcacaacatctgaagccatccaggacgtcatccgccacatccgcgtcatcaacggccgggccgtggaggcctaggctggccctaggaccttcttggtttgctccttggattccccttcccactccagcaccccagccagcctggtacgcagatcccagaataaagcaccttctcccta

SEQ ID NO: 351711 - DNA, 1458 bp, Homo sapiens
ggggcccagctggtcgcggtccccccctcaacatggcggcagcggtgctctaggcgccggaagggggcgtgaatcggtgcgaccgcgcgcgtgcgcagtaccgggtccgcgcctgtccccgaaacttcgcaccccgtcgaactctcgcgagagcggtatctgcgtgtcgggacgtgcggaggctctcactttccgtcatggcgctgaaggtagcgaccgtcgccggcagcgccgcgaaggcggtgctcgggccagcccttctctgccgtccctgggaggttctaggcgcccacgaggtcccctcgaggaacatcttttcagaacaaacaattcctccgtccgctaagtatggcgggcggcacacggtgaccatgatcccaggggatggcatcgggccagagctcatgctgcatgtcaagtccgtcttcaggcacgcatgtgtaccagtggactttgaagaggtgcacgtgagttccaatgctgatgaagaggacattcgcaatgccatcatggccatccgccggaaccgcgtggccctgaagggcaacatcgaaaccaaccataacctgccaccgtcgcacaaatctcgaaacaacatccttcgcaccagcctggacctctatgccaacgtcatccactgtaagagccttccaggcgtggtgacccggcacaaggacatagacatcctcattgtccgggagaacacagagggcgagtacagcagcctggagcatgagagtgtggcgggagtggtggagagcctgaagatcatcaccaaggccaagtccctgcgcattgccgagtatgccttcaagctggcgcaggagagcgggcgcaagaaagtgacggccgtgcacaaggccaacatcatgaaactgggcgatgggcttttcctccagtgctgcagggaggtggcagcccgctaccctcagatcaccttcgagaacatgattgctgcactcctatgccacctccatccgtaaggctgtcctggcatccatggacaatgagaatgtgaggttcccctcgcaccctaccctgctgccccgcccagtctccccctgcagcctcctgtagcccgcctcatgcactgaccacagcccccaggggaggatggtactggatctggccccatcttctggcccttagctggtgccacttccctcctgtggcaatcccagtcctgcacgtcacaggagacagcggggggtggcagggcctggtgtgtgccgagcctgcctgtgtcctacagatgcacactccggacatcgggggccagggcacaacatctgaagccatccaggacgtcatccgccacatccgcgtcatcaacggccgggccgtggaggcctaggctggccctaggaccttcttggtttgctccttggattccccttcccactccagcaccccagccagcctggtacgcagatcccagaataaagcaccttctcccta

SEQ ID NO: 351712 - DNA, 1220 bp, Homo sapiens
ggggcccagctggtcgcggtccccccctcaacatggcggcagcggtgctctaggcgccggaagggggcgtgaatcggtgcgaccgcgcgcgtgcgcagtaccgggtccgcgcctgtccccgaaacttcgcaccccgtcgaactctcgcgagagcggtatctgcgtgtcgggacgtgcggaggctctcactttccgtcatggcgctgaaggtagcgaccgtcgccggcagcgccgcgaaggcggtgctcgggccagcccttctctgccgtccctgggaggttctaggcgcccacgaggtcccctcgaggaacatcttttcagaacaaacaattcctccgtccgctaagtatggcgggcggcacacggtgaccatgatcccaggggatggcatcgggccagagctcatgctgcatgtcaagtccgtcttcaggcacgcatgtgtaccagtggactttgaagaggtgcacgtgagttccaatgctgatgaagaggacattcgcaatgccatcatggccatccgccggaaccgcgtggccctgaagggcaacatcgaaaccaaccataacctgccaccgtcgcacaaatctcgaaacaacatccttcgcaccagcctggacctctatgccaacgtcatccactgtaagagccttccaggcgtggtgacccggcacaaggacatagacatcctcattgtccgggagaacacagagggcgagtacagcagcctggagcatgagagtgtggcgggagtggtggagagcctgaagatcatcaccaaggccaagtccctgcgcattgccgagtatgccttcaagctggcgcaggagagcgggcgcaagaaagtgacggccgtgcacaaggccaacatcatgaaactgggcgatgggcttttcctccagtgctgcagggaggtggcagcccgctaccctcagatcaccttcgagaacatgattgctgcactcctatgccacctccatccgtaaggctgtcctggcatccatggacaatgagaatatgcacactccggacatcgggggccagggcacaacatctgaagccatccaggacgtcatccgccacatccgcgtcatcaacggccgggccgtggaggcctaggctggccctaggaccttcttggtttgctccttggattccccttcccactccagcaccccagccagcctggtacgcagatcccagaataaagcaccttctcccta

SEQ ID NO: 351713 - DNA, 2293 bp, Homo sapiens
ctttgcggggcgtggaccagcagggccccgcggggagggaaggagacgcggggcccggagctcggacctggagcccagccccgcggcccggaacggggcttcttgcctgtgcgtggcgtgactacgtgaacgggaaggagctctccaagctgtctcaggagcaaactctgcaggccctgcgctcctccaaggagcccctggtgatccaggtgctgagacgcagcccccgcctccggggggacagctcctgtcacgacctgcagctggtggacagtggcactcagaccgacatcaccttcgagcatatcatggcgctgggcaagctgcgtccgcccaccccgcccatggtcatcctggagccgtacgtcctctctgagctggccgagggaggaccctcctgtccgggacgtcgctgccggaagtgccagggttgagggcctcagctcctcctcctccatcctctctcctctgccgcctcacaagcatcactccttgaatcttcttgcatcccttgtctgtctcattcctctacctgctctgaatttcctccatctcttcagcttctttctttggcccgaccggaagaagggcctttcatccaggcctggtggctcatgaccgcccccccaatcagccatgagtattatgacccggcggagtttatggagggcggcccgcaggaggcagaccgcttggatgagctggagtatgaggaggtggagctgtataaaagcagccaccgggacaagctgggcctgatggtttgctaccgcacggacgacgaggaggacctgggcatttatgtcggagaggtaaatcccaacagcattgcagccaaagacggccggatccgtgagggagaccgcatcatccagattaacggtgtagacgtccagaaccgggaagaggcggtggccatcctgagccaggaagagaacaccaacatctccctgctggtggcccgacctgagagtcagctggcgaaaaggtggaaggacagcgaccgggatgacttcctggatgactttggctctgagaatgagggggagctgcgtgctcgtaaactgaaatcaccccctgcccagcaggttctaggcgcccacgaggtcccctcgaggaacatcttttcagaacaaacaattcctccgtccgctaagtatggcgggcggcacacggtgaccatgatcccaggggatggcatcgggccagagctcatgctgcatgtcaagtccgtcttcaggcacgcatgtgtaccagtggactttgaagaggtgcacgtgagttccaatgctgatgaagaggacattcgcaatgccatcatggccatccgccggaaccgcgtggccctgaagggcaacatcgaaaccaaccataacctgccaccgtcgcacaaatctcgaaacaacatccttcgcaccagcctggacctctatgccaacgtcatccactgtaagagccttccaggcgtggtgacccggcacaaggacatagacatcctcattgtccgggagaacacagagggcgagtacagcagcctggagcatgagagtgtggcgggagtggtggagagcctgaagatcatcaccaaggccaagtccctgcgcattgccgagtatgccttcaagctggcgcaggagagcgggcgcaagaaagtgacggccgtgcacaaggccaacatcatgaaactgggcgatgggcttttcctccagtgctgcagggaggtggcagcccgctaccctcagatcaccttcgagaacatgattgtggataacaccaccatgcagctggtgtcccggccccagcagtttgatgtcatggtgatgcccaatctctatggcaacatcgtcaacaatgtctgcgcgggactggtcgggggcccaggccttgtggctggggccaactatggccatgtgtacgcggtgtttgaaacagctacgaggaacaccggcaagagtatcgccaataagaacatcgccaaccccacggccaccctgctggccagctgcatgatgctggaccacctcaagctgcactcctatgccacctccatccgtaaggctgtcctggcatccatggacaatgagaatatgcacactccggacatcgggggccagggcacaacatctgaagccatccaggacgtcatccgccacatccgcgtcatcaacggccgggccgtggaggcctaggctggccctaggaccttcttggtttgctccttggattccccttcccactccagcaccccagccagcctggtacgcagatcccagaataaagcaccttctcccta

SEQ ID NO: 351714 - DNA, 1256 bp, Homo sapiens
ggggcccagctggtcgcggtccccccctcaacatggcggcagcggtgctctaggcgccggaagggggcgtgaatcggtgcgaccgcgcgcgtgcgcagtaccgggtccgcgcctgtccccgaaacttcgcaccccgtcgaactctcgcgagagcggtatctgcgtgtcgggacgtgcggaggctctcactttccgtcatggcgctgaaggtagcgaccgtcgccggcagcgccgcgaaggcggtgctcgggccagcccttctctgccgtccctgggaggttctaggcgcccacgaggtcccctcgaggaacatcttttcagaacaaacaattcctccgtccgctaagtatggcgggcggcacacggtgaccatgatcccaggggatggcatcgggccagagctcatgctgcatgtcaagtccgtcttcaggcacgcatgtgtaccagtggactttgaagaggtgcacgtgagttccaatgctgatgaagaggacattcgcaatgccatcatggccatccgccggaaccgcgtggccctgaagggcaacatcgaaaccaaccataacctgccaccgtcgcacaaatctcgaaacaacatccttcgcaccagcctggacctctatgccaacgtcatccactgtaagagccttccaggcgtggtgacccggcacaaggacatagacatcctcattgtccgggagaacacagagggcgagtacagcagcctggagcatgagagtgtggcgggagtggtggagagcctgaagatcatcaccaaggccaagtccctgcgcattgccgagtatgccttcaagctggcgcaggagagcgggcgcaagaaagtgacggccgtgcacaaggccaacatcatgaaactgggcgatgggcttttcctccagtgctgcagggaggtggcagcccgctaccctcagatcaccttcgagaacatgattgctgcactcctatgccacctccatccgtaaggctgtcctggcatccatggacaatgagaatggcctggtgtgtgccgagcctgcctgtgtcctacagatgcacactccggacatcgggggccagggcacaacatctgaagccatccaggacgtcatccgccacatccgcgtcatcaacggccgggccgtggaggcctaggctggccctaggaccttcttggtttgctccttggattccccttcccactccagcaccccagccagcctggtacgcagatcccagaataaagcaccttctcccta

SEQ ID NO: 351715 - DNA, 1949 bp, Homo sapiens
ccaaatcaataggtcttttattgcatcatttaaatatcacaagtaggtcttaagtgtcatctggcatcttctttctgtagccaggtaactcttagatcttattcatcagcctgctgaacagttcctttttcagagacatagataccatccaaaaatttcctgatatccttgtttttaactgttgtggcttgctgaatcaaagccgctgaatttgaaacaagctcaatgtcatttccttcaaggattaattcatctttctgggcttgagatactgaacaagcaacacctggtctcatccgaaccctgcggatatatttttcacccaagaaatttcggatttcaacaagagacccattctcctggataacaacgttgatggggaagtgagcatacacagacctcatcttgtaacggaagcccagtgtaacacccttgatcatgttctgtacatgactacaaatagtccgaacggtagccagttcctttctgttaccccaccatttgtcaacccggagcctcttttttttctttccaagaaggctgagttctacattgatgtgattgaagtccctccgcagggttcctctggggcccttcacgataactgtgcgtcccttcagagtaatgtcgacattttctggaatgtcgacagtctgattgctgagaatagtcttcattctcgcgagagcggtatctgcgtgtcgggacgtgcggaggctctcactttccgtcatggcgctgaaggttctaggcgcccacgaggtcccctcgaggaacatcttttcagaacaaacaattcctccgtccgctaagtatggcgggcggcacacggtgaccatgatcccaggggatggcatcgggccagagctcatgctgcatgtcaagtccgtcttcaggcacgcatgtgtaccagtggactttgaagaggtgcacgtgagttccaatgctgatgaagaggacattcgcaatgccatcatggccatccgccggaaccgcgtggccctgaagggcaacatcgaaaccaaccataacctgccaccgtcgcacaaatctcgaaacaacatccttcgcaccagcctggacctctatgccaacgtcatccactgtaagagccttccaggcgtggtgacccggcacaaggacatagacatcctcattgtccgggagaacacagagggcgagtacagcagcctggagcatgagagtgtggcgggagtggtggagagcctgaagatcatcaccaaggccaagtccctgcgcattgccgagtatgccttcaagctggcgcaggagagcgggcgcaagaaagtgacggccgtgcacaaggccaacatcatgaaactgggcgatgggcttttcctccagtgctgcagggaggtggcagcccgctaccctcagatcaccttcgagaacatgattgtggataacaccaccatgcagctggtgtcccggccccagcagtttgatgtcatggtgatgcccaatctctatggcaacatcgtcaacaatgtctgcgcgggactggtcgggggcccaggccttgtggctggggccaactatggccatgtgtacgcggtgtttgaaacagctacgaggaacaccggcaagagtatcgccaataagaacatcgccaaccccacggccaccctgctggccagctgcatgatgctggaccacctcaagctgcactcctatgccacctccatccgtaaggctgtcctggcatccatggacaatgagaatatgcacactccggacatcgggggccagggcacaacatctgaagccatccaggacgtcatccgccacatccgcgtcatcaacggccgggccgtggaggcctaggctggccctaggaccttcttggtttgctccttggattccccttcccactccagcaccccagccagcctggtacgcagatcccagaataaagcaccttctcccta

SEQ ID NO: 351716 - DNA, 2138 bp, Homo sapiens
ccaaatcaataggtcttttattgcatcatttaaatatcacaagtaggtcttaagtgtcatctggcatcttctttctgtagccaggtaactcttagatcttattcatcagcctgctgaacagttcctttttcagagacatagataccatccaaaaatttcctgatatccttgtttttaactgttgtggcttgctgaatcaaagccgctgaatttgaaacaagctcaatgtcatttccttcaaggattaattcatctttctgggcttgagatactgaacaagcaacacctggtctcatccgaaccctgcggatatatttttcacccaagaaatttcggatttcaacaagagacccattctcctggataacaacgttgatggggaagtgagcatacacagacctcatcttgtaacggaagcccagtgtaacacccttgatcatgttctgtacatgactacaaatagtccgaacggtagccagttcctttctgttaccccaccatttgtcaacccggagcctcttttttttctttccaagaaggctgagttctacattgatgtgattgaagtccctccgcagggttcctctggggcccttcacgataactgtgcgtcccttcagagtaatgtcgacattttctggaatgtcgacagtctgattgctgagaatagtcttcattctcgcgagagcggtatctgcgtgtcgggacgtgcggaggctctcactttccgtcatggcgctgaaggtagcgaccgtcgccggcagcgccgcgaaggcggtgctcgggccagcccttctctgccgtccctgggagtgggccatgctgcacagacaggggacctgcctgggcacagtggggacggtccgtttttccttccaacttggctttctgggttagacatcaaaccaaccgctggcatttggtctctgccaggttctaggcgcccacgaggtcccctcgaggaacatcttttcagaacaaacaattcctccgtccgctaagtatggcgggcggcacacggtgaccatgatcccaggggatggcatcgggccagagctcatgctgcatgtcaagtccgtcttcaggcacgcatgtgtaccagtggactttgaagaggtgcacgtgagttccaatgctgatgaagaggacattcgcaatgccatcatggccatccgccggaaccgcgtggccctgaagggcaacatcgaaaccaaccataacctgccaccgtcgcacaaatctcgaaacaacatccttcgcaccagcctggacctctatgccaacgtcatccactgtaagagccttccaggcgtggtgacccggcacaaggacatagacatcctcattgtccgggagaacacagagggcgagtacagcagcctggagcatgagagtgtggcgggagtggtggagagcctgaagatcatcaccaaggccaagtccctgcgcattgccgagtatgccttcaagctggcgcaggagagcgggcgcaagaaagtgacggccgtgcacaaggccaacatcatgaaactgggcgatgggcttttcctccagtgctgcagggaggtggcagcccgctaccctcagatcaccttcgagaacatgattgtggataacaccaccatgcagctggtgtcccggccccagcagtttgatgtcatggtgatgcccaatctctatggcaacatcgtcaacaatgtctgcgcgggactggtcgggggcccaggccttgtggctggggccaactatggccatgtgtacgcggtgtttgaaacagctacgaggaacaccggcaagagtatcgccaataagaacatcgccaaccccacggccaccctgctggccagctgcatgatgctggaccacctcaagctgcactcctatgccacctccatccgtaaggctgtcctggcatccatggacaatgagaatatgcacactccggacatcgggggccagggcacaacatctgaagccatccaggacgtcatccgccacatccgcgtcatcaacggccgggccgtggaggcctaggctggccctaggaccttcttggtttgctccttggattccccttcccactccagcaccccagccagcctggtacgcagatcccagaataaagcaccttctcccta

SEQ ID NO: 351717 - DNA, 2707 bp, Homo sapiens
cgccagggtatggcccctggccccggcccgggacccgaggtcccgcgcccgggtcagtgaaaggcgtcttcccgttcccgccctccgcctcctctcgccggccagcaacatgggatgtaatatgtgcgtggtccagaaaccggaggagcagtacaaagtgatgctgcaggtgaacgggaaggagctctccaagctgtctcaggagcaaactctgcaggccctgcgctcctccaaggagcccctggtgatccaggtgctgagacgcagcccccgcctccggggggacagctcctgtcacgacctgcagctggtggacagtggcactcagaccgacatcaccttcgagcatatcatggcgctgggcaagctgcgtccgcccaccccgcccatggtcatcctggagccgtacgtcctctctgagctggccgagggaggaccctcctgtccgggacgtcgctgccggaagtgccagggttgagggcctcagctcctcctcctccatcctctctcctctgccgcctcacaagcatcactccttgaatcttcttgcatcccttgtctgtctcattcctctacctgctctgaatttcctccatctcttcagcttctttctttggcccgaccggaagaagggcctttcatccaggcctggtggctcatgaccgcccccccaatcagccatgagtattatgacccggcggagtttatggagggcggcccgcaggaggcagaccgcttggatgagctggagtatgaggaggtggagctgtataaaagcagccaccgggacaagctgggcctgatggtttgctaccgcacggacgacgaggaggacctgggcatttatgtcggagaggtaaatcccaacagcattgcagccaaagacggccggatccgtgagggagaccgcatcatccagattaacggtgtagacgtccagaaccgggaagaggcggtggccatcctgagccaggaagagaacaccaacatctccctgctggtggcccgacctgagagtcagctggcgaaaaggtggaaggacagcgaccgggatgacttcctggatgactttggctctgagaatgagggggagctgcgtgctcgtaaactgaaatcaccccctgcccagcaggttctaggcgcccacgaggtcccctcgaggaacatcttttcagaacaaacaattcctccgtccgctaagtatggcgggcggcacacggtgaccatgatcccaggggatggcatcgggccagagctcatgctgcatgtcaagtccgtcttcaggtatggagctcctgggtccccgccttgtcctcagccagggggccctgaggactttgtgccaagaggggcattgcgcccagaagcactcggtgaggccatggcaagacgacctgtaagcccaggccttgcgtcccatggcctgtgatcccgccagactggcctgggctcggggaaggtggcaccagtcctgccacagtgtgcattgtggagttcaagcgtgtccccatcagtcagtgaaggtgggcccagtcccttctcagtcagagccaggtcagggcaggtagcaacaggagagaggtagcctgggcaggcttcctggaggaggtgcgggggggtctgggccagcctccctgaccctgccgtgcctcaggcacgcatgtgtaccagtggactttgaagaggtgcacgtgagttccaatgctgatgaagaggacattcgcaatgccatcatggccatccgccggaaccgcgtggccctgaagggcaacatcgaaaccaaccataacctgccaccgtcgcacaaatctcgaaacaacatccttcgcaccagcctggacctctatgccaacgtcatccactgtaagagccttccaggcgtggtgacccggcacaaggacatagacatcctcattgtccgggagaacacagagggcgagtacagcagcctggagcatgagagtgtggcgggagtggtggagagcctgaagatcatcaccaaggccaagtccctgcgcattgccgagtatgccttcaagctggcgcaggagagcgggcgcaagaaagtgacggccgtgcacaaggccaacatcatgaaactgggcgatgggcttttcctccagtgctgcagggaggtggcagcccgctaccctcagatcaccttcgagaacatgattgtggataacaccaccatgcagctggtgtcccggccccagcagtttgatgtcatggtgatgcccaatctctatggcaacatcgtcaacaatgtctgcgcgggactggtcgggggcccaggccttgtggctggggccaactatggccatgtgtacgcggtgtttgaaacagctacgaggaacaccggcaagagtatcgccaataagaacatcgccaaccccacggccaccctgctggccagctgcatgatgctggaccacctcaagctgcactcctatgccacctccatccgtaaggctgtcctggcatccatggacaatgagaatatgcacactccggacatcgggggccagggcacaacatctgaagccatccaggacgtcatccgccacatccgcgtcatcaacggccgggccgtggaggcctaggctggccctaggaccttcttggtttgctccttggattccccttcccactccagcaccccagccagcctggtacgcagatcccagaataaagcaccttctcccta

SEQ ID NO: 351718 - DNA, 1853 bp, Homo sapiens
ggggcccagctggtcgcggtccccccctcaacatggcggcagcggtgctctaggcgccggaagggggcgtgaatcggtgcgaccgcgcgcgtgcgcagtaccgggtccgcgcctgtccccgaaacttcgcaccccgtcgaactctcgcgagagcggtatctgcgtgtcgggacgtgcggaggctctcactttccgtcatggcgctgaaggtagcgaccgtcgccggcagcgccgcgaaggcggtgctcgggccagcccttctctgccgtccctgggaggttctaggcgcccacgaggtcccctcgaggaacatcttttcagaacaaacaattcctccgtccgctaagtatggcgggcggcacacggtgaccatgatcccaggggatggcatcgggccagagctcatgctgcatgtcaagtccgtcttcaggtatggagctcctgggtccccgccttgtcctcagccagggggccctgaggactttgtgccaagaggggcattgcgcccagaagcactcggtgaggccatggcaagacgacctgtaagcccaggccttgcgtcccatggcctgtgatcccgccagactggcctgggctcggggaaggtggcaccagtcctgccacagtgtgcattgtggagttcaagcgtgtccccatcagtcagtgaaggtgggcccagtcccttctcagtcagagccaggtcagggcaggtagcaacaggagagaggtagcctgggcaggcttcctggaggaggtgcgggggggtctgggccagcctccctgaccctgccgtgcctcaggcacgcatgtgtaccagtggactttgaagaggtgcacgtgagttccaatgctgatgaagaggacattcgcaatgccatcatggccatccgccggaaccgcgtggccctgaagggcaacatcgaaaccaaccataacctgccaccgtcgcacaaatctcgaaacaacatccttcgcaccagcctggacctctatgccaacgtcatccactgtaagagccttccaggcgtggtgacccggcacaaggacatagacatcctcattgtccgggagaacacagagggcgagtacagcagcctggagcatgagagtgtggcgggagtggtggagagcctgaagatcatcaccaaggccaagtccctgcgcattgccgagtatgccttcaagctggcgcaggagagcgggcgcaagaaagtgacggccgtgcacaaggccaacatcatgaaactgggcgatgggcttttcctccagtgctgcagggaggtggcagcccgctaccctcagatcaccttcgagaacatgattgtggataacaccaccatgcagctggtgtcccggccccagcagtttgatgtcatggtgatgcccaatctctatggcaacatcgtcaacaatgtctgcgcgggactggtcgggggcccaggccttgtggctggggccaactatggccatgtgtacgcggtgtttgaaacagctacgaggaacaccggcaagagtatcgccaataagaacatcgccaaccccacggccaccctgctggccagctgcatgatgctggaccacctcaagctgcactcctatgccacctccatccgtaaggctgtcctggcatccatggacaatgagaatatgcacactccggacatcgggggccagggcacaacatctgaagccatccaggacgtcatccgccacatccgcgtcatcaacggccgggccgtggaggcctaggctggccctaggaccttcttggtttgctccttggattccccttcccactccagcaccccagccagcctggtacgcagatcccagaataaagcaccttctcccta

SEQ ID NO: 351719 - DNA, 1471 bp, Homo sapiens
ggggcccagctggtcgcggtccccccctcaacatggcggcagcggtgctctaggcgccggaagggggcgtgaatcggtgcgaccgcgcgcgtgcgcagtaccgggtccgcgcctgtccccgaaacttcgcaccccgtcgaactctcgcgagagcggtatctgcgtgtcgggacgtgcggaggctctcactttccgtcatggcgctgaaggtagcgaccgtcgccggcagcgccgcgaaggcggtgctcgggccagcccttctctgccgtccctgggaggttctaggcgcccacgaggtcccctcgaggaacatcttttcagaacaaacaattcctccgtccgctaagtatggcgggcggcacacggtgaccatgatcccaggggatggcatcgggccagagctcatgctgcatgtcaagtccgtcttcaggcacgcatgtgtaccagtggactttgaagaggtgcacgtgagttccaatgctgatgaagaggacattcgcaatgccatcatggccatccgccggaaccgcgtggccctgaagggcaacatcgaaaccaaccataacctgccaccgtcgcacaaatctcgaaacaacatccttcgcaccagcctggacctctatgccaacgtcatccactgtaagagccttccaggcgtggtgacccggcacaaggacatagacatcctcattgtccgggagaacacagagggcgagtacagcagcctggagcatgagagtgtggcgggagtggtggagagcctgaagatcatcaccaaggccaagtccctgcgcattgccgagtatgccttcaagctggcgcaggagagcgggcgcaagaaagtgacggccgtgcacaaggccaacatcatgctacgaggaacaccggcaagagtatcgccaataagaacatcgccaaccccacggccaccctgctggccagctgcatgatgctggaccacctcaagctgcactcctatgccacctccatccgtaaggctgtcctggcatccatggacaatgagaatgtgaggttcccctcgcaccctaccctgctgccccgcccagtctccccctgcagcctcctgtagcccgcctcatgcactgaccacagcccccaggggaggatggtactggatctggccccatcttctggcccttagctggtgccacttccctcctgtggcaatcccagtcctgcacgtcacaggagacagcggggggtggcagggcctggtgtgtgccgagcctgcctgtgtcctacagatgcacactccggacatcgggggccagggcacaacatctgaagccatccaggacgtcatccgccacatccgcgtcatcaacggccgggccgtggaggcctaggctggccctaggaccttcttggtttgctccttggattccccttcccactccagcaccccagccagcctggtacgcagatcccagaataaagcaccttctcccta

SEQ ID NO: 351720 - DNA, 1233 bp, Homo sapiens
ggggcccagctggtcgcggtccccccctcaacatggcggcagcggtgctctaggcgccggaagggggcgtgaatcggtgcgaccgcgcgcgtgcgcagtaccgggtccgcgcctgtccccgaaacttcgcaccccgtcgaactctcgcgagagcggtatctgcgtgtcgggacgtgcggaggctctcactttccgtcatggcgctgaaggtagcgaccgtcgccggcagcgccgcgaaggcggtgctcgggccagcccttctctgccgtccctgggaggttctaggcgcccacgaggtcccctcgaggaacatcttttcagaacaaacaattcctccgtccgctaagtatggcgggcggcacacggtgaccatgatcccaggggatggcatcgggccagagctcatgctgcatgtcaagtccgtcttcaggcacgcatgtgtaccagtggactttgaagaggtgcacgtgagttccaatgctgatgaagaggacattcgcaatgccatcatggccatccgccggaaccgcgtggccctgaagggcaacatcgaaaccaaccataacctgccaccgtcgcacaaatctcgaaacaacatccttcgcaccagcctggacctctatgccaacgtcatccactgtaagagccttccaggcgtggtgacccggcacaaggacatagacatcctcattgtccgggagaacacagagggcgagtacagcagcctggagcatgagagtgtggcgggagtggtggagagcctgaagatcatcaccaaggccaagtccctgcgcattgccgagtatgccttcaagctggcgcaggagagcgggcgcaagaaagtgacggccgtgcacaaggccaacatcatgctacgaggaacaccggcaagagtatcgccaataagaacatcgccaaccccacggccaccctgctggccagctgcatgatgctggaccacctcaagctgcactcctatgccacctccatccgtaaggctgtcctggcatccatggacaatgagaatatgcacactccggacatcgggggccagggcacaacatctgaagccatccaggacgtcatccgccacatccgcgtcatcaacggccgggccgtggaggcctaggctggccctaggaccttcttggtttgctccttggattccccttcccactccagcaccccagccagcctggtacgcagatcccagaataaagcaccttctcccta

SEQ ID NO: 351721 - DNA, 1031 bp, Homo sapiens
  misc_feature (872)..(872): n is a, c, g, or t
  misc_feature (879)..(879): n is a, c, g, or t
ggggcccagctggtcgcggtccccccctcaacatggcggcagcggtgctctaggcgccggaagggggcgtgaatcggtgcgaccgcgcgcgtgcgcagtaccgggtccgcgcctgtccccgaaacttcgcaccccgtcgaactctcgcgagagcggtatctgcgtgtcgggacgtgcggaggctctcactttccgtcatggcgctgaaggtagcgaccgtcgccggcagcgccgcgaaggcggtgctcgggccagcccttctctgccgtccctgggaggttctaggcgcccacgaggtcccctcgaggaacatcttttcagaacaaacaattcctccgtccgctaagtatggcgggcggcacacggtgaccatgatcccaggggatggcatcgggccagagctcatgctgcatgtcaagtccgtcttcaggcacgcatgtgtaccagtggactttgaagaggtgcacgtgagttccaatgctgatgaagaggacattcgcaatgccatcatggccatccgccggaaccgcgtggccctgaagggcaacatcgaaaccaaccataacctgccaccgtcgcacaaatctcgaaacaacatccttcgcaccagcctggacctctatgccaacgtcatccactgtaagagccttccaggcgtggtgacccggcacaaggacatagacatcctcattgtccgggagaacacagagggcgagtacagcagcctggagcatgagagtgtggcgggagtggtggagagcctgaagatcatcaccaaggccaagtccctgcgcattgccgagtatgccttcaagctggcgcaggagagcgggcgcaagaaagtgacggccgtgcacaaggccaacatcatnaactggncgatgggcatcttgactccaccgcggcagggaggagcgcagaccgctaccctcagagaagccttcgagaaccagtgactctgatggacaacagacaccagcacactatggaagtaactcggaactacagcacgcgtgattgacattggtgag

SEQ ID NO: 351722 - DNA, 363 bp, Homo sapiens
tagcggtccgttttgggctgtcgtgcacacggctcgatgcgtgctggtcgaccatcatggcctggtggcaagccctggtgagccgctgcacctcaagctgcactcctatgccacctccatccgtaaggctgtcctggcatccatggacaatgagaatatgcacactccggacatcgggggccagggcacaacatctgaagccatccaggacgtcatccgccacatccgcgtcatcaacggccgggccgtggaggcctaggctggccctaggaccttcttggtttgctccttggattccccttcccactccagcaccccagccagcctggtacgcagatcccagaataaagcaccttctcccta

SEQ ID NO: 351723 - DNA, 250 bp, Homo sapiens
ccgcctcagcctctcaaagtgttgggattacaggcgtgagccgtcgtgcccagcccctgtgatttcttttacctccctctgagctgactcttgtggggccccacggctctgatttcagggcttgtctggctagagaggaccctcgtgcttggagactgggtggacgcctcctcgggcctgtttgcgctgcgatgctgggattcgagtgagagcagctgtgtgtgagcctgtccagtgacgggctccctga

SEQ ID NO: 351724 - DNA, 1483 bp, Homo sapiens
ggggcccagctggtcgcggtccccccctcaacatggcggcagcggtgctctaggcgccggaagggggcgtgaatcggtgcgaccgcgcgcgtgcgcagtaccgggtccgcgcctgtccccgaaacttcgcaccccgtcgaactctcgcgagagcggtatctgcgtgtcgggacgtgcggaggctctcactttccgtcatggcgctgaaggtagcgaccgtcgccggcagcgccgcgaaggcggtgctcgggccagcccttctctgccgtccctgggaggttctaggcgcccacgaggtcccctcgaggaacatcttttcagaacaaacaattcctccgtccgctaagtatggcgggcggcacacggtgaccatgatcccaggggatggcatcgggccagagctcatgctgcatgtcaagtccgtcttcaggcacgcatgtgtaccagtggactttgaagaggtgcacgtgagttccaatgctgatgaagaggacattcgcaatgccatcatggccatccgccggaaccgcgtggccctgaagggcaacatcgaaaccaaccataacctgccaccgtcgcacaaatctcgaaacaacatccttcgcaccagcctggacctctatgccaacgtcatccactgtaagagccttccaggcgtggtgacccggcacaaggacatagacatcctcattgtccgggagaacacagagggcgagtacagcagcctggagcatgagagtgtggcgggagtggtggagagcctgaagatcatcaccaaggccaagtccctgcgcattgccgagtatgccttcaagctggcgcaggagagcgggcgcaagaaagtgacggccgtgcacaaggccaacatcatgaaactgggcgatgggcttttcctccagtgctgcagggaggtggcagcccgctaccctcagatcaccttcgagaacatgattgtggataacaccaccatgcagctggtgtcccggccccagcagtttgatgtcatggtgatgcccaatctctatggcaacatcgtcaacaatgtctgcgcgggactggtcgggggcccaggccttgtggctggggccaactatggccatgtgtacgcggtgtttgaaacagctacgaggaacaccggcaagagtatcgccaataagaacatcgccaaccccacggccaccctgctggccagctgcatgatgctggaccacctcaagctgcactcctatgccacctccatccgtaaggctgtcctggcatccatggacaatgagaatatgcacactccggacatcgggggccagggcacaacatctgaagccatccaggacgtcatccgccacatccgcgtcatcaacggccgggccgtggaggcctaggctggccctaggaccttcttggtttgctccttggattccccttcccactccagcaccccagccagcctggtacgcagatcccagaataaagcaccttctcccta

SEQ ID NO: 351725 - DNA, 1750 bp, Homo sapiens
cgccagggtatggcccctggccccggcccgggacccgaggtcccgcgcccgggtcagtgaaaggcgtcttcccgttcccgccctccgcctcctctcgccggccagcaacatgggatgtaatatgtgcgtggtccagaaaccggaggagcagtacaaagtgatgctgcaggtgaacgggaaggagctctccaagctgtctcaggagcaaactctgcaggccctgcgctcctccaaggagcccctggtgatccaggtgctgagacgcagcccccgcctccggggggacagctcctgtcacgacctgcagctggtggacagtggcactcagaccgacatcaccttcgagcatatcatggcgctgggcaagctgcgtccgcccaccccgcccatggtcatcctggagccccccccaatcagccatgagtattatgacccggcggagtttatggagggcggcccgcaggaggcagaccgcttggatgagctggagtatgaggaggtggagctgtataaaagcagccaccgggacaagctgggcctgatggtttgctaccgcacggacgacgaggaggacctgggcatttatgtcggagaggtaaatcccaacagcattgcagccaaagacggccggatccgtgagggagaccgcatcatccagattaacggtgtagacgtccagaaccgggaagaggcggtggccatcctgagccaggaagagaacaccaacatctccctgctggtggcccgacctgagagtcagctggcgaaaaggtggaaggacagcgaccgggatgacttcctggatgactttggctctgagaatgagggggagctgcgtgctcgtaaactgaaatcaccccctgcccagcagcccggaaacgaagaggagaagggggctcccgatgccggcccaggcctgagcaacagccaggagctggacagcggggtgggccggactgacgagagcacccggaacgaagagagctctgagcacgacctgctgggggacgaacccccgagctccaccaacaccccgggaagcctgcgcaagtttggcctgcaaggggacgccctgcagagccgggacttccatttcagcatggactctctgctggccgagggggcggggctgggagggggcgacgtcccgggcctcacggatgaggagtatgagcgctaccgtgagctcctggagatcaagtgccacctggagaacggcaaccagctgggcctcctctttccccgggcctccggaggcaacagcgccctggacgtcaaccgcaacgagagcctgggccacgagatggccatgctggaggaggagctaaggcacctggaattcaagtgccgcaacatactgcgggcgcagaagatgcagcagctgcgtgagcgctgcatgaaggcctggctgctggaggaggagagcctctacgacctggcggccagcgagcccaagaagcacgagctgtccgacatctccgagctgcccgagaagtcggacaaggacagcaccagcgcctacaacactggggagagctgccgcagcaccccgctgcttgtggagcccctgcccgagagccccctgcggcgggccatggccggcaactccaacttgaaccggacccctcccggccccgctgttgccacccccgccaaggcagctcctccaccggggagccccgccaagttccggtccctctcccgggatcctgaggccggccggaggcagcacgcggaggagcgcggccgc

SEQ ID NO: 351726 - DNA, 1519 bp, Homo sapiens
ggggcccagctggtcgcggtccccccctcaacatggcggcagcggtgctctaggcgccggaagggggcgtgaatcggtgcgaccgcgcgcgtgcgcagtaccgggtccgcgcctgtccccgaaacttcgcaccccgtcgaactctcgcgagagcggtatctgcgtgtcgggacgtgcggaggctctcactttccgtcatggcgctgaaggtagcgaccgtcgccggcagcgccgcgaaggcggtgctcgggccagcccttctctgccgtccctgggaggttctaggcgcccacgaggtcccctcgaggaacatcttttcagaacaaacaattcctccgtccgctaagtatggcgggcggcacacggtgaccatgatcccaggggatggcatcgggccagagctcatgctgcatgtcaagtccgtcttcaggcacgcatgtgtaccagtggactttgaagaggtgcacgtgagttccaatgctgatgaagaggacattcgcaatgccatcatggccatccgccggaaccgcgtggccctgaagggcaacatcgaaaccaaccataacctgccaccgtcgcacaaatctcgaaacaacatccttcgcaccagcctggacctctatgccaacgtcatccactgtaagagccttccaggcgtggtgacccggcacaaggacatagacatcctcattgtccgggagaacacagagggcgagtacagcagcctggagcatgagagtgtggcgggagtggtggagagcctgaagatcatcaccaaggccaagtccctgcgcattgccgagtatgccttcaagctggcgcaggagagcgggcgcaagaaagtgacggccgtgcacaaggccaacatcatgaaactgggcgatgggcttttcctccagtgctgcagggaggtggcagcccgctaccctcagatcaccttcgagaacatgattgtggataacaccaccatgcagctggtgtcccggccccagcagtttgatgtcatggtgatgcccaatctctatggcaacatcgtcaacaatgtctgcgcgggactggtcgggggcccaggccttgtggctggggccaactatggccatgtgtacgcggtgtttgaaacagctacgaggaacaccggcaagagtatcgccaataagaacatcgccaaccccacggccaccctgctggccagctgcatgatgctggaccacctcaagctgcactcctatgccacctccatccgtaaggctgtcctggcatccatggacaatgagaatggcctggtgtgtgccgagcctgcctgtgtcctacagatgcacactccggacatcgggggccagggcacaacatctgaagccatccaggacgtcatccgccacatccgcgtcatcaacggccgggccgtggaggcctaggctggccctaggaccttcttggtttgctccttggattccccttcccactccagcaccccagccagcctggtacgcagatcccagaataaagcaccttctcccta

SEQ ID NO: 351727 - DNA, 2337 bp, Homo sapiens
cgccagggtatggcccctggccccggcccgggacccgaggtcccgcgcccgggtcagtgaaaggcgtcttcccgttcccgccctccgcctcctctcgccggccagcaacatgggatgtaatatgtgcgtggtccagaaaccggaggagcagtacaaagtgatgctgcaggtgaacgggaaggagctctccaagctgtctcaggagcaaactctgcaggccctgcgctcctccaaggagcccctggtgatccaggtgctgagacgcagcccccgcctccggggggacagctcctgtcacgacctgcagctggtggacagtggcactcagaccgacatcaccttcgagcatatcatggcgctgggcaagctgcgtccgcccaccccgcccatggtcatcctggagccgtacgtcctctctgagctggccgagggaggaccctcctgtccgggacgtcgctgccggaagtgccagggttgagggcctcagctcctcctcctccatcctctctcctctgccgcctcacaagcatcactccttgaatcttcttgcatcccttgtctgtctcattcctctacctgctctgaatttcctccatctcttcagcttctttctttggcccgaccggaagaagggcctttcatccaggcctggtggctcatgaccgcccccccaatcagccatgagtattatgacccggcggagtttatggagggcggcccgcaggaggcagaccgcttggatgagctggagtatgaggaggtggagctgtataaaagcagccaccgggacaagctgggcctgatggtttgctaccgcacggacgacgaggaggacctgggcatttatgtcggagaggtaaatcccaacagcattgcagccaaagacggccggatccgtgagggagaccgcatcatccagattaacggtgtagacgtccagaaccgggaagaggcggtggccatcctgagccaggaagagaacaccaacatctccctgctggtggcccgacctgagagtcagctggcgaaaaggtggaaggacagcgaccgggatgacttcctggatgactttggctctgagaatgagggggagctgcgtgctcgtaaactgaaatcaccccctgcccagcaggttctaggcgcccacgaggtcccctcgaggaacatcttttcagaacaaacaattcctccgtccgctaagtatggcgggcggcacacggtgaccatgatcccaggggatggcatcgggccagagctcatgctgcatgtcaagtccgtcttcaggcacgcatgtgtaccagtggactttgaagaggtgcacgtgagttccaatgctgatgaagaggacattcgcaatgccatcatggccatccgccggaaccgcgtggccctgaagggcaacatcgaaaccaaccataacctgccaccgtcgcacaaatctcgaaacaacatccttcgcaccagcctggacctctatgccaacgtcatccactgtaagagccttccaggcgtggtgacccggcacaaggacatagacatcctcattgtccgggagaacacagagggcgagtacagcagcctggagcatgagagtgtggcgggagtggtggagagcctgaagatcatcaccaaggccaagtccctgcgcattgccgagtatgccttcaagctggcgcaggagagcgggcgcaagaaagtgacggccgtgcacaaggccaacatcatgaaactgggcgatgggcttttcctccagtgctgcagggaggtggcagcccgctaccctcagatcaccttcgagaacatgattgtggataacaccaccatgcagctggtgtcccggccccagcagtttgatgtcatggtgatgcccaatctctatggcaacatcgtcaacaatgtctgcgcgggactggtcgggggcccaggccttgtggctggggccaactatggccatgtgtacgcggtgtttgaaacagctacgaggaacaccggcaagagtatcgccaataagaacatcgccaaccccacggccaccctgctggccagctgcatgatgctggaccacctcaagctgcactcctatgccacctccatccgtaaggctgtcctggcatccatggacaatgagaatatgcacactccggacatcgggggccagggcacaacatctgaagccatccaggacgtcatccgccacatccgcgtcatcaacggccgggccgtggaggcctaggctggccctaggaccttcttggtttgctccttggattccccttcccactccagcaccccagccagcctggtacgcagatcccagaataaagcaccttctcccta

SEQ ID NO: 351728 - DNA, 2076 bp, Homo sapiens
cgccagggtatggcccctggccccggcccgggacccgaggtcccgcgcccgggtcagtgaaaggcgtcttcccgttcccgccctccgcctcctctcgccggccagcaacatgggatgtaatatgtgcgtggtccagaaaccggaggagcagtacaaagtgatgctgcaggtgaacgggaaggagctctccaagctgtctcaggagcaaactctgcaggccctgcgctcctccaaggagcccctggtgatccaggtgctgagacgcagcccccgcctccggggggacagctcctgtcacgacctgcagctggtggacagtggcactcagaccgacatcaccttcgagcatatcatggcgctgggcaagctgcgtccgcccaccccgcccatggtcatcctggagccccccccaatcagccatgagtattatgacccggcggagtttatggagggcggcccgcaggaggcagaccgcttggatgagctggagtatgaggaggtggagctgtataaaagcagccaccgggacaagctgggcctgatggtttgctaccgcacggacgacgaggaggacctgggcatttatgtcggagaggtaaatcccaacagcattgcagccaaagacggccggatccgtgagggagaccgcatcatccagattaacggtgtagacgtccagaaccgggaagaggcggtggccatcctgagccaggaagagaacaccaacatctccctgctggtggcccgacctgagagtcagctggcgaaaaggtggaaggacagcgaccgggatgacttcctggatgactttggctctgagaatgagggggagctgcgtgctcgtaaactgaaatcaccccctgcccagcaggttctaggcgcccacgaggtcccctcgaggaacatcttttcagaacaaacaattcctccgtccgctaagtatggcgggcggcacacggtgaccatgatcccaggggatggcatcgggccagagctcatgctgcatgtcaagtccgtcttcaggcacgcatgtgtaccagtggactttgaagaggtgcacgtgagttccaatgctgatgaagaggacattcgcaatgccatcatggccatccgccggaaccgcgtggccctgaagggcaacatcgaaaccaaccataacctgccaccgtcgcacaaatctcgaaacaacatccttcgcaccagcctggacctctatgccaacgtcatccactgtaagagccttccaggcgtggtgacccggcacaaggacatagacatcctcattgtccgggagaacacagagggcgagtacagcagcctggagcatgagagtgtggcgggagtggtggagagcctgaagatcatcaccaaggccaagtccctgcgcattgccgagtatgccttcaagctggcgcaggagagcgggcgcaagaaagtgacggccgtgcacaaggccaacatcatgaaactgggcgatgggcttttcctccagtgctgcagggaggtggcagcccgctaccctcagatcaccttcgagaacatgattgtggataacaccaccatgcagctggtgtcccggccccagcagtttgatgtcatggtgatgcccaatctctatggcaacatcgtcaacaatgtctgcgcgggactggtcgggggcccaggccttgtggctggggccaactatggccatgtgtacgcggtgtttgaaacagctacgaggaacaccggcaagagtatcgccaataagaacatcgccaaccccacggccaccctgctggccagctgcatgatgctggaccacctcaagctgcactcctatgccacctccatccgtaaggctgtcctggcatccatggacaatgagaatatgcacactccggacatcgggggccagggcacaacatctgaagccatccaggacgtcatccgccacatccgcgtcatcaacggccgggccgtggaggcctaggctggccctaggaccttcttggtttgctccttggattccccttcccactccagcaccccagccagcctggtacgcagatcccagaataaagcaccttctcccta

SEQ ID NO: 351729 - DNA, 2383 bp, Homo sapiens
cgccagggtatggcccctggccccggcccgggacccgaggtcccgcgcccgggtcagtgaaaggcgtcttcccgttcccgccctccgcctcctctcgccggccagcaacatgggatgtaatatgtgcgtggtccagaaaccggaggagcagtacaaagtgatgctgcaggtgaacgggaaggagctctccaagctgtctcaggagcaaactctgcaggccctgcgctcctccaaggagcccctggtgatccaggtgctgagacgcagcccccgcctccggggggacagctcctgtcacgacctgcagctggtggacagtggcactcagaccgacatcaccttcgagcatatcatggcgctgggcaagctgcgtccgcccaccccgcccatggtcatcctggagccgtacgtcctctctgagctggccgagggaggaccctcctgtccgggacgtcgctgccggaagtgccagggttgagggcctcagctcctcctcctccatcctctctcctctgccgcctcacaagcatcactccttgaatcttcttgcatcccttgtctgtctcattcctctacctgctctgaatttcctccatctcttcagcttctttctttggcccgaccggaagaagggcctttcatccaggcctggtggctcatgaccgcgtgagcgctgcctcattctgctaatcttagcccgggctgcggggagccccccaatcagccatgagtattatgacccggcggagtttatggagggcggcccgcaggaggcagaccgcttggatgagctggagtatgaggaggtggagctgtataaaagcagccaccgggacaagctgggcctgatggtttgctaccgcacggacgacgaggaggacctgggcatttatgtcggagaggtaaatcccaacagcattgcagccaaagacggccggatccgtgagggagaccgcatcatccagattaacggtgtagacgtccagaaccgggaagaggcggtggccatcctgagccaggaagagaacaccaacatctccctgctggtggcccgacctgagagtcagctggcgaaaaggtggaaggacagcgaccgggatgacttcctggatgactttggctctgagaatgagggggagctgcgtgctcgtaaactgaaatcaccccctgcccagcaggttctaggcgcccacgaggtcccctcgaggaacatcttttcagaacaaacaattcctccgtccgctaagtatggcgggcggcacacggtgaccatgatcccaggggatggcatcgggccagagctcatgctgcatgtcaagtccgtcttcaggcacgcatgtgtaccagtggactttgaagaggtgcacgtgagttccaatgctgatgaagaggacattcgcaatgccatcatggccatccgccggaaccgcgtggccctgaagggcaacatcgaaaccaaccataacctgccaccgtcgcacaaatctcgaaacaacatccttcgcaccagcctggacctctatgccaacgtcatccactgtaagagccttccaggcgtggtgacccggcacaaggacatagacatcctcattgtccgggagaacacagagggcgagtacagcagcctggagcatgagagtgtggcgggagtggtggagagcctgaagatcatcaccaaggccaagtccctgcgcattgccgagtatgccttcaagctggcgcaggagagcgggcgcaagaaagtgacggccgtgcacaaggccaacatcatgaaactgggcgatgggcttttcctccagtgctgcagggaggtggcagcccgctaccctcagatcaccttcgagaacatgattgtggataacaccaccatgcagctggtgtcccggccccagcagtttgatgtcatggtgatgcccaatctctatggcaacatcgtcaacaatgtctgcgcgggactggtcgggggcccaggccttgtggctggggccaactatggccatgtgtacgcggtgtttgaaacagctacgaggaacaccggcaagagtatcgccaataagaacatcgccaaccccacggccaccctgctggccagctgcatgatgctggaccacctcaagctgcactcctatgccacctccatccgtaaggctgtcctggcatccatggacaatgagaatatgcacactccggacatcgggggccagggcacaacatctgaagccatccaggacgtcatccgccacatccgcgtcatcaacggccgggccgtggaggcctaggctggccctaggaccttcttggtttgctccttggattccccttcccactccagcaccccagccagcctggtacgcagatcccagaataaagcaccttctcccta

SEQ ID NO: 351730 - DNA, 2094 bp, Homo sapiens
cgccagggtatggcccctggccccggcccgggacccgaggtcccgcgcccgggtcagtgaaaggcgtcttcccgttcccgccctccgcctcctctcgccggccagcaacatgggatgtaatatgtgcgtggtccagaaaccggaggagcagtacaaagtgatgctgcaggtgaacgggaaggagctctccaagctgtctcaggagcaaactctgcaggccctgcgctcctccaaggagcccctggtgatccaggtgctgagacgcagcccccgcctccggggggacagctcctgtcacgacctgcagctggtggacagtggcactcagaccgacatcaccttcgagcatatcatggcgctgggcaagctgcgtccgcccaccccgcccatggtcatcctggagccgtacgtcctctctgagctccccccaatcagccatgagtattatgacccggcggagtttatggagggcggcccgcaggaggcagaccgcttggatgagctggagtatgaggaggtggagctgtataaaagcagccaccgggacaagctgggcctgatggtttgctaccgcacggacgacgaggaggacctgggcatttatgtcggagaggtaaatcccaacagcattgcagccaaagacggccggatccgtgagggagaccgcatcatccagattaacggtgtagacgtccagaaccgggaagaggcggtggccatcctgagccaggaagagaacaccaacatctccctgctggtggcccgacctgagagtcagctggcgaaaaggtggaaggacagcgaccgggatgacttcctggatgactttggctctgagaatgagggggagctgcgtgctcgtaaactgaaatcaccccctgcccagcaggttctaggcgcccacgaggtcccctcgaggaacatcttttcagaacaaacaattcctccgtccgctaagtatggcgggcggcacacggtgaccatgatcccaggggatggcatcgggccagagctcatgctgcatgtcaagtccgtcttcaggcacgcatgtgtaccagtggactttgaagaggtgcacgtgagttccaatgctgatgaagaggacattcgcaatgccatcatggccatccgccggaaccgcgtggccctgaagggcaacatcgaaaccaaccataacctgccaccgtcgcacaaatctcgaaacaacatccttcgcaccagcctggacctctatgccaacgtcatccactgtaagagccttccaggcgtggtgacccggcacaaggacatagacatcctcattgtccgggagaacacagagggcgagtacagcagcctggagcatgagagtgtggcgggagtggtggagagcctgaagatcatcaccaaggccaagtccctgcgcattgccgagtatgccttcaagctggcgcaggagagcgggcgcaagaaagtgacggccgtgcacaaggccaacatcatgaaactgggcgatgggcttttcctccagtgctgcagggaggtggcagcccgctaccctcagatcaccttcgagaacatgattgtggataacaccaccatgcagctggtgtcccggccccagcagtttgatgtcatggtgatgcccaatctctatggcaacatcgtcaacaatgtctgcgcgggactggtcgggggcccaggccttgtggctggggccaactatggccatgtgtacgcggtgtttgaaacagctacgaggaacaccggcaagagtatcgccaataagaacatcgccaaccccacggccaccctgctggccagctgcatgatgctggaccacctcaagctgcactcctatgccacctccatccgtaaggctgtcctggcatccatggacaatgagaatatgcacactccggacatcgggggccagggcacaacatctgaagccatccaggacgtcatccgccacatccgcgtcatcaacggccgggccgtggaggcctaggctggccctaggaccttcttggtttgctccttggattccccttcccactccagcaccccagccagcctggtacgcagatcccagaataaagcaccttctcccta

SEQ ID NO: 351731 - DNA, 1762 bp, Homo sapiens
gaaattctcttgacgatgctgacttctcccaccttgctgctgaaaggacggcagtatatagtggctttccagaggctctgatggctccagcaactgggctcctgtaggctcttggtgaagacatgtgtgcctcctccctgacctcccctgtgtgtgtgcctgtgtgtgcgttggggtgggagtaggggacagtgaacggtgggtagctgggcagtgccttgccctgagactgaccgtcctgggtgtgagaacccttacagaggaaccccaggtcttgaatcccactgatttggacgccataggaaaacatgcagccaccattgacacatggtccaacagaaatatgccaaagacagaagcctcagcaggcataagatgtggggtgtggatgttctttctttccatggaaccatgaaagggtgatgggagagcgggaggcgtgtacatattgcatcctgcctcacacttggctcctttgattggtggcttcacagggaagtcagggcacaaggcagagcctttgcgacctcctgaaggaaggtgcctgcatctgtacagttctaggcgcccacgaggtcccctcgaggaacatcttttcagaacaaacaattcctccgtccgctaagtatggcgggcggcacacggtgaccatgatcccaggggatggcatcgggccagagctcatgctgcatgtcaagtccgtcttcaggcacgcatgtgtaccagtggactttgaagaggtgcacgtgagttccaatgctgatgaagaggacattcgcaatgccatcatggccatccgccggaaccgcgtggccctgaagggcaacatcgaaaccaaccataacctgccaccgtcgcacaaatctcgaaacaacatccttcgcaccagcctggacctctatgccaacgtcatccactgtaagagccttccaggcgtggtgacccggcacaaggacatagacatcctcattgtccgggagaacacagagggcgagtacagcagcctggagcatgagagtgtggcgggagtggtggagagcctgaagatcatcaccaaggccaagtccctgcgcattgccgagtatgccttcaagctggcgcaggagagcgggcgcaagaaagtgacggccgtgcacaaggccaacatcatgaaactgggcgatgggcttttcctccagtgctgcagggaggtggcagcccgctaccctcagatcaccttcgagaacatgattgtggataacaccaccatgcagctggtgtcccggccccagcagtttgatgtcatggtgatgcccaatctctatggcaacatcgtcaacaatgtctgcgcgggactggtcgggggcccaggccttgtggctggggccaactatggccatgtgtacgcggtgtttgaaacagctacgaggaacaccggcaagagtatcgccaataagaacatcgccaaccccacggccaccctgctggccagctgcatgatgctggaccacctcaagctgcactcctatgccacctccatccgtaaggctgtcctggcatccatggacaatgagaatatgcacactccggacatcgggggccagggcacaacatctgaagccatccaggacgtcatccgccacatccgcgtcatcaacggccgggccgtggaggcctaggctggccctaggaccttcttggtttgctccttggattccccttcccactccagcaccccagccagcctggtacgcagatcccagaataaagcaccttctcccta

SEQ ID NO: 351732 - DNA, 1145 bp, Homo sapiens
  misc_feature (10)..(10): n is a, c, g, or t
cacaagcggnccggatgagatagcacggtgaccatgatcccaggggatggcatcgggccagagctcatgctgcatgtcaagtccgtcttcaggcacgcatgtgtaccagtggactttgaagaggtgcacgtgagttccaatgctgatgaagaggacattcgcaatgccatcatggccatccgccggaaccgcgtggccctgaagggcaacatcgaaaccaaccataacctgccaccgtcgcacaaatctcgaaacaacatccttcgcaccagcctggacctctatgccaacgtcatccactgtaagagccttccaggcgtggtgacccggcacaaggacatagacatcctcattgtccgggagaacacagagggcgagtacagcagcctggagcatgagagtgtggcgggagtggtggagagcctgaagatcatcaccaaggccaagtccctgcgcattgccgagtatgccttcaagctggcgcaggagagcgggcgcaagaaagtgacggccgtgcacaaggccaacatcatgaaactgggcgatgggcttttcctccagtgctgcagggaggtggcagcccgctaccctcagatcaccttcgagaacatgattgtggataacaccaccatgcagctggtgtcccggccccagcagtttgatgtcatggtgatgcccaatctctatggcaacatcgtcaacaatgtctgcgcgggactggtcgggggcccaggccttgtggctggggccaactatggccatgtgtacgcggtgtttgaaacagctacgaggaacaccggcaagagtatcgccaataagaacatcgccaaccccacggccaccctgctggccagctgcatgatgctggaccacctcaagctgcactcctatgccacctccatccgtaaggctgtcctggcatccatggacaatgagaatatgcacactccggacatcgggggccagggcacaacatctgaagccatccaggacgtcatccgccacatccgcgtcatcaacggccgggccgtggaggcctaggctggccctaggaccttcttggtttgctccttggattccccttcccactccagcaccccagccagcctggtacgcagatcccagaataaagcaccttctcccta

SEQ ID NO: 351733 - DNA, 2794 bp, Homo sapiens
cgccagggtatggcccctggccccggcccgggacccgaggtcccgcgcccgggtcagtgaaaggcgtcttcccgttcccgccctccgcctcctctcgccggccagcaacatgggatgtaatatgtgcgtggtccagaaaccggaggagcagtacaaagtgatgctgcaggtgaacgggaaggagctctccaagctgtctcaggagcaaactctgcaggccctgcgctcctccaaggagcccctggtgatccaggtgctgagacgcagcccccgcctccggggggacagctcctgtcacgacctgcagctggtggacagtggcactcagaccgacatcaccttcgagcatatcatggcgctgggcaagctgcgtccgcccaccccgcccatggtcatcctggagccgtacgtcctctctgagctggccgagggaggaccctcctgtccgggacgtcgctgccggaagtgccagggttgagggcctcagctcctcctcctccatcctctctcctctgccgcctcacaagcatcactccttgaatcttcttgcatcccttgtctgtctcattcctctacctgctctgaatttcctccatctcttcagcttctttctttggcccgaccggaagaagggcctttcatccaggcctggtggctcatgaccgcccccccaatcagccatgagtattatgacccggcggagtttatggagggcggcccgcaggaggcagaccgcttggatgagctggagtatgaggaggtggagctgtataaaagcagccaccgggacaagctgggcctgatggtttgctaccgcacggacgacgaggaggacctgggcatttatgtcggagaggtaaatcccaacagcattgcagccaaagacggccggatccgtgagggagaccgcatcatccagattaacggtgtagacgtccagaaccgggaagaggcggtggccatcctgagccaggaagagaacaccaacatctccctgctggtggcccgacctgagagtcagctggcgaaaaggtggaaggacagcgaccgggatgacttcctggatgactttggctctgagaatgagggggagctgcgtgctcgtaaactgaaatcaccccctgcccagcaggttctaggcgcccacgaggtcccctcgaggaacatcttttcagaacaaacaattcctccgtccgctaagtatggcgggcggcacacggtgaccatgatcccaggggatggcatcgggccagagctcatgctgcatgtcaagtccgtcttcaggtatggagctcctgggtccccgccttgtcctcagccagggggccctgaggactttgtgccaagaggggcattgcgcccagaagcactcggtgaggccatggcaagacgacctgtaagcccaggccttgcgtcccatggcctgtgatcccgccagactggcctgggctcggggaaggtggcaccagtcctgccacagtgtgcattgtggagttcaagcgtgtccccatcagtcagtgaaggtgggcccagtcccttctcagtcagagccaggtcagggcaggtagcaacaggagagaggtagcctgggcaggcttcctggaggaggtgcgggggggtctgggccagcctccctgaccctgccgtgcctcaggcacgcatgtgtaccagtggactttgaagaggtgcacgtgagttccaatgctgatgaagaggacattcgcaatgccatcatggccatccgccggaaccgcgtggccctgaaggggcttgtctggctagagaggaccctcgtgcttggagactgggtggacgcctcctcgggcctgtttgcgctgcgatgctgggattcgagcaacatcgaaaccaaccataacctgccaccgtcgcacaaatctcgaaacaacatccttcgcaccagcctggacctctatgccaacgtcatccactgtaagagccttccaggcgtggtgacccggcacaaggacatagacatcctcattgtccgggagaacacagagggcgagtacagcagcctggagcatgagagtgtggcgggagtggtggagagcctgaagatcatcaccaaggccaagtccctgcgcattgccgagtatgccttcaagctggcgcaggagagcgggcgcaagaaagtgacggccgtgcacaaggccaacatcatgaaactgggcgatgggcttttcctccagtgctgcagggaggtggcagcccgctaccctcagatcaccttcgagaacatgattgtggataacaccaccatgcagctggtgtcccggccccagcagtttgatgtcatggtgatgcccaatctctatggcaacatcgtcaacaatgtctgcgcgggactggtcgggggcccaggccttgtggctggggccaactatggccatgtgtacgcggtgtttgaaacagctacgaggaacaccggcaagagtatcgccaataagaacatcgccaaccccacggccaccctgctggccagctgcatgatgctggaccacctcaagctgcactcctatgccacctccatccgtaaggctgtcctggcatccatggacaatgagaatatgcacactccggacatcgggggccagggcacaacatctgaagccatccaggacgtcatccgccacatccgcgtcatcaacggccgggccgtggaggcctaggctggccctaggaccttcttggtttgctccttggattccccttcccactccagcaccccagccagcctggtacgcagatcccagaataaagcaccttctcccta

SEQ ID NO: 351734 - DNA, 944 bp, Homo sapiens
ggggcccagctggtcgcggtccccccctcaacatggcggcagcggtgctctaggcgccggaagggggcgtgaatcggtgcgaccgcgcgcgtgcgcagtaccgggtccgcgcctgtccccgaaacttcgcaccccgtcgaactctcgcgagagcggtatctgcgtgtcgggacgtgcggaggctctcactttccgtcatggcgctgaaggtagcgaccgtcgccggcagcgccgcgaaggcggtgctcgggccagcccttctctgccgtccctgggaggttctaggcgcccacgaggtcccctcgaggaacatcttttcagaacaaacaattcctccgtccgctaagtatggcgggcggcacacggtgaccatgatcccaggggatggcatcgggccagagctcatgctgcatgtcaagtccgtcttcaggcacgcatgtgtaccagtggactttgaagaggtgcacgtgagttccaatgctgatgaagaggacattcgcaatgccatcatggccatccgccggaaccgcgtggccctgaagggcaacatcgaaaccaaccataacctgccaccgtcgcacaaatctcgaaacaacatccttcgcaccagcctggacctctatgccaacgtcatccactgtaagagccttccaggcgtggtgacccggcacaaggacatagacatcctcattgtccgggagaacacagagggcgagtacagcagcctggagcatgagagtgtggcgggagtggtggagagcctgaagatcatcaccaaggccaagtccctgcgcattgccgagtatgccttcaagctggcgcaggagagcgggcgcaagaaagtgacggccgtgcacaaggccaacatcatgtatgtcccctgacctctctgcgagcagtccagaagcagctgcagtggcctgcttgggcctgctctgagggat

SEQ ID NO: 351735 - DNA, 1686 bp, Homo sapiens
  misc_feature (1527)..(1527): n is a, c, g, or t
  misc_feature (1534)..(1534): n is a, c, g, or t
ccaaatcaataggtcttttattgcatcatttaaatatcacaagtaggtcttaagtgtcatctggcatcttctttctgtagccaggtaactcttagatcttattcatcagcctgctgaacagttcctttttcagagacatagataccatccaaaaatttcctgatatccttgtttttaactgttgtggcttgctgaatcaaagccgctgaatttgaaacaagctcaatgtcatttccttcaaggattaattcatctttctgggcttgagatactgaacaagcaacacctggtctcatccgaaccctgcggatatatttttcacccaagaaatttcggatttcaacaagagacccattctcctggataacaacgttgatggggaagtgagcatacacagacctcatcttgtaacggaagcccagtgtaacacccttgatcatgttctgtacatgactacaaatagtccgaacggtagccagttcctttctgttaccccaccatttgtcaacccggagcctcttttttttctttccaagaaggctgagttctacattgatgtgattgaagtccctccgcagggttcctctggggcccttcacgataactgtgcgtcccttcagagtaatgtcgacattttctggaatgtcgacagtctgattgctgagaatagtcttcattctcgcgagagcggtatctgcgtgtcgggacgtgcggaggctctcactttccgtcatggcgctgaaggtagcgaccgtcgccggcagcgccgcgaaggcggtgctcgggccagcccttctctgccgtccctgggagtgggccatgctgcacagacaggggacctgcctgggcacagtggggacggtccgtttttccttccaacttggctttctgggttagacatcaaaccaaccgctggcatttggtctctgccaggttctaggcgcccacgaggtcccctcgaggaacatcttttcagaacaaacaattcctccgtccgctaagtatggcgggcggcacacggtgaccatgatcccaggggatggcatcgggccagagctcatgctgcatgtcaagtccgtcttcaggcacgcatgtgtaccagtggactttgaagaggtgcacgtgagttccaatgctgatgaagaggacattcgcaatgccatcatggccatccgccggaaccgcgtggccctgaagggcaacatcgaaaccaaccataacctgccaccgtcgcacaaatctcgaaacaacatccttcgcaccagcctggacctctatgccaacgtcatccactgtaagagccttccaggcgtggtgacccggcacaaggacatagacatcctcattgtccgggagaacacagagggcgagtacagcagcctggagcatgagagtgtggcgggagtggtggagagcctgaagatcatcaccaaggccaagtccctgcgcattgccgagtatgccttcaagctggcgcaggagagcgggcgcaagaaagtgacggccgtgcacaaggccaacatcatnaactggncgatgggcatcttgactccaccgcggcagggaggagcgcagaccgctaccctcagagaagccttcgagaaccagtgactctgatggacaacagacaccagcacactatggaagtaactcggaactacagcacgcgtgattgacattggtgag

SEQ ID NO: 351736 - DNA, 295 bp, Homo sapiens
ggagcggccatccgcacgccaccctctcgggcaggaagcaggcccctcggcctccagaactgaccgtggtacccaagggctccaaaacctccaggcctctagccttgggccgggctccagcaggcgccccgttgtatctacccccagggccgagggaggaccctcctgtccgggacgtcgctgccggaagtgccagggttgagggcctcagctcctcctcctccatcctctctcctctgccgcctcacaagcatcactccttgaatcttcttgcatcccttgtctgtctcattcc

SEQ ID NO: 351737 - DNA, 1095 bp, Homo sapiens
cgtaacgcgtcacgggcggcctggcagctggcggcattgaggcggacgcgtctagaggtccgtctgaccgcggcgtcgggacctggtttccgggcatgagctgagagcaccacgccgaggccacgagtatttcatagacattgatggaagcagaaaccaaaactcttcccctggagaatgcatccatcctttcagagggctctctgcaggaaggacaccgattatggattggcaacctggaccccaaaattaccgaataccacctcctcaagctcctccagaagtttggcaaggtaaagcagtttgacttcctcttccacaagtcaggtgctttggagggacagcctcgaggctactgttttgttaactttgaaactaagcaggaagcagagcaagccatccagtgtctcaatggcaagttggccctgtccaagaagctggtggtgcgatgggcacatgctcaagtaaagagatatgatcataacaagaatgataagattcttccaatcagtctcgagccatcctcaagcactgagcctactcagtctaacctaagtgtcactgcaaagataaaagccattgaagcaaaactgaaaatgatggcggaaaatcctgatgcagagtatccagcagcgcctgtttattcctactttaagccaccagataaaaaaaggactactccatattctagaacagcatggaaatctcgaagatgatggttgtgaattactgtagcagcaaaagcaaattggtctccacacctaaaatcgtctgcctgtgtactttgtagatgtgaatggtactattcaacggagcacaatcacatgttagcatttggtaacataatgtttttggatgttcttatggatgtttcttccctaaactatgtatggaattgagcatcatccagaataaatagcgttgtatcccaaattgtgatttgaaccctgggatgctctaattggctggttggtttggatttgtaactccagaaacattctatagtgtgccagagcaaaaggcaaatacacaaaatattatttaaatcaggaaactaaaaatattaacatctattaaaaaattgagcatttttct

SEQ ID NO: 351738 - DNA, 451 bp, Homo sapiens
gttttcataaatctaactaactcctatttgaaagagatgactgcatttatgcttggtggtcttcatgttacaatgaacatgtctttagtttcttatgatttgtatatgccacttgtttacaagatagcctagggttttccatctatttttttatccagaggacctcagcttacatctctctattaacatctatgcctaatgagagaaggttgcttccctgtgacttatacaaaatcagtgaccagctgtggcattaatggaagaggggccagaatgcatctcggtaatatatcagtgttctttttcttgtaacttagtttttaaatttctcgcccatgtatacctttcgagggatctccaaaagcccatgtatatactccttccaagtttctctcactgggccataggaccattaacgcatcaggaatggaaaatgaaggtagccataggc

SEQ ID NO: 351739 - DNA, 2715 bp, Homo sapiens
cgtaacgcgtcacgggcggcctggcagctggcggcattgaggcggacgcgtctagaggtccgtctgaccgcggcgtcgggacctggtttccgggcatgagctgagagcaccacgccgaggccacgagtatttcatagacattgatggaagcagaaaccaaaactcttcccctggagaatgcatccatcctttcagagggctctctgcaggaaggacaccgattatggattggcaacctggaccccaaaattaccgaataccacctcctcaagctcctccagaagtttggcaaggtaaagcagtttgacttcctcttccacaagtcaggtgctttggagggacagcctcgaggctactgttttgttaactttgaaactaagcaggaagcagagcaagccatccagtgtctcaatggcaagttggccctgtccaagaagctggtggtgcgatgggcacatgctcaagtaaagagatatgatcataacaagaatgataagattcttccaatcagtctcgagccatcctcaagcactgagcctactcagtctaacctaagaggacctcagcttacatctctctattaacatctatgcctaatgagagaaggttgcttccctgtgacttatacaaaatcagtgaccagctgtggcattaatggaagaggggccagaatgcatctcgtgtcactgcaaagataaaagccattgaagcaaaactgaaaatgatggcggaaaatcctgatgcagagtatccagcagcgcctgtttattcctactttaagccaccagataaaaaaaggactactccatattctagaacagcatggaaatctcgaagatgatggttgtgaattactgtagcagcaaaagcaaattggtctccacacctaaaatcgtctgcctgtgtactttgtagatgtgaatggtactattcaacggagcacaatcacatgttagcatttggtaacataatgtttttggatgttcttatggatgtttcttccctaaactatgtatggaattgagcatcatccagaataaatagcgttgtatcccaaattgtgatttgaaccctgggatgctctaattggctggttggtttggatttgtaactccagaaacattctatagtgtgccagagcaaaaggcaaatacacaaaatattatttaaatcaggaaactaaaaatattaacatctattaaaaaattgagcatttttctacgctcgtgtgtcttttacaacataaagaaaaagtaaaaggcagggagggaagtgagagacagattttaaatcatgttcagaactgttgttccagaatttactacggcaatccctccaactggactgaaaaagagaaagttcttggcaaaaaggagctgattctttgaacaaatgttgtagtaatctgtttaagaattatgcttattgtttcaaaatcccaactaggaaaacatggtgtatatcttaaaattgttcgtgttgacaaaactagaatcaaatttaacattttataccacaacacaagttctatttggaaattgaacttttattctatagcaaccatttttttcaaatctaaataaccatgccttctataataacaaatgttgctattatcatgggacttttaaaattacatttattgcatgggattgtttttatagcatgagaatgttctgtttggaattatatcatggtcagtctaaatagaaaaagcaaaatttctttgaaaacctaaacattgctatattggtcactatcaaacatacaattttctaataattgtgtagcggtctaagtggaagagattgcattatcttgtgcaggacgaggagaggacatgcagtgggcacagaaagtcaatggaacagatgccactgtggcaccaagactgtaatgactctgtgtggtaggtagttttaaaggactgcatgccttggaaatgattcttcacttggagaacatacttgcctctagatatgtttgtcactctaagcatcctgaatataacaatagagaaagataagtcaaccaacagatttagggatgtgtttcttcagcacattttggtcattttgatgccaagtttgacatactgtttaattgggcagcacctttgctcctttaccaggtatgtatcactttgttactccaggtgccattcttggtgatgacagaatgtttatcactatcgttgttagcaagaggaagctttcaatataggaacttaacatcttcccatgagtataaatgaatttaagacatttgaatcaaaacttcagtagagggaggttttagaattcataaaactggtttaaggaaattctttttacttttcccaaggttaatctttttaaatatctctagacatcaaatactttctgtatgtattagctgtgtctgtctatgatgcaagtaactctcctcctatttgggggatagttcagagaggtaggagcattatctcccatttttctggtgacttcttggagtatagaattcaccattttatccgtaagtcttcaaaggattatggtggactagaacttacatagtgcaaaatagtcttctatttttaataggaacttagaaaaaacttagaattatatatagagttgtttcctttagaaaccagagctatttatttgtatttaaagcactgtttattatttgtactgattcttatccctctgtgtgaataaatgtaagacggtg

SEQ ID NO: 351740 - DNA, 2590 bp, Homo sapiens
cgtaacgcgtcacgggcggcctggcagctggcggcattgaggcggacgcgtctagaggtccgtctgaccgcggcgtcgggacctggtttccgggcatgagctgagagcaccacgccgaggccacgagtatttcatagacattgatggaagcagaaaccaaaactcttcccctggagaatgcatccatcctttcagagggctctctgcaggaaggacaccgattatggattggcaacctggaccccaaaattaccgaataccacctcctcaagctcctccagaagtttggcaaggtaaagcagtttgacttcctcttccacaagtcaggtgctttggagggacagcctcgaggctactgttttgttaactttgaaactaagcaggaagcagagcaagccatccagtgtctcaatggcaagttggccctgtccaagaagctggtggtgcgatgggcacatgctcaagtaaagagatatgatcataacaagaatgataagattcttccaatcagtctcgagccatcctcaagcactgagcctactcagtctaacctaagtgtcactgcaaagataaaagccattgaagcaaaactgaaaatgatggcggaaaatcctgatgcagagtatccagcagcgcctgtttattcctactttaagccaccagataaaaaaaggactactccatattctagaacagcatggaaatctcgaagatgatggttgtgaattactgtagcagcaaaagcaaattggtctccacacctaaaatcgtctgcctgtgtactttgtagatgtgaatggtactattcaacggagcacaatcacatgttagcatttggtaacataatgtttttggatgttcttatggatgtttcttccctaaactatgtatggaattgagcatcatccagaataaatagcgttgtatcccaaattgtgatttgaaccctgggatgctctaattggctggttggtttggatttgtaactccagaaacattctatagtgtgccagagcaaaaggcaaatacacaaaatattatttaaatcaggaaactaaaaatattaacatctattaaaaaattgagcatttttctacgctcgtgtgtcttttacaacataaagaaaaagtaaaaggcagggagggaagtgagagacagattttaaatcatgttcagaactgttgttccagaatttactacggcaatccctccaactggactgaaaaagagaaagttcttggcaaaaaggagctgattctttgaacaaatgttgtagtaatctgtttaagaattatgcttattgtttcaaaatcccaactaggaaaacatggtgtatatcttaaaattgttcgtgttgacaaaactagaatcaaatttaacattttataccacaacacaagttctatttggaaattgaacttttattctatagcaaccatttttttcaaatctaaataaccatgccttctataataacaaatgttgctattatcatgggacttttaaaattacatttattgcatgggattgtttttatagcatgagaatgttctgtttggaattatatcatggtcagtctaaatagaaaaagcaaaatttctttgaaaacctaaacattgctatattggtcactatcaaacatacaattttctaataattgtgtagcggtctaagtggaagagattgcattatcttgtgcaggacgaggagaggacatgcagtgggcacagaaagtcaatggaacagatgccactgtggcaccaagactgtaatgactctgtgtggtaggtagttttaaaggactgcatgccttggaaatgattcttcacttggagaacatacttgcctctagatatgtttgtcactctaagcatcctgaatataacaatagagaaagataagtcaaccaacagatttagggatgtgtttcttcagcacattttggtcattttgatgccaagtttgacatactgtttaattgggcagcacctttgctcctttaccaggtatgtatcactttgttactccaggtgccattcttggtgatgacagaatgtttatcactatcgttgttagcaagaggaagctttcaatataggaacttaacatcttcccatgagtataaatgaatttaagacatttgaatcaaaacttcagtagagggaggttttagaattcataaaactggtttaaggaaattctttttacttttcccaaggttaatctttttaaatatctctagacatcaaatactttctgtatgtattagctgtgtctgtctatgatgcaagtaactctcctcctatttgggggatagttcagagaggtaggagcattatctcccatttttctggtgacttcttggagtatagaattcaccattttatccgtaagtcttcaaaggattatggtggactagaacttacatagtgcaaaatagtcttctatttttaataggaacttagaaaaaacttagaattatatatagagttgtttcctttagaaaccagagctatttatttgtatttaaagcactgtttattatttgtactgattcttatccctctgtgtgaataaatgtaagacggtg

SEQ ID NO: 351741 - DNA, 3680 bp, Homo sapiens
cgtaacgcgtcacgggcggcctggcagctggcggcattgaggcggacgcgtctagaggtccgtctgaccgcggcgtcgggacctggtttccgggcatgagctgagagcaccacgccgaggccacgagtatttcatagacattgatggaagcagaaaccaaaactcttcccctggagaatgcatccatcctttcagagggctctctgcaggaaggacaccgattatggattggcaacctggaccccaaaattaccgaataccacctcctcaagctcctccagaagtttggcaaggtaaagcagtttgacttcctcttccacaagtcaggtgctttggagggacagcctcgaggctactgttttgttaactttgaaactaagcaggaagcagagcaagccatccagtgtctcaatggcaagttggccctgtccaagaagctggtggtgcgatgggcacatgctcaagtaaagagatatgatcataacaagaatgataagattcttccaatcagtctcgagccatcctcaagcactgagcctactcagtctaacctaagtgtcactgcaaagataaaagccattgaagcaaaactgaaaatgatggcggaaaatcctgatgcagagtatccagcagcgcctgtttattcctactttaagccaccagataaaaaaaggactactccatattctagaacagcatggaaatctcgaagatgatggttgtgaattactgtagcagcaaaagcaaattggtctccacacctaaaatcgtctgcctgtgtactttgtagatgtgaatggtactattcaacggagcacaatcacatgttagcatttggtaacataatgtttttggatgttcttatggatgtttcttccctaaactatgtatggaattgagcatcatccagaataaatagcgttgtatcccaaattgtgatttgaaccctgggatgctctaattggctggttggtttggatttgtaactccagaaacattctatagtgtgccagagcaaaaggcaaatacacaaaatattatttaaatcaggaaactaaaaatattaacatctattaaaaaattgagcatttttctacgctcgtgtgtcttttacaacataaagaaaaagtaaaaggcagggagggaagtgagagacagattttaaatcatgttcagaactgttgttccagaatttactacggcaatccctccaactggactgaaaaagagaaagttcttggcaaaaaggagctgattctttgaacaaatgttgtagtaatctgtttaagaattatgcttattgtttcaaaatcccaactaggaaaacatggtgtatatcttaaaattgttcgtgttgacaaaactagaatcaaatttaacattttataccacaacacaagttctatttggaaattgaacttttattctatagcaaccatttttttcaaatctaaataaccatgccttctataataacaaatgttgctattatcatgggacttttaaaattacatttattgcatgggattgtttttatagcatgagaatgttctgtttggaattatatcatggtcagtctaaatagaaaaagcaaaatttctttgaaaacctaaacattgctatattggtcactatcaaacatacaattttctaataattgtgtagcggtctaagtggaagagattgcattatcttgtgcaggacgaggagaggacatgcagtgggcacagaaagtcaatggaacagatgccactgtggcaccaagactgtaatgactctgtgtggtaggtagttttaaaggactgcatgccttggaaatgattcttcacttggagaacatacttgcctctagatatgtttgtcactctaagcatcctgaatataacaatagagaaagataagtcaaccaacagatttagggatgtgtttcttcagcacattttggtcattttgatgccaagtttgacatactgtttaattgggcagcacctttgctcctttaccaggtatgtatcactttgttactccaggtgccattcttggtgatgacagaatgtttatcactatcgttgttagcaagaggaagctttcaatataggaacttaacatcttcccatgagtataaatgaatttaagacatttgaatcaaaacttcagtagagggaggttttagaattcataaaactggtttaaggaaattctttttacttttcccaaggttaatctttttaaatatctctagacatcaaatactttctgtatgtattagctgtgtctgtctatgatgcaagtaactctcctcctatttgggggatagttcagagaggtaggagcattatctcccatttttctggtgacttcttggagtatagaattcaccattttatccgtaagtcttcaaaggattatggtggactagaacttacatagtgcaaaatagtcttctatttttaataggaacttagaaaaaacttagaattatatatagagttgtttcctttagaaaccagagctatttatttgtatttaaagcactgtttattatttgtactgattcttatccctctgtgtgaataaatgtaagacggtgtccgtgtggttatgtcttctctcgttcacttactggcatagactgcagttctctgacaggcttgtttccagtcaggactctggccagcatgtccacgtggggtgcttcttctaagtgccttctctgcagagggttctggctagagagtcaaactgagaggcaactctctttaccctttatgcctgcctacctctgttgttagagatgagaatagagaccagctgtttccattgcaaatgtcactatttgaaaagaagttgttaatggaaatctctgcaagtatcgtactgtgtttagtctctcatggtagagatttcaaaagaagaaatgtatgtatcctaaatatgctgaaagcagtctgatgaaaggtttttaaatttcaggtgttaacttggtcaactctttgttaggaggttgtctgtactttaagtaaaattattctttggtttactggttattttggtttgctaaaattatgtcacttataattttgatttatatacaagagtgaagaattgaaggaaatactgaggagagacgtatgaactattttcttcatctcaattcctattttatcaaatgcaaaatgtaatcctaaccagttgattttctataattggtatcttagtactggggaggagtatcacatgaggaaagatttttcaaagcatgtcagctgaggcacaagaatcgcttgaacccaggaggtagaggttccagtgagccgagattgtgccactgcactccagcctgggcaacagagtgagacaccgtctcaaaaaaaacaaaaacaaaacaggtcaaaaatcagttgcacaagttgtatgaaaccaggtattctgcagctctgtctcttgtttattaagatatgcacagtttctgaatcaacaaatatatctgtgattcttttatactactacataaaagaacaggagtaattcttgccttataaattaaatgtcaaacatttcctatatgtaatcatttgttcctaaaatatgatttagtcccagcatgcttatccctgttttctctttttctctccagctcctatctagttcttcaacaaatcctgtcaactctaccttcc

SEQ ID NO: 351742 - DNA, 2659 bp, Homo sapiens
gggcttaccggcgtgtcgaaggagaaggcgcactcgtctttgtggacccggtctccagccttagggacccggatcgtcggtaatactgacagcagcgcctcctcactcagctccgccatgacaccggcagcagcttctccacacacggcggctcccaccgttcccagtcccctcccctgcccctcccgtccaatgagcgccactcgttaggggcatgcgccgcggagacgacgcgcgagaatggcagttggacggagcctgcctgccggtgctccgcccctgccccgcgcttgactgacgccaatgagaagcgctcctaaggcaattgatggttgaaagaaccaatcccactcctccagggcgggagcgcacgtagagcagctaggtgggcttcggggttgcagctgctgcggctccgcagctgctccggctccgggacccttagagtccattcgcgtgccttctattgaagagcaggaactgacggttgttttaggcctctcaattccagaaagtttcctggggacctgtccggtcggaaagtcgagggacagttgtcttggtatttgtaaagggggtatccagtgaggcggagcttgagggggttgtgtcgagtgactgatacagctgtcaaccaataaagctactatcgctcgcctcaggaaaaccatcacaactccagctggatgtgcgcataatagtgtaatcactcatgattctattttgtttaataattcgttcttgagactagacgtctcgaaagcgaagactggcactcctcagcctgccacggacggctcgcaggccgatactgaacagaagtacccttatcaaggaggcgtcacccctgggcaagcctagcatcagtccattgacacctacagtcaccatgatagacgttctcccagaccaacagcttcctttggctcgaggcgggtcttacgtggagggcctatgggaactacgtcggctcagccaatagggtcagggcagggggcgtggcgggaagtttgaactggtaacttcgggagttgagccacgagctgttgtgcatccagaggtggaattggggcccggtaagtgatttgaataatttaataaataagttagagggctcagcaggcccagaacgagccattttgtcagctgcagcagtcattaactccgcagaggcctctggtccctcgccaggaagtttcttcactggaaactgggaagacagggtggtttagggttgaaggtccgacgtggaagccacgagctgttgtgcatccagaggtggaattggggcccggcattccctcctcgtcccgggctggcccttgcccccaccctgcaactcctggttgagatgggctcagccaagagcgtcccagtcacaccagcgcggcctccgccgcacaacaagcatctggctcgagtggcggacccccgttcacctagtgctggcatcctgcgcactcccatccaggtggagagctctccacagccaggcctaccagcaggggagcaactggagggtcttaaacatgcccaggactcagatccccgctctcctactcttggtattgcacggacacctatgaagaccagcagtggagaccccccaagcccactggtgaaacagctgagtgaagtatttgaaactgaagactctaaatcaaatcttcccccagagcctgttctgcccccagaggcacctttatcttctgaattggacttgcctctgggtacccagttatctgttgaggaacagatgccaccttggaaccagactgagttcccctccaaacaggtgttttccaaggaggaagcaagacagcccacagaaacccctgtggccagccagagctccgacaagccctcaagggaccctgagactcccagatcttcaggttctatgcgcaatagatggaaaccaaacagcagcaaggtactagggagatcccccctcaccatcctgcaggatgacaactcccctggcaccctgacactacgacagggtaagcggccttcacccctaagtgaaaatgttagtgaactaaaggaaggagccattcttggaactggacgacttctgaaaactggaggacgagcatgggagcaaggccaggaccatgacaaggaaaatcagcactttcccttggtggagagctaggccctgcatggccccagcaatgcagtcacccagggcctggtgatatctgtgtcctctcaccccttctttcccagggatactgaggaatggcttgttttcttagactcctcctcagctaccaaactgggactcacagctttattgggctttctttgtgtcttgtgtgtttcttttatattaaaggaagtaattttaaatgttactttaaaaaggtatatgtaaaccttgcaccgagttttctgtgtgtagaatggcggcctagagagcttgcgttccctggcctgagcccactgatgctctgagccttctttgcacatctccctttaaccatggtgtccctatggctctgtccttggccctgctctccctgggtgtttacttctagggctttagctatcacttccctatattctggtaactttcaggtctctctctctaaccctgacctttatccagctgctttataagtacttcaaagtcagtttgtctaaaactgaattt

SEQ ID NO: 351743 - DNA, 2360 bp, Homo sapiens
gggcttaccggcgtgtcgaaggagaaggcgcactcgtctttgtggacccggtctccagccttagggacccggatcgtcggtaatactgacagcagcgcctcctcactcagctccgccatgacaccggcagcagcttctccacacacggcggctcccaccgttcccagtcccctcccctgcccctcccgtccaatgagcgccactcgttaggggcatgcgccgcggagacgacgcgcgagaatggcagttggacggagcctgcctgccggtgctccgcccctgccccgcgcttgactgacgccaatgagaagcgctcctaaggcaattgatggttgaaagaaccaatcccactcctccagggcgggagcgcacgtagagcagctaggtgggcttcggggttgcagctgctgcggctccgcagctgctccggctccgggacccttagagtccattcgcgtgccttctattgaagagcaggaactgacggttgttttaggcctctcaattccagaaagtttcctggggacctgtccggtcggaaagtcgagggacagttgtcttggtatttgtaaagggggtatccagtgaggcggagcttgagggggttgtgtcgagtgactgatacagctgtcaaccaataaagctactatcgctcgcctcaggaaaaccatcacaactccagctggatgtgcgcataatagtgtaatcactcatgattctattttgtttaataattcgttcttgagactagacgtctcgaaagcgaagactggcactcctcagcctgccacggacggctcgcaggccgatactgaacagaagtacccttatcaaggaggcgtcacccctgggcaagcctagcatcagtccattgacacctacagtcaccatgatagacgttctcccagaccaacagcttcctttggctcgaggcgggtcttacgtggagggcctatgggaactacgtcggctcagccaatagggtcagggcagggggcgtggcgggaagtttgaactggtaacttcgggagttgagccacgagctgttgtgcatccagaggtggaattggggcccggtaagtgatttgaataatttaataaataagttagagggctcagcaggcccagaacgagccattttgtcagctgcagcagtcattaactccgcagaggcctctggtccctcgccaggaagtttcttcactggaaactgggaagacagggtggtttagggttgaaggtccgacgtggaagccacgagctgttgtgcatccagaggtggaattggggcccggcattccctcctcgtcccgggctggcccttgcccccaccctgcaactcctggttgagatgggctcagccaagagcgtcccagtcacaccagcgcggcctccgccgcacaacaagcatctggctcgagtggcggacccccgttcacctagtgctggcatcctgcgcactcccatccaggtggagagctctccacagccaggcctaccagcaggggagcaactggagggtcttaaacatgcccaggactcagatccccgctctcctactcttggtattgcacggacacctatgaagaccagcagtggagaccccccaagcccactggtgaaacagctgagtgaagtatttgaaactgaagactctaaatcaaatcttcccccagagcctgttctgcccccagaggcacctttatcttctgaattggacttgcctctgggtacccagttatctgttgaggaacagatgccaccttggaaccagactgagttcccctccaaacaggtgttttccaaggaggaagcaagacagcccacagaaacccctgtggccagccagagctccgacaagccctcaagggaccctgagactcccagatcttcaggttctatgcgcaatagatggaaaccaaacagcagcaaggtactagggagatcccccctcaccatcctgcaggatgacaactcccctggcaccctgacactacgacagggtaagcggccttcacccctaagtgaaaatgttagtgaactaaaggaaggagccattcttggaactggacgacttctgaaaactggaggacgagcatgggagcaaggccaggaccatgacaaggaaaatcagcactttcccttggtggagagctaggccctgcatggccccagcaatgcagtcacccagggcctggtgatatctgtgtcctctcaccccttctttcccagggatactgaggaatggcttgttttcttagactcctcctcagctaccaaactgggactcacagctttattgggctttctttgtgtcttgtgtgtttcttttatattaaaggaagtaattttaaatgtta

SEQ ID NO: 351744 - DNA, 2799 bp, Homo sapiens
gggcttaccggcgtgtcgaaggagaaggcgcactcgtctttgtggacccggtctccagccttagggacccggatcgtcggtaatactgacagcagcgcctcctcactcagctccgccatgacaccggcagcagcttctccacacacggcggctcccaccgttcccagtcccctcccctgcccctcccgtccaatgagcgccactcgttaggggcatgcgccgcggagacgacgcgcgagaatggcagttggacggagcctgcctgccggtgctccgcccctgccccgcgcttgactgacgccaatgagaagcgctcctaaggcaattgatggttgaaagaaccaatcccactcctccagggcgggagcgcacgtagagcagctaggtgggcttcggggttgcagctgctgcggctccgcagctgctccggctccgggacccttagagtccattcgcgtgccttctattgaagagcaggaactgacggttgttttaggcctctcaattccagaaagtttcctggggacctgtccggtcggaaagtcgagggacagttgtcttggtatttgtaaagggggtatccagtgaggcggagcttgagggggttgtgtcgagtgactgatacagctgtcaaccaataaagctactatcgctcgcctcaggaaaaccatcacaactccagctggatgtgcgcataatagtgtaatcactcatgattctattttgtttaataattcgttcttgagactagacgtctcgaaagcgaagactggcactcctcagcctgccacggacggctcgcaggccgatactgaacagaagtacccttatcaaggaggcgtcacccctgggcaagcctagcatcagtccattgacacctacagtcaccatgatagacgttctcccagaccaacagcttcctttggctcgaggcgggtcttacgtggagggcctatgggaactacgtcggctcagccaatagggtcagggcagggggcgtggcgggaagtttgaactggtaacttcgggagttgagccacgagctgttgtgcatccagaggtggaattggggcccggtaagtgatttgaataatttaataaataagttagagggctcagcaggcccagaacgagccattttgtcagctgcagcagtcattaactccgcagaggcctctggtccctcgccaggaagtttcttcactggaaactgggaagacagggtggtttagggttgaaggtccgacgtggaagccacgagctgttgtgcatccagaggtggaattggggcccggcattccctcctcgtcccgggctggcccttgcccccaccctgcaactcctggttgagatgggctcagccaagagcgtcccagtcacaccagcgcggcctccgccgcacaacaagcatctggctcgagtggcggacccccgttcacctagtgctggcatcctgcgcactcccatccaggtggagagctctccacagccaggcctaccagcaggggagcaactggagggtcttaaacatgcccaggactcagatccccgctctcctactcttggtattgcacggacacctatgaagaccagcagtggagaccccccaagcccactggtgaaacagctgagtgaagtatttgaaactgaagactctaaatcaaatcttcccccagagcctgttctgcccccagaggcacctttatcttctgaattggacttgcctctgggtacccagttatctgttgaggaacagatgccaccttggaaccagactgagttcccctccaaacaggtgttttccaaggaggaagcaagacagcccacagaaacccctgtggccagccagagctccgacaagccctcaagggaccctgagactcccagatcttcaggtacagaatctaaggcaagatgcagggaagataaactaggataatgttttgggataaggtccatgggtgagtgtgggaggaataaactgtaagtcctagttttgggtccttgctttaacgccttacccaccccaggttctgttctatgcgcaatagatggaaaccaaacagcagcaaggtactagggagatcccccctcaccatcctgcaggatgacaactcccctggcaccctgacactacgacagggtaagcggccttcacccctaagtgaaaatgttagtgaactaaaggaaggagccattcttggaactggacgacttctgaaaactggaggacgagcatgggagcaaggccaggaccatgacaaggaaaatcagcactttcccttggtggagagctaggccctgcatggccccagcaatgcagtcacccagggcctggtgatatctgtgtcctctcaccccttctttcccagggatactgaggaatggcttgttttcttagactcctcctcagctaccaaactgggactcacagctttattgggctttctttgtgtcttgtgtgtttcttttatattaaaggaagtaattttaaatgttactttaaaaaggtatatgtaaaccttgcaccgagttttctgtgtgtagaatggcggcctagagagcttgcgttccctggcctgagcccactgatgctctgagccttctttgcacatctccctttaaccatggtgtccctatggctctgtccttggccctgctctccctgggtgtttacttctagggctttagctatcacttccctatattctggtaactttcaggtctctctctctaaccctgacctttatccagctgctttataagtacttcaaagtcagtttgtctaaaactgaattt

SEQ ID NO: 351745 - DNA, 1641 bp, Homo sapiens
gggcttaccggcgtgtcgaaggagaaggcgcactcgtctttgtggacccggtctccagccttagggacccggatcgtcggtaatactgacagcagcgcctcctcactcagctccgccatgacaccggcagcagcttctccacacacggcggctcccaccgttcccagtcccctcccctgcccctcccgtccaatgagcgccactcgttaggggcatgcgccgcggagacgacgcgcgagaatggcagttggacggagcctgcctgccggtgctccgcccctgccccgcgcttgactgacgccaatgagaagcgctcctaaggcaattgatggttgaaagaaccaatcccactcctccagggcgggagcgcacgtagagcagctaggtgggcttcggggttgcagctgctgcggctccgcagctgctccggctccgggacccttagagtccattcgcgtgccttctattgaagagcaggaactgacggttgttttaggcctctcaattccagaaagtttcctggggacctgtccggtcggaaagtcgagggacagttgtcttggtatttgtaaagggggtatccagtgaggcggagcttgagggggttgtgtcgatgaagtatttgaaactgaagactctaaatcaaatcttcccccagagcctgttctgcccccagaggcacctttatcttctgaattggacttgcctctgggtacccagttatctgttgaggaacagatgccaccttggaaccagactgagttcccctccaaacaggtgttttccaaggaggaagcaagacagcccacagaaacccctgtggccagccagagctccgacaagccctcaagggaccctgagactcccagatcttcaggttctatgcgcaatagatggaaaccaaacagcagcaaggtactagggagatcccccctcaccatcctgcaggatgacaactcccctggcaccctgacactacgacagggtaagcggccttcacccctaagtgaaaatgttagtgaactaaaggaaggagccattcttggaactggacgacttctgaaaactggaggacgagcatgggagcaaggccaggaccatgacaaggaaaatcagcactttcccttggtggagagctaggccctgcatggccccagcaatgcagtcacccagggcctggtgatatctgtgtcctctcaccccttctttcccagggatactgaggaatggcttgttttcttagactcctcctcagctaccaaactgggactcacagctttattgggctttctttgtgtcttgtgtgtttcttttatattaaaggaagtaattttaaatgttactttaaaaaggtatatgtaaaccttgcaccgagttttctgtgtgtagaatggcggcctagagagcttgcgttccctggcctgagcccactgatgctctgagccttctttgcacatctccctttaaccatggtgtccctatggctctgtccttggccctgctctccctgggtgtttacttctagggctttagctatcacttccctatattctggtaactttcaggtctctctctctaaccctgacctttatccagctgctttataagtacttcaaagtcagtttgtctaaaactgaattt

SEQ ID NO: 351746 - DNA, 2552 bp, Homo sapiens
gggcttaccggcgtgtcgaaggagaaggcgcactcgtctttgtggacccggtctccagccttagggacccggatcgtcggtaatactgacagcagcgcctcctcactcagctccgccatgacaccggcagcagcttctccacacacggcggctcccaccgttcccagtcccctcccctgcccctcccgtccaatgagcgccactcgttaggggcatgcgccgcggagacgacgcgcgagaatggcagttggacggagcctgcctgccggtgctccgcccctgccccgcgcttgactgacgccaatgagaagcgctcctaaggcaattgatggttgaaagaaccaatcccactcctccagggcgggagcgcacgtagagcagctaggtgggcttcggggttgcagctgctgcggctccgcagctgctccggctccgggacccttagagtccattcgcgtgccttctattgaagagcaggaactgacggttgttttaggcctctcaattccagaaagtttcctggggacctgtccggtcggaaagtcgagggacagttgtcttggtatttgtaaagggggtatccagtgaggcggagcttgagggggttgtgtcgagtgactgatacagctgtcaaccaataaagctactatcgctcgcctcaggaaaaccatcacaactccagctggatgtgcgcataatagtgtaatcactcatgattctattttgtttaataattcgttcttgagactagacgtctcgaaagcgaagactggcactcctcagcctgccacggacggctcgcaggccgatactgaacagaagtacccttatcaaggaggcgtcacccctgggcaagcctagcatcagtccattgacacctacagtcaccatgatagacgttctcccagaccaacagcttcctttggctcgaggcgggtcttacgtggagggcctatgggaactacgtcggctcagccaatagggtcagggcagggggcgtggcgggaagtttgaactggtaacttcgggagttgagccacgagctgttgtgcatccagaggtggaattggggcccggtaagtgatttgaataatttaataaataagttagagggctcagcaggcccagaacgagccattttgtcagctgcagcagtcattaactccgcagaggcctctggtccctcgccaggaagtttcttcactggaaactgggaagacagggtggtttagggttgaaggtccgacgtggaagccacgagctgttgtgcatccagaggtggaattggggcccggcattccctcctcgtcccgggctggcccttgcccccaccctgcaactcctggttgagatgggctcagccaagagcgtcccagtcacaccagcgcggcctccgccgcacaacaagcatctggctcgagtggcggacccccgttcacctagtgctggcatcctgcgcactcccatccaggtggagagctctccacagccaggcctaccagcaggggagcaactggagggtcttaaacatgcccaggactcagatccccgctctcctactcttggtattgcacggacacctatgaagaccagcagtggagaccccccaagcccactggtgaaacagctgagtgaagtatttgaaactgaagactctaaatcaaatcttcccccagagcctgttctgcccccagaggcacctttatcttctgaattggacttgcctctgggtacccagttatctgttgaggaacagatgccaccttggaaccagactgagttcccctccaaacaggtgttttccaaggaggaagcaagacagcccacagaaacccctgtggccagccagagctccgacaagccctcaagggaccctgagactcccagatcttcagggtaagcggccttcacccctaagtgaaaatgttagtgaactaaaggaaggagccattcttggaactggacgacttctgaaaactggaggacgagcatgggagcaaggccaggaccatgacaaggaaaatcagcactttcccttggtggagagctaggccctgcatggccccagcaatgcagtcacccagggcctggtgatatctgtgtcctctcaccccttctttcccagggatactgaggaatggcttgttttcttagactcctcctcagctaccaaactgggactcacagctttattgggctttctttgtgtcttgtgtgtttcttttatattaaaggaagtaattttaaatgttactttaaaaaggtatatgtaaaccttgcaccgagttttctgtgtgtagaatggcggcctagagagcttgcgttccctggcctgagcccactgatgctctgagccttctttgcacatctccctttaaccatggtgtccctatggctctgtccttggccctgctctccctgggtgtttacttctagggctttagctatcacttccctatattctggtaactttcaggtctctctctctaaccctgacctttatccagctgctttataagtacttcaaagtcagtttgtctaaaactgaattt

SEQ ID NO: 351747 - DNA, 2253 bp, Homo sapiens
gggcttaccggcgtgtcgaaggagaaggcgcactcgtctttgtggacccggtctccagccttagggacccggatcgtcggtaatactgacagcagcgcctcctcactcagctccgccatgacaccggcagcagcttctccacacacggcggctcccaccgttcccagtcccctcccctgcccctcccgtccaatgagcgccactcgttaggggcatgcgccgcggagacgacgcgcgagaatggcagttggacggagcctgcctgccggtgctccgcccctgccccgcgcttgactgacgccaatgagaagcgctcctaaggcaattgatggttgaaagaaccaatcccactcctccagggcgggagcgcacgtagagcagctaggtgggcttcggggttgcagctgctgcggctccgcagctgctccggctccgggacccttagagtccattcgcgtgccttctattgaagagcaggaactgacggttgttttaggcctctcaattccagaaagtttcctggggacctgtccggtcggaaagtcgagggacagttgtcttggtatttgtaaagggggtatccagtgaggcggagcttgagggggttgtgtcgagtgactgatacagctgtcaaccaataaagctactatcgctcgcctcaggaaaaccatcacaactccagctggatgtgcgcataatagtgtaatcactcatgattctattttgtttaataattcgttcttgagactagacgtctcgaaagcgaagactggcactcctcagcctgccacggacggctcgcaggccgatactgaacagaagtacccttatcaaggaggcgtcacccctgggcaagcctagcatcagtccattgacacctacagtcaccatgatagacgttctcccagaccaacagcttcctttggctcgaggcgggtcttacgtggagggcctatgggaactacgtcggctcagccaatagggtcagggcagggggcgtggcgggaagtttgaactggtaacttcgggagttgagccacgagctgttgtgcatccagaggtggaattggggcccggtaagtgatttgaataatttaataaataagttagagggctcagcaggcccagaacgagccattttgtcagctgcagcagtcattaactccgcagaggcctctggtccctcgccaggaagtttcttcactggaaactgggaagacagggtggtttagggttgaaggtccgacgtggaagccacgagctgttgtgcatccagaggtggaattggggcccggcattccctcctcgtcccgggctggcccttgcccccaccctgcaactcctggttgagatgggctcagccaagagcgtcccagtcacaccagcgcggcctccgccgcacaacaagcatctggctcgagtggcggacccccgttcacctagtgctggcatcctgcgcactcccatccaggtggagagctctccacagccaggcctaccagcaggggagcaactggagggtcttaaacatgcccaggactcagatccccgctctcctactcttggtattgcacggacacctatgaagaccagcagtggagaccccccaagcccactggtgaaacagctgagtgaagtatttgaaactgaagactctaaatcaaatcttcccccagagcctgttctgcccccagaggcacctttatcttctgaattggacttgcctctgggtacccagttatctgttgaggaacagatgccaccttggaaccagactgagttcccctccaaacaggtgttttccaaggaggaagcaagacagcccacagaaacccctgtggccagccagagctccgacaagccctcaagggaccctgagactcccagatcttcagggtaagcggccttcacccctaagtgaaaatgttagtgaactaaaggaaggagccattcttggaactggacgacttctgaaaactggaggacgagcatgggagcaaggccaggaccatgacaaggaaaatcagcactttcccttggtggagagctaggccctgcatggccccagcaatgcagtcacccagggcctggtgatatctgtgtcctctcaccccttctttcccagggatactgaggaatggcttgttttcttagactcctcctcagctaccaaactgggactcacagctttattgggctttctttgtgtcttgtgtgtttcttttatattaaaggaagtaattttaaatgtta

SEQ ID NO: 351748 - DNA, 2441 bp, Homo sapiens
gggcttaccggcgtgtcgaaggagaaggcgcactcgtctttgtggacccggtctccagccttagggacccggatcgtcggtaatactgacagcagcgcctcctcactcagctccgccatgacaccggcagcagcttctccacacacggcggctcccaccgttcccagtcccctcccctgcccctcccgtccaatgagcgccactcgttaggggcatgcgccgcggagacgacgcgcgagaatggcagttggacggagcctgcctgccggtgctccgcccctgccccgcgcttgactgacgccaatgagaagcgctcctaaggcaattgatggttgaaagaaccaatcccactcctccagggcgggagcgcacgtagagcagctaggtgggcttcggggttgcagctgctgcggctccgcagctgctccggctccgggacccttagagtccattcgcgtgccttctattgaagagcaggaactgacggttgttttaggcctctcaattccagaaagtttcctggggacctgtccggtcggaaagtcgagggacagttgtcttggtatttgtaaagggggtatccagtgaggcggagcttgagggggttgtgtcgagtgactgatacagctgtcaaccaataaagctactatcgctcgcctcaggaaaaccatcacaactccagctggatgtgcgcataatagtgtaatcactcatgattctattttgtttaataattcgttcttgagactagacgtctcgaaagcgaagactggcactcctcagcctgccacggacggctcgcaggccgatactgaacagaagtacccttatcaaggaggcgtcacccctgggcaagcctagcatcagtccattgacacctacagtcaccatgatagacgttctcccagaccaacagcttcctttggctcgaggcgggtcttacgtggagggcctatgggaactacgtcggctcagccaatagggtcagggcagggggcgtggcgggaagtttgaactggtaacttcgggagttgagccacgagctgttgtgcatccagaggtggaattggggcccggcattccctcctcgtcccgggctggcccttgcccccaccctgcaactcctggttgagatgggctcagccaagagcgtcccagtcacaccagcgcggcctccgccgcacaacaagcatctggctcgagtggcggacccccgttcacctagtgctggcatcctgcgcactcccatccaggtggagagctctccacagccaggcctaccagcaggggagcaactggagggtcttaaacatgcccaggactcagatccccgctctcctactcttggtattgcacggacacctatgaagaccagcagtggagaccccccaagcccactggtgaaacagctgagtgaagtatttgaaactgaagactctaaatcaaatcttcccccagagcctgttctgcccccagaggcacctttatcttctgaattggacttgcctctgggtacccagttatctgttgaggaacagatgccaccttggaaccagactgagttcccctccaaacaggtgttttccaaggaggaagcaagacagcccacagaaacccctgtggccagccagagctccgacaagccctcaagggaccctgagactcccagatcttcaggttctatgcgcaatagatggaaaccaaacagcagcaaggtactagggagatcccccctcaccatcctgcaggatgacaactcccctggcaccctgacactacgacagggtaagcggccttcacccctaagtgaaaatgttagtgaactaaaggaaggagccattcttggaactggacgacttctgaaaactggaggacgagcatgggagcaaggccaggaccatgacaaggaaaatcagcactttcccttggtggagagctaggccctgcatggccccagcaatgcagtcacccagggcctggtgatatctgtgtcctctcaccccttctttcccagggatactgaggaatggcttgttttcttagactcctcctcagctaccaaactgggactcacagctttattgggctttctttgtgtcttgtgtgtttcttttatattaaaggaagtaattttaaatgttactttaaaaaggtatatgtaaaccttgcaccgagttttctgtgtgtagaatggcggcctagagagcttgcgttccctggcctgagcccactgatgctctgagccttctttgcacatctccctttaaccatggtgtccctatggctctgtccttggccctgctctccctgggtgtttacttctagggctttagctatcacttccctatattctggtaactttcaggtctctctctctaaccctgacctttatccagctgctttataagtacttcaaagtcagtttgtctaaaactgaattt

SEQ ID NO: 351749 - DNA, 2783 bp, Homo sapiens
gggcttaccggcgtgtcgaaggagaaggcgcactcgtctttgtggacccggtctccagccttagggacccggatcgtcggtaatactgacagcagcgcctcctcactcagctccgccatgacaccggcagcagcttctccacacacggcggctcccaccgttcccagtcccctcccctgcccctcccgtccaatgagcgccactcgttaggggcatgcgccgcggagacgacgcgcgagaatggcagttggacggagcctgcctgccggtgctccgcccctgccccgcgcttgactgacgccaatgagaagcgctcctaaggcaattgatggttgaaagaaccaatcccactcctccagggcgggagcgcacgtagagcagctaggtgggcttcggggttgcagctgctgcggctccgcagctgctccggctccgggacccttagagtccattcgcgtgccttctattgaagagcaggaactgacggttgttttaggcctctcaattccagaaagtttcctggggacctgtccggtcggaaagtcgagggacagttgtcttggtatttgtaaagggggtatccagtgaggcggagcttgagggggttgtgtcgagtgactgatacagctgtcaaccaataaagctactatcgctcgcctcaggaaaaccatcacaactccagctggatgtgcgcataatagtgtaatcactcatgattctattttgtttaataattcgttcttgagactagacgtctcgaaagcgaagactggcactcctcagcctgccacggacggctcgcaggccgatactgaacagaagtacccttatcaaggaggcgtcacccctgggcaagcctagcatcagtccattgacacctacagtcaccatgatagacgttctcccagaccaacagcttcctttggctcgaggcgggtcttacgtggagggcctatgggaactacgtcggctcagccaatagggtcagggcagggggcgtggcgggaagtttgaactggtaacttcgggagttgagccacgagctgttgtgcatccagaggtggaattggggcccggtaagtgatttgaataatttaataaataagttagagggctcagcaggcccagaacgagccattttgtcagctgcagcagtcattaactccgcagaggcctctggtccctcgccaggaagtttcttcactggaaactgggaagacagggtggtttagggttgaaggtccgacgtggaagccacgagctgttgtgcatccagaggtggaattggggcccggcattccctcctcgtcccgggctggcccttgcccccaccctgcaactcctggttgagatgggctcagccaagagcgtcccagtcacaccagcgcggcctccgccgcacaacaagcatctggctcgagtggcggacccccgttcacctagtgctggcatcctgcgcactcccatccaggtggagagctctccacagccaggcctaccagcaggggagcaactggagggtcttaaacatgcccaggactcagatccccgctctcctactcttggtattgcacggacacctatgaagaccagcagtggagaccccccaagcccactggtgaaacagctgagtgaagtatttgaaactgaagactctaaatcaaatcttcccccagagcctgttctgcccccagaggcacctttatcttctgaattggacttgcctctgggtacccagttatctgttgaggaacagatgccaccttggaaccagactgagttcccctccaaacaggtgttttccaaggaggaagcaagacagcccacagaaacccctgtggccagccagagctccgacaagccctcaagggaccctgagactcccagatcttcaggttctatgcgcaatagatggaaaccaaacagcagcaaggtactagggagatcccccctcaccatcctgcaggatgacaactcccctggcaccctgacactacgacaggtaaaggaagagaaagtgcaagctgttactaggatatccaacgaagagggtgggagacccttttacccagatcttccctcttctgaacagcaactccccccaactcatacactgccgttttcagggtaagcggccttcacccctaagtgaaaatgttagtgaactaaaggaaggagccattcttggaactggacgacttctgaaaactggaggacgagcatgggagcaaggccaggaccatgacaaggaaaatcagcactttcccttggtggagagctaggccctgcatggccccagcaatgcagtcacccagggcctggtgatatctgtgtcctctcaccccttctttcccagggatactgaggaatggcttgttttcttagactcctcctcagctaccaaactgggactcacagctttattgggctttctttgtgtcttgtgtgtttcttttatattaaaggaagtaattttaaatgttactttaaaaaggtatatgtaaaccttgcaccgagttttctgtgtgtagaatggcggcctagagagcttgcgttccctggcctgagcccactgatgctctgagccttctttgcacatctccctttaaccatggtgtccctatggctctgtccttggccctgctctccctgggtgtttacttctagggctttagctatcacttccctatattctggtaactttcaggtctctctctctaaccctgacctttatccagctgctttataagtacttcaaagtcagtttgtctaaaactgaattt

SEQ ID NO: 351750 - DNA, 2923 bp, Homo sapiens
gggcttaccggcgtgtcgaaggagaaggcgcactcgtctttgtggacccggtctccagccttagggacccggatcgtcggtaatactgacagcagcgcctcctcactcagctccgccatgacaccggcagcagcttctccacacacggcggctcccaccgttcccagtcccctcccctgcccctcccgtccaatgagcgccactcgttaggggcatgcgccgcggagacgacgcgcgagaatggcagttggacggagcctgcctgccggtgctccgcccctgccccgcgcttgactgacgccaatgagaagcgctcctaaggcaattgatggttgaaagaaccaatcccactcctccagggcgggagcgcacgtagagcagctaggtgggcttcggggttgcagctgctgcggctccgcagctgctccggctccgggacccttagagtccattcgcgtgccttctattgaagagcaggaactgacggttgttttaggcctctcaattccagaaagtttcctggggacctgtccggtcggaaagtcgagggacagttgtcttggtatttgtaaagggggtatccagtgaggcggagcttgagggggttgtgtcgagtgactgatacagctgtcaaccaataaagctactatcgctcgcctcaggaaaaccatcacaactccagctggatgtgcgcataatagtgtaatcactcatgattctattttgtttaataattcgttcttgagactagacgtctcgaaagcgaagactggcactcctcagcctgccacggacggctcgcaggccgatactgaacagaagtacccttatcaaggaggcgtcacccctgggcaagcctagcatcagtccattgacacctacagtcaccatgatagacgttctcccagaccaacagcttcctttggctcgaggcgggtcttacgtggagggcctatgggaactacgtcggctcagccaatagggtcagggcagggggcgtggcgggaagtttgaactggtaacttcgggagttgagccacgagctgttgtgcatccagaggtggaattggggcccggtaagtgatttgaataatttaataaataagttagagggctcagcaggcccagaacgagccattttgtcagctgcagcagtcattaactccgcagaggcctctggtccctcgccaggaagtttcttcactggaaactgggaagacagggtggtttagggttgaaggtccgacgtggaagccacgagctgttgtgcatccagaggtggaattggggcccggcattccctcctcgtcccgggctggcccttgcccccaccctgcaactcctggttgagatgggctcagccaagagcgtcccagtcacaccagcgcggcctccgccgcacaacaagcatctggctcgagtggcggacccccgttcacctagtgctggcatcctgcgcactcccatccaggtggagagctctccacagccaggcctaccagcaggggagcaactggagggtcttaaacatgcccaggactcagatccccgctctcctactcttggtattgcacggacacctatgaagaccagcagtggagaccccccaagcccactggtgaaacagctgagtgaagtatttgaaactgaagactctaaatcaaatcttcccccagagcctgttctgcccccagaggcacctttatcttctgaattggacttgcctctgggtacccagttatctgttgaggaacagatgccaccttggaaccagactgagttcccctccaaacaggtgttttccaaggaggaagcaagacagcccacagaaacccctgtggccagccagagctccgacaagccctcaagggaccctgagactcccagatcttcaggtacagaatctaaggcaagatgcagggaagataaactaggataatgttttgggataaggtccatgggtgagtgtgggaggaataaactgtaagtcctagttttgggtccttgctttaacgccttacccaccccaggttctgttctatgcgcaatagatggaaaccaaacagcagcaaggtactagggagatcccccctcaccatcctgcaggatgacaactcccctggcaccctgacactacgacaggtaaaggaagagaaagtgcaagctgttactaggatatccaacgaagagggtgggagacccttttacccagatcttccctcttctgaacagcaactccccccaactcatacactgccgttttcagggtaagcggccttcacccctaagtgaaaatgttagtgaactaaaggaaggagccattcttggaactggacgacttctgaaaactggaggacgagcatgggagcaaggccaggaccatgacaaggaaaatcagcactttcccttggtggagagctaggccctgcatggccccagcaatgcagtcacccagggcctggtgatatctgtgtcctctcaccccttctttcccagggatactgaggaatggcttgttttcttagactcctcctcagctaccaaactgggactcacagctttattgggctttctttgtgtcttgtgtgtttcttttatattaaaggaagtaattttaaatgttactttaaaaaggtatatgtaaaccttgcaccgagttttctgtgtgtagaatggcggcctagagagcttgcgttccctggcctgagcccactgatgctctgagccttctttgcacatctccctttaaccatggtgtccctatggctctgtccttggccctgctctccctgggtgtttacttctagggctttagctatcacttccctatattctggtaactttcaggtctctctctctaaccctgacctttatccagctgctttataagtacttcaaagtcagtttgtctaaaactgaattt

SEQ ID NO: 351751 - DNA, 2157 bp, Homo sapiens
gggcttaccggcgtgtcgaaggagaaggcgcactcgtctttgtggacccggtctccagccttagggacccggatcgtcggtaatactgacagcagcgcctcctcactcagctccgccatgacaccggcagcagcttctccacacacggcggctcccaccgttcccagtcccctcccctgcccctcccgtccaatgagcgccactcgttaggggcatgcgccgcggagacgacgcgcgagaatggcagttggacggagcctgcctgccggtgctccgcccctgccccgcgcttgactgacgccaatgagaagcgctcctaaggcaattgatggttgaaagaaccaatcccactcctccagggcgggagcgcacgtagagcagctaggtgggcttcggggttgcagctgctgcggctccgcagctgctccggctccgggacccttagagtccattcgcgtgccttctattgaagagcaggaactgacggttgttttaggcctctcaattccagaaagtttcctggggacctgtccggtcggaaagtcgagggacagttgtcttggtatttgtaaagggggtatccagtgaggcggagcttgagggggttgtgtcgagtgactgatacagctgtcaaccaataaagctactatcgctcgcctcaggaaaaccatcacaactccagctggatgtgcgcataatagtgtaatcactcatgattctattttgtttaataattcgttcttgagactagacgtctcgaaagcgaagactggcactcctcagcctgccacggacggctcgcaggccgatactgaacagaagtacccttatcaaggaggcgtcacccctgggcaagcctagcatcagtccattgacacctacagtcaccatgatagacgttctcccagaccaacagcttcctttggctcgaggcgggtcttacgtggagggcctatgggaactacgtcggctcagccaatagggtcagggcagggggcgtggcgggaagtttgaactggtaacttcgggagttgagccacgagctgttgtgcatccagaggtggaattggggcccggtggagagctctccacagccaggcctaccagcaggggagcaactggagggtcttaaacatgcccaggactcagatccccgctctcctactcttggtattgcacggacacctatgaagaccagcagtggagaccccccaagcccactggtgaaacagctgagtgaagtatttgaaactgaagactctaaatcaaatcttcccccagagcctgttctgcccccagaggcacctttatcttctgaattggacttgcctctgggtacccagttatctgttgaggaacagatgccaccttggaaccagactgagttcccctccaaacaggtgttttccaaggaggaagcaagacagcccacagaaacccctgtggccagccagagctccgacaagccctcaagggaccctgagactcccagatcttcagggtaagcggccttcacccctaagtgaaaatgttagtgaactaaaggaaggagccattcttggaactggacgacttctgaaaactggaggacgagcatgggagcaaggccaggaccatgacaaggaaaatcagcactttcccttggtggagagctaggccctgcatggccccagcaatgcagtcacccagggcctggtgatatctgtgtcctctcaccccttctttcccagggatactgaggaatggcttgttttcttagactcctcctcagctaccaaactgggactcacagctttattgggctttctttgtgtcttgtgtgtttcttttatattaaaggaagtaattttaaatgttactttaaaaaggtatatgtaaaccttgcaccgagttttctgtgtgtagaatggcggcctagagagcttgcgttccctggcctgagcccactgatgctctgagccttctttgcacatctccctttaaccatggtgtccctatggctctgtccttggccctgctctccctgggtgtttacttctagggctttagctatcacttccctatattctggtaactttcaggtctctctctctaaccctgacctttatccagctgctttataagtacttcaaagtcagtttgtctaaaactgaattt

SEQ ID NO: 351752 - DNA, 3809 bp, Homo sapiens
aacgccgggcagggcggcgggcgcgctcagtctggcggcggctgccgtgagctgactgacgttccgggaacgccgcagcagcccgcgccgcccgcagcctagccgagccgcgccgcccgggcctcgcccgcccgcctgcccgccatggtgtcatggatcatctccaggctggtggtgcttatatttggcaccctttaccctgcgtattattcctacaaggctgtgaaatcaaaggacattaaggaatatgtcaaatggatgatgtactggattatatttgcacttttcaccacagcagagacattcacagacatcttcctttgttggtttccattctattatgaactaaaaatagcatttgtagcctggctgctgtctccctacacaaaaggctccagcctcctgtacaggaagtttgtacatcccacactatcttcaaaagaaaaggaaatcgatgattgtctggtccaagcaaaagaccgaagttacgatgcccttgtgcacttcgggaagcggggcttgaacgtggccgccacagcggctgtgatggctgcttccaagggacagggtgccttatcggagagactgcggagcttcagcatgcaggacctcaccaccatcaggggagacggcgcccctgctccctcgggccccccaccaccggggtctgggcgggccagcggcaaacacggccagcctaagatgtccaggagtgcttctgagagcgctagcagctcaggcaccgcctagaatccttcgatctcgcttcaggaagaaaagtacctcatcctcggccaccgaaaccacgtgagtgagatgagccaacagcaccggatccacagaatgtttcttctctgccttaaagagctattcactaataacatagaaatccgcaagctgggtgtgctttgagtgtgcagcctcacaaacatggccttttctctctccccttccacttttaaggatttatttttttcccccttttctttattttgctggggagaggctaaagggaaaggtagtaggggcgggggtggtgacctttaagtcttctgaggttggtaattttccacaattggattgtcattatagacagcagtgtgttttttagaaagataagagaatcacccctatgctgctgagatgtacatttgtaatttatctgttgcatacttagtttttagtcctgtaaatgcaaacacagcattttttacaactttctttgttcttggtacttatactttgaactatgatgtacatatttatggcttttggcttttaatataatggacttgcaagggctgccagaggttctgatatgtaagaaaactgcaaaaacaaatatagacaaatattttgattctagagaacgtctcagatgtgcttataaagcttccaaatacaactccagtaagacatccctttccctgcaggagtgtggtctatattctttagatagttgtttagtcaaaagaccagacaagttacaaactaagagaaacaatatttcacaacacagtaaagtgtgatgagaggtcaggggaacatcccagtaaaagagaagagtcacaggaagctcatctcctccctggattctggattaggagcttctgaatcttttccagggataggcaggtagctcactcttggtgcaatttcttgaggatgggaacatgtagagctgctggaaggagtaattctgtgcttgacaaaggacgatttctcctttatcgtgaccagtgctgccgatttcctgacagaggagcttacactctgagcaccttgttttagcgaactctagcaaaacttgtttagcttagcaaaaacaaacacacaaaaaactgagaactctgctgtttcagatatgccataacatacatctgaaacacatgtgtaacaatcaaaatggtgggctctagaatggttttggagctcgagatcttcatgggttagacttgctggtcagacccaggagcacctgtggctcacaccttctgttcccctcctggcctgtgcagaatgtaaacagcagactcatactcaatgggcactacaggccttatcagacgttttatacaagcctggattgcttagtaggggaataaggcattctctgagggggctttccacttagattgagaattttatttgaaaagaatctggtttaaatggcattgtggtccgaggtagctgctctccccactgagagctgagccgaaatataagaataatatatttgtgcttcgagttggtgtttctttcagtgtaatgcatgcagtggtcacaacccagttactcataatatttggattgtatttgttcgtagatatgcccagaagactagagaattagtgttatataccatatagaacttactgtcagtcaactataaacaggcccaattaaaaactgttccattactacgcaaacacatattagaggcctttgctgatgacacattagctggatcttagccaccccagaaagggtttgatttgaagctgattgttgccagatatgcatattggaatcccatctacccatagttcctctgaaggtgattttgtaatttgcaaaagggtataggaaaatatacctaaaagcgaatttgtggctgagaggataaacagaagctgtttgctcatgttctgtgccccacacccaccaatacctaaatctgttaaggaagacagaaaatgttttctttgtgctcattgagtagttccagacagaagaagaatatactctttaaaatgtatttacctgttagttggaagtacccagaattatcagaaacgaatgcaaaaaaaaaaaaaaaaaaaaaaagcttacacagcttcttagcaattttttttttttttgccgaaacaataaattgcctttagcagcagtttaaaatcctatcgtgaacaacctatattttcgccattttacaatggagagttgtgacaagtacaggttatcaagtttgcacttaactatgccaaaaaaagtttgaagcgctctattctcagacatgctgtattattacttctcattcaagattgaaaaatataaaggtatccaaactctgtcttaatgtaaatgtaactatttttccttcaagtgttgactagggagtcggtttctctcttaaagacactcactgtacaactgaaagcagctgtcatatttctggcaaaatgtgtttacgtatctgacaagttgtacatttgtgtatgaactgacataaaatgtgaaagcctgtaagtgtacatgtagtggtgtggtgttctgtctagaggatacaactgaatgtttttaatttgctgacttacagacacaggctgtttacaaaatgctagctgttctgaggaggtgagatgtggacttgtgcttataaactggagagtttagtcataatccctcctggctttgtgtgaatagcttgctcactttgctggcctttgaaatgtgttctccgtgataagctatccatgtgtttgtgataagagtgcttgtcaaccatgaccatctttgagccttcctagtcctccacctggcacagtatttgaaatggcaaaggatgtgcttcatcctctaacagtgtacactcccagagctgatattctggattttgactgtgcacatttcctctagttcatgtctgtagtccctatagaatgatctgtaataaaatagtatactggactgtgcatcaaagggatgtaaaattacagtattccaaaggttgaagttctgctgttttgttataatgcctgatacacatcttgaataaagtcttaacatttttcttttaaaaaaaaaat

SEQ ID NO: 351753 - DNA, 2273 bp, Homo sapiens
gaccagacgaccagaccagaccagaccagaccagaccagaccagacgaccagaccagaccagaccagaccagaccagaccagagaccagaccagaccagaccagaccagaccagaccagagaccagaccagaccagaccagaccagaccagaccagagaccagaccagaccagaccagaccagaccagaccagagaccagaccagaccagaccagaccagaccagaccagagaccagaccagaccagaccagaccagaccagaccagagaccagaccagaccagaccagaccagaccagaccagagaccagaccagaccagaccagaccagaccagaccagagaccagaccagaccagaccagaccagaccagaccagagaccagaccagaccagaccagaccagaccagaccagagaccagaccagaccagaccagaccagaccagaccagagaccagaccagaccagaccagaccagaccagaccagagaccagaccagaccagaccagaccagaccagaccagagaccagaccagaccagaccagaccagaccagaccagagaccagaccagaccagaccagaccagaccagaccagagaccagaccagaccagaccagaccagaccagaccagagaccagaccagaccagaccagaccagaccagaccagagaccagaccagaccagaccagaccagaccagaccagagaccagaccagaccagaccagaccagaccagaccagagaccagaccagaccagaccagaccatatagaacttactgtcagtcaactataaacaggcccaattaaaaactgttccattactacgcaaacacatattagaggcctttgctgatgacacattagctggatcttagccaccccagaaagggtttgatttgaagctgattgttgccagatatgcatattggaatcccatctacccatagttcctctgaaggtgattttgtaatttgcaaaagggtataggaaaatatacctaaaagcgaatttgtggctgagaggataaacagaagctgtttgctcatgttctgtgccccacacccaccaatacctaaatctgttaaggaagacagaaaatgttttctttgtgctcattgagtagttccagacagaagaagaatatactctttaaaatgtatttacctgttagttggaagtacccagaattatcagaaacgaatgcaaaaaaaaaaaaaaaaaaaaaaagcttacacagcttcttagcaattttttttttttttgccgaaacaataaattgcctttagcagcagtttaaaatcctatcgtgaacaacctatattttcgccattttacaatggagagttgtgacaagtacaggttatcaagtttgcacttaactatgccaaaaaaagtttgaagcgctctattctcagacatgctgtattattacttctcattcaagattgaaaaatataaaggtatccaaactctgtcttaatgtaaatgtaactatttttccttcaagtgttgactagggagtcggtttctctcttaaagacactcactgtacaactgaaagcagctgtcatatttctggcaaaatgtgtttacgtatctgacaagttgtacatttgtgtatgaactgacataaaatgtgaaagcctgtaagtgtacatgtagtggtgtggtgttctgtctagaggatacaactgaatgtttttaatttgctgacttacagacacaggctgtttacaaaatgctagctggaaagtctgtaatgttcatgtcataacttttagttaattgccattgagcacctgttctgaggaggtgagatgtggacttgtgcttataaactggagagtttagtcataatccctcctggctttgtgtgaatagcttgctcactttgctggcctttgaaatgtgttctccgtgataagctatccatgtgtttgtgataagagtgcttgtcaaccatgaccatctttgagccttcctagtcctccacctggcacagtatttgaaatggcaaaggatgtgcttcatcctctaacagtgtacactcccagagctgatattctggattttgactgtgcacatttcctctagttcatgtctgtagtccctatagaatgatctgtaataaaatagtatactggactgtgcatcaaagggatgtaaaattacagtattccaaaggttgaagttctgctgttttgttataatgcctgatacacatcttgaataaagtcttaacatttttcttttaaaaaaaaaat

SEQ ID NO: 351754 - DNA, 1298 bp, Homo sapiens
gcaaagagaggaggaggctttgggcaggggtgcttggagttattttccagagggaactttgactctgtctccggccttccctagggctgcagggtgcaaggactgactttgtgtgttaaggaagacagaaaatgttttctttgtgctcattgagtagttccagacagaagaagaatatactctttaaaatgtatttacctgttagttggaagtacccagaattatcagaaacgaatgcaaaaaaaaaaaaaaaaaaaaaaagcttacacagcttcttagcaattttttttttttttgccgaaacaataaattgcctttagcagcagtttaaaatcctatcgtgaacaacctatattttcgccattttacaatggagagttgtgacaagtacaggttatcaagtttgcacttaactatgccaaaaaaagtttgaagcgctctattctcagacatgctgtattattacttctcattcaagattgaaaaatataaaggtatccaaactctgtcttaatgtaaatgtaactatttttccttcaagtgttgactagggagtcggtttctctcttaaagacactcactgtacaactgaaagcagctgtcatatttctggcaaaatgtgtttacgtatctgacaagttgtacatttgtgtatgaactgacataaaatgtgaaagcctgtaagtgtacatgtagtggtgtggtgttctgtctagaggatacaactgaatgtttttaatttgctgacttacagacacaggctgtttacaaaatgctagctggaaagtctgtaatgttcatgtcataacttttagttaattgccattgagcacctgttctgaggaggtgagatgtggacttgtgcttataaactggagagtttagtcataatccctcctggctttgtgtgaatagcttgctcactttgctggcctttgaaatgtgttctccgtgataagctatccatgtgtttgtgataagagtgcttgtcaaccatgaccatctttgagccttcctagtcctccacctggcacagtatttgaaatggcaaaggatgtgcttcatcctctaacagtgtacactcccagagctgatattctggattttgactgtgcacatttcctctagttcatgtctgtagtccctatagaatgatctgtaataaaatagtatactggactgtgcatcaaagggatgtaaaattacagtattccaaaggttgaagttctgctgttttgttataatgcctgatacacatcttgaataaagtcttaacatttttcttttaaaaaaaaaat

SEQ ID NO: 351755 - DNA, 941 bp, Homo sapiens
aacgccgggcagggcggcgggcgcgctcagtctggcggcggctgccgtgagctgactgacgttccgggaacgccgcagcagcccgcgccgcccgcagcctagccgagccgcgccgcccgggcctcgcccgcccgcctgcccgccatggtgtcatggatcatctccaggctggtggtgcttatatttggcaccctttaccctgcgtattattcctacaaggctgtgaaatcaaaggacattaaggaatatgtcaaatggatgatgtactggattatatttgcacttttcaccacagcagagacattcacagacatcttcctttgttggtttccattctattatgaactaaaaatagcatttgtagcctggctgctgtctccctacacaaaaggctccagcctcctgtacaggaagtttgtacatcccacactatcttcaaaagaaaaggaaatcgatgattgtctggtccaagcaaaagaccgaagttacgatgcccttgtgcacttcgggaagcggggcttgaacgtggccgccacagcggctgtgatggctgcttccaagggacagggtgccttatcggagagactgcggagcttcagcatgcaggacctcaccaccatcaggggagacggcgcccctgctccctcgggccccccaccaccggggtctgggcgggccagcggcaaacacggccagcctaagatgtccaggagtgcttctgagagcgctagcagctcaggcaccgcctagaatccttcgatctcgcttcaggaagaaaagtacctcatcctcggccaccgaaaccacgtttgttcgatcatgatacttctgataaggatcatcaacgtaccagtttcgcctcttccagaaggacgtcgtcattttatctaagagtttactctgggttttattgcagaatacaaattccctcaatcgcttct

SEQ ID NO: 351756 - DNA, 336 bp, Homo sapiens
accgggtctcatccttcaaaagggcagtgttgctgagaacctaacagaacttgtgttttcatctctctctccaggtttccattctattatgaactaaaaatagcatttgtagcctggctgctgtctccctacacaaaaggctccagcctcctgtacaggaagtttgtacatcccacactatcttcaaaagaaaaggtaatatatgctgccatgtctttcattctttctagcaagtgagaaaataagtaataaataaaaagggatgatcttattgcaggagacttctcatttggctctcatttgcctccagcaagtcattcctcctaatcgtttttt

SEQ ID NO: 351757 - DNA, 3863 bp, Homo sapiens
aacgccgggcagggcggcgggcgcgctcagtctggcggcggctgccgtgagctgactgacgttccgggaacgccgcagcagcccgcgccgcccgcagcctagccgagccgcgccgcccgggcctcgcccgcccgcctgcccgccatggtgtcatggatcatctccaggctggtggtgcttatatttggcaccctttaccctgcgtattattcctacaaggctgtgaaatcaaaggacattaaggaatatgtcaaatggatgatgtactggattatatttgcacttttcaccacagcagagacattcacagacatcttcctttgttggtttccattctattatgaactaaaaatagcatttgtagcctggctgctgtctccctacacaaaaggctccagcctcctgtacaggaagtttgtacatcccacactatcttcaaaagaaaaggaaatcgatgattgtctggtccaagcaaaagaccgaagttacgatgcccttgtgcacttcgggaagcggggcttgaacgtggccgccacagcggctgtgatggctgcttccaagggacagggtgccttatcggagagactgcggagcttcagcatgcaggacctcaccaccatcaggggagacggcgcccctgctccctcgggccccccaccaccggggtctgggcgggccagcggcaaacacggccagcctaagatgtccaggagtgcttctgagagcgctagcagctcaggcaccgcctagaatccttcgatctcgcttcaggaagaaaagtacctcatcctcggccaccgaaaccacgtgagtgagatgagccaacagcaccggatccacagaatgtttcttctctgccttaaagagctattcactaataacatagaaatccgcaagctgggtgtgctttgagtgtgcagcctcacaaacatggccttttctctctccccttccacttttaaggatttatttttttcccccttttctttattttgctggggagaggctaaagggaaaggtagtaggggcgggggtggtgacctttaagtcttctgaggttggtaattttccacaattggattgtcattatagacagcagtgtgttttttagaaagataagagaatcacccctatgctgctgagatgtacatttgtaatttatctgttgcatacttagtttttagtcctgtaaatgcaaacacagcattttttacaactttctttgttcttggtacttatactttgaactatgatgtacatatttatggcttttggcttttaatataatggacttgcaagggctgccagaggttctgatatgtaagaaaactgcaaaaacaaatatagacaaatattttgattctagagaacgtctcagatgtgcttataaagcttccaaatacaactccagtaagacatccctttccctgcaggagtgtggtctatattctttagatagttgtttagtcaaaagaccagacaagttacaaactaagagaaacaatatttcacaacacagtaaagtgtgatgagaggtcaggggaacatcccagtaaaagagaagagtcacaggaagctcatctcctccctggattctggattaggagcttctgaatcttttccagggataggcaggtagctcactcttggtgcaatttcttgaggatgggaacatgtagagctgctggaaggagtaattctgtgcttgacaaaggacgatttctcctttatcgtgaccagtgctgccgatttcctgacagaggagcttacactctgagcaccttgttttagcgaactctagcaaaacttgtttagcttagcaaaaacaaacacacaaaaaactgagaactctgctgtttcagatatgccataacatacatctgaaacacatgtgtaacaatcaaaatggtgggctctagaatggttttggagctcgagatcttcatgggttagacttgctggtcagacccaggagcacctgtggctcacaccttctgttcccctcctggcctgtgcagaatgtaaacagcagactcatactcaatgggcactacaggccttatcagacgttttatacaagcctggattgcttagtaggggaataaggcattctctgagggggctttccacttagattgagaattttatttgaaaagaatctggtttaaatggcattgtggtccgaggtagctgctctccccactgagagctgagccgaaatataagaataatatatttgtgcttcgagttggtgtttctttcagtgtaatgcatgcagtggtcacaacccagttactcataatatttggattgtatttgttcgtagatatgcccagaagactagagaattagtgttatataccatatagaacttactgtcagtcaactataaacaggcccaattaaaaactgttccattactacgcaaacacatattagaggcctttgctgatgacacattagctggatcttagccaccccagaaagggtttgatttgaagctgattgttgccagatatgcatattggaatcccatctacccatagttcctctgaaggtgattttgtaatttgcaaaagggtataggaaaatatacctaaaagcgaatttgtggctgagaggataaacagaagctgtttgctcatgttctgtgccccacacccaccaatacctaaatctgttaaggaagacagaaaatgttttctttgtgctcattgagtagttccagacagaagaagaatatactctttaaaatgtatttacctgttagttggaagtacccagaattatcagaaacgaatgcaaaaaaaaaaaaaaaaaaaaaaagcttacacagcttcttagcaattttttttttttttgccgaaacaataaattgcctttagcagcagtttaaaatcctatcgtgaacaacctatattttcgccattttacaatggagagttgtgacaagtacaggttatcaagtttgcacttaactatgccaaaaaaagtttgaagcgctctattctcagacatgctgtattattacttctcattcaagattgaaaaatataaaggtatccaaactctgtcttaatgtaaatgtaactatttttccttcaagtgttgactagggagtcggtttctctcttaaagacactcactgtacaactgaaagcagctgtcatatttctggcaaaatgtgtttacgtatctgacaagttgtacatttgtgtatgaactgacataaaatgtgaaagcctgtaagtgtacatgtagtggtgtggtgttctgtctagaggatacaactgaatgtttttaatttgctgacttacagacacaggctgtttacaaaatgctagctggaaagtctgtaatgttcatgtcataacttttagttaattgccattgagcacctgttctgaggaggtgagatgtggacttgtgcttataaactggagagtttagtcataatccctcctggctttgtgtgaatagcttgctcactttgctggcctttgaaatgtgttctccgtgataagctatccatgtgtttgtgataagagtgcttgtcaaccatgaccatctttgagccttcctagtcctccacctggcacagtatttgaaatggcaaaggatgtgcttcatcctctaacagtgtacactcccagagctgatattctggattttgactgtgcacatttcctctagttcatgtctgtagtccctatagaatgatctgtaataaaatagtatactggactgtgcatcaaagggatgtaaaattacagtattccaaaggttgaagttctgctgttttgttataatgcctgatacacatcttgaataaagtcttaacatttttcttttaaaaaaaaaat

SEQ ID NO: 351758 - DNA, 2738 bp, Homo sapiens
tgaagaggcgggacacagacgacgattgggcgacgaaggactctatcgcggtcaactttcctcaggatctgattggctcgtcacggtcaggttcgctgccttgcaattggtctaaacgcggagtgggcgggacgaagtgccgccttgtccccggtccaagatggctgcgtccatggcgcggcgcttgtggcctttgctgactcgtcgggggttccggccccggggaggctgcatctccaacgatagtccaaggagaagtttcactacagagaaacgaaaccggaacctcctgtacgagtatgcgcgcgagggctacagcgcactccctcagctggacatagagcggttctgcgcatgcccagaagaggccgcacacgccctggagctccgcaagggggagctgcgctcggcggacctgcccgcgatcatctcgacatggcaggagctgaggcagctgcaggagcagatccggagcctggaggaagagaaggcagctgtgactgaggcagtgcgggccctgctggcaaaccaggacagtggtgaagtgcagcaggaccccaagtaccagggtctgcgggcacgtggccgggagatccggaaggagcttgttcacctgtaccccagggaggcccagcttgaggagcagttctacctgcaggcgctgaagctgcccaaccagacccacccagacgtgcccgtcggggatgagagccaggctcgagtgctccacatggtcggagacaagccagttttctccttccaacctcggggccacctggaaattggcgagaaactcgacatcatccgtcagaagcgcctgtcccacgtgtctggccaccggtcctattacctgcgcggggctggagccctcctgcagcacggcctggtcaacttcacattcaacaagcttctccgccggggcttcacccccatgacggtgccagaccttctccgcggagcagtgtttgaaggctgtgggatgacaccaaatgccaacccatcccaaatttacaacatcgaccctgcccgcttcaaagatctcaacctggctggaacagcggaggtggggcttgcaggctacttcatggaccacaccgtggccttcagggacctgccagtcaggatggtttgctccagcacctgctaccgggcagagacaaacacgggacaggaaccccgggggctgtatcgagtacaccacttcaccaaggtggagatgtttggggtgacaggccctgggctggagcagagctcacagctgctggaggagttcctgtcccttcagatggagatcttgacagagctgggcttgcacttccgggtcctggatatgcccacccaagaactgggcctccccgcctaccgcaagtttgacattgaggcctggatgccaggccgaggccgctttggagaggtcaccagtgcttccaactgcacagacttccagagccgccgcctccacatcatgttccagaccgaggctggggagctgcagtttgcccacacggtgaacgccaccgcctgtgctgtcccccgccttctcatcgcgctcctggagagtaaccagcagaaggacggctcagtgctcgtgccccctgccctccagtcctacctcggcactgatcggatcacagcccctacccacgtgcctctccagtacatcggccccaaccagccccggaagcctgggctgcctggccagcctgctgtaagctaagaacccacccacagcagccctcgggggtgtcactgcttcctggagttcaggagaccccggacacctgggacctgtgttgctgagcccgtcctgacatctgtgttcttcctgtcagctccacgcccgggcccctggaccacggggtccacctctcctctgtccttgctgcctcagagtcagtcactgaccctgttatcattgagggtcccagtgggaagcaggacgtctgggctttacggttctagggacaggagaagcagaggaagaggcttccatccctccttccttctttcctcctacagtgctgagcaaaaagtccccaataaatggtcaggacaaaaaaaaaaaaaaaaaaaaaaaaacaaaaaaaaaaactctccgagaggcctttcttattcgcggggtcgtgcgcgagaaaaagaagggttgatagagaaagtgggcccagtgtggtcctataagcggtgttccctcggaccaccgtttttttcttgttcaaccaagggcgtcaaaaacgcggcgcgggtccacccctaatagggaggagcccgaataactaactctcccgcaaaaaacccgcgggtctacaccccggcatcttaacggaacccgcgggaacaaagggcaaacacagccaccacaccagacaccaacgccaacacaaaccacaacacccgccacccgcaacgccggcgccaagagacaccgacacaccggcagcaacaaccacacacacagcccagcagacgagccagaacagagcagcacgacaaggcagctagccacacacagacaccaaccgcccccgagccccacgagacaccacacacggcaccgacggcgcaccgcgcagcacacaacagacacaagcccatccccggagcggaacgacacgtgagagcgggagggcagacgaggagagacgagggaaaagcacggggggcggcgacaggacgaggcgggcacgaggggcgggagagggaggcgcgccgaccaccgaagacggcgggcgaggaaagcg

SEQ ID NO: 351759 - DNA, 2065 bp, Homo sapiens
tgaagaggcgggacacagacgacgattgggcgacgaaggactctatcgcggtcaactttcctcaggatctgattggctcgtcacggtcaggttcgctgccttgcaattggtctaaacgcggagtgggcgggacgaagtgccgccttgtccccggtccaagatggctgcgtccatggcgcggcgcttgtggcctttgctgactcgtcgggggttccggccccggggaggctgcatctccaacgatagtccaaggagaagtttcactacagagaaacgaaaccggaacctcctgtacgagtatgcgcgcgagggctacagcgcactccctcagctggacatagagcggttctgcgcatgcccagaagaggccgcacacgccctggagctccgcaagggggagctgcgctcggcggacctgcccgcgatcatctcgacatggcaggagctgaggcagctgcaggagcagatccggagcctggaggaagagaaggcagctgtgactgaggcagtgcgggccctgctggcaaaccaggacagtggtgaagtgcagcaggaccccaagtaccagggtctgcgggcacgtggccgggagatccggaaggagcttgttcacctgtaccccagggaggcccagcttgaggagcagttctacctgcaggcgctgaagctgcccaaccagacccacccagacgtgcccgtcggggatgagagccaggctcgagtgctccacatggtcggagacaagccagttttctccttccaacctcggggccacctggaaattggcgagaaactcgacatcatccgtcagaagcgcctgtcccacgtgtctggccaccggtcctattacctgcgcggggctggagccctcctgcagcacggcctggtcaacttcacattcaacaagcttctccgccggggcttcacccccatgacggtgccagaccttctccgcggagcagtgtttgaaggctgtgggatgacaccaaatgccaacccatcccaaatttacaacatcgaccctgcccgcttcaaagatctcaacctggctggaacagcggaggtggggcttgcaggctacttcatggaccacaccgtggccttcagggacctgccagtcaggatggtttgctccagcacctgctaccgggcagagacaaacacgggacaggaaccccgggggctgtatcgagtacaccacttcaccaaggtggagatgtttggggtgacaggccctgggctggagcagagctcacagctgctggaggagttcctgtcccttcagatggagatcttgacagagctgggcttgcacttccgggtcctggatatgcccacccaagaactgggcctccccgcctaccgcaagtttgacattgaggcctggatgccaggccgaggccgctttggagaggtcaccagtgcttccaactgcacagacttccagagccgccgcctccacatcatgttccagaccgaggctggggagctgcagtttgcccacacggtgaacgccaccgcctgtgctgtcccccgccttctcatcgcgctcctggagagtaaccagcagaaggacggctcagtgctcgtgccccctgccctccagtcctacctcggcactgatcggatcacagcccctacccacgtgcctctccagtacatcggccccaaccagccccggaagcctgggctgcctggccagcctgctgtaagctaagaacccacccacagcagccctcgggggtgtcactgcttcctggagttcaggagaccccggacacctgggacctgtgttgctgagcccgtcctgacatctgtgttcttcctgtcagctccacgcccgggcccctggaccacggggtccacctctcctctgtcctgaccatttattggggactttttgctcagcactgtaggaggaaagaaggaaggagggatggaagcctcttcctctgcttctcctgtccctagaaccgtaaagcccagacgtcctgcttcccactgggaccctcaatgataacagggtcagtgactgactctgaggcagcaaggacagaggtcgagc

SEQ ID NO: 351760 - DNA, 1933 bp, Homo sapiens
tgaagaggcgggacacagacgacgattgggcgacgaaggactctatcgcggtcaactttcctcaggatctgattggctcgtcacggtcaggttcgctgccttgcaattggtctaaacgcggagtgggcgggacgaagtgccgccttgtccccggtccaagatggctgcgtccatggcgcggcgcttgtggcctttgctgactcgtcgggggttccggccccggggaggctgcatctccaacgatagtccaaggagaagtttcactacagagaaacgaaaccggaacctcctgtacgagtatgcgcgcgagggctacagcgcactccctcagctggacatagagcggttctgcgcatgcccagaagaggccgcacacgccctggagctccgcaagggggagctgcgctcggcggacctgcccgcgatcatctcgacatggcaggagctgaggcagctgcaggagcagatccggagcctggaggaagagaaggcagctgtgactgaggcagtgcgggccctgctggcaaaccaggacagtggtgaagtgcagcaggaccccaagtaccagggtctgcgggcacgtggccgggagatccggaaggagcttgttcacctgtaccccagggaggcccagcttgaggagcagttctacctgcaggcgctgaagctgcccaaccagacccacccagacgtgcccgtcggggatgagagccaggctcgagtgctccacatggtcggagacaagccagttttctccttccaacctcggggccacctggaaattggcgagaaactcgacatcatccgtcagaagcgcctgtcccacgtgtctggccaccggtcctattacctgcgcggggctggagccctcctgcagcacggcctggtcaacttcacattcaacaagcttctccgccggggcttcacccccatgacggtgccagaccttctccgcggagcagtgtttgaaggctgtgggatgacaccaaatgccaacccatcccaaatttacaacatcgaccctgcccgcttcaaagatctcaacctggctggaacagcggaggtggggcttgcaggctacttcatggaccacaccgtggccttcagggacctgccagtcaggatggtttgctccagcacctgctaccgggcagagacaaacacgggacaggaaccccgggggctgtatcgagtacaccacttcaccaaggtggagatgtttggggtgacaggccctgggctggagcagagctcacagctgctggaggagttcctgtcccttcagatggagatcttgacagagctgggcttgcacttccgggtcctggatatgcccacccaagaactgggcctccccgcctaccgcaagtttgacattgaggcctggatgccaggccgaggccgctttggagaggtcaccagtgcttccaactgcacagacttccagagccgccgcctccacatcatgttccagaccgaggctggggagctgcagtttgcccacacggtgaacgccaccgcctgtgctgtcccccgccttctcatcgcgctcctggagagtaaccagcagaaggacggctcagtgctcgtgccccctgccctccagtcctacctcggcactgatcggatcacagcccctacccacgtgcctctccagtacatcggccccaaccagccccggaagcctgggctgcctggccagcctgctctccacgcccgggcccctggaccacggggtccacctctcctctgtccttgctgcctcagagtcagtcactgaccctgttatcattgagggtcccagtgggaagcaggacgtctgggctttacggttctagggacaggagaagcagaggaagaggcttccatccctccttccttctttcctcctacagtgctgagcaaaaagtccccaataaatggtcaggacaaa

SEQ ID NO: 351761 - DNA, 2627 bp, Homo sapiens
tgaagaggcgggacacagacgacgattgggcgacgaaggactctatcgcggtcaactttcctcaggatctgattggctcgtcacggtcaggttcgctgccttgcaattggtctaaacgcggagtgggcgggacgaagtgccgccttgtccccggtccaagatggctgcgtccatggcgcggcgcttgtggcctttgctgactcgtcgggggttccggccccggggaggctgcatctccaacgatagtccaaggagaagtttcactacagagaaacgaaaccggaacctcctgtacgagtatgcgcgcgagggctacagcgcactccctcagctggacatagagcggttctgcgcatgcccagaagaggccgcacacgccctggagctccgcaagggggagctgcgctcggcggacctgcccgcgatcatctcgacatggcaggagctgaggcagctgcaggagcagatccggagcctggaggaagagaaggcagctgtgactgaggcagtgcgggccctgctggcaaaccaggacagtggtgaagtgcagcaggtactgtgaagagttgatgtcctatccagggttgggggtgggcagggaggataccctgccagtcacgattctactattgtaacagaaaacaactcaaacaggtttaaggggaaaaaaaaaataggctctattgatgcatgaaactaaaactggcttcaggtgcggctggatccaggtgctggctccatatttggtcctacgttcctcccattcccaggccagctttctctccttgtgtaagtaggaggcaaagtcaagcacgctttcctgatagttccagttaaagtcctggggctgattctcatgagttcagctgacatcaggtgcctgtctctgagccagtcattgtggccaaggcaatagaacgttctagttggccaggcctgattcttttccccacaaacctgccatgtggtggtaagggaagttctgcgaagacgttcaggatcctgggcctggagaagaggcatgaatgtccaccacaggggctctgccggtcaggatcaaggtcacactggatgagggagtcctgaccctctcccgggctgagcccacctgtgctgcccccaggaccccaagtaccagggtctgcgggcacgtggccgggagatccggaaggagcttgttcacctgtaccccagggaggcccagcttgaggagcagttctacctgcaggcgctgaagctgcccaaccagacccacccagacgtgcccgtcggggatgagagccaggctcgagtgctccacatggtcggagacaagccagttttctccttccaacctcggggccacctggaaattggcgagaaactcgacatcatccgtcagaagcgcctgtcccacgtgtctggccaccggtcctattacctgcgcggggctggagccctcctgcagcacggcctggtcaacttcacattcaacaagcttctccgccggggcttcacccccatgacggtgccagaccttctccgcggagcagtgtttgaaggctgtgggatgacaccaaatgccaacccatcccaaatttacaacatcgaccctgcccgcttcaaagatctcaacctggctggaacagcggaggtggggcttgcaggctacttcatggaccacaccgtggccttcagggacctgccagtcaggatggtttgctccagcacctgctaccgggcagagacaaacacgggacaggaaccccgggggctgtatcgagtacaccacttcaccaaggtggagatgtttggggtgacaggccctgggctggagcagagctcacagctgctggaggagttcctgtcccttcagatggagatcttgacagagctgggcttgcacttccgggtcctggatatgcccacccaagaactgggcctccccgcctaccgcaagtttgacattgaggcctggatgccaggccgaggccgctttggagaggtcaccagtgcttccaactgcacagacttccagagccgccgcctccacatcatgttccagaccgaggctggggagctgcagtttgcccacacggtgaacgccaccgcctgtgctgtcccccgccttctcatcgcgctcctggagagtaaccagcagaaggacggctcagtgctcgtgccccctgccctccagtcctacctcggcactgatcggatcacagcccctacccacgtgcctctccagtacatcggccccaaccagccccggaagcctgggctgcctggccagcctgctgtaagctaagaacccacccacagcagccctcgggggtgtcactgcttcctggagttcaggagaccccggacacctgggacctgtgttgctgagcccgtcctgacatctgtgttcttcctgtcagctccacgcccgggcccctggaccacggggtccacctctcctctgtccttgctgcctcagagtcagtcactgaccctgttatcattgagggtcccagtgggaagcaggacgtctgggctttacggttctagggacaggagaagcagaggaagaggcttccatccctccttccttctttcctcctacagtgctgagcaaaaagtccccaataaatggtcaggacaaa

SEQ ID NO: 351762 - DNA, 1297 bp, Homo sapiens
ctcgctgggcagttgggcagctctactggcccgagcagtggtaacggggctgctggccctcagcactttggccctgtatgtcgccgttgtcaatgtgcactcctaggcttggtgtctcagacattgatgtaccttttccctgcctcactccaggttttagtgaagtaaacagtatttggaaagttaaaaaaaaaaaaaaggggcggcgaaggctgtgggatgacaccaaatgccaacccatcccaaatttacaacatcgaccctgcccgcttcaaagatctcaacctggctggaacagcggaggtggggcttgcaggctacttcatggaccacaccgtggccttcagggacctgccagtcaggatggtttgctccagcacctgctaccgggcagagacaaacacgggacaggaaccccgggggctgtatcgagtacaccacttcaccaaggtggagatgtttggggtgacaggccctgggctggagcagagctcacagctgctggaggagttcctgtcccttcagatggagatcttgacagagctgggcttgcacttccgggtcctggatatgcccacccaagaactgggcctccccgcctaccgcaagtttgacattgaggcctggatgccaggccgaggccgctttggagaggtcaccagtgcttccaactgcacagacttccagagccgccgcctccacatcatgttccagaccgaggctggggagctgcagtttgcccacacggtgaacgccaccgcctgtgctgtcccccgccttctcatcgcgctcctggagagtaaccagcagaaggacggctcagtgctcgtgccccctgccctccagtcctacctcggcactgatcggatcacagcccctacccacgtgcctctccagtacatcggccccaaccagccccggaagcctgggctgcctggccagcctgctgtaagctaagaacccacccacagcagccctcgggggtgtcactgcttcctggagttcaggagaccccggacacctgggacctgtgttgctgagcccgtcctgacatctgtgttcttcctgtcagctccacgcccgggcccctggaccacggggtccacctctcctctgtccttgctgcctcagagtcagtcactgaccctgttatcattgagggtcccagtgggaagcaggacgtctgggctttacggttctagggacaggagaagcagaggaagaggcttccatccctccttccttctttcctcctacagtgctgagcaaaaagtccccaataaatggtcaggacaaa

SEQ ID NO: 351763 - DNA, 358 bp, Homo sapiens
aaacagaaacacagagttgcagagggacccagctaggcactgacagagcaggagactaagatcctctggccttgtttgacctttcaccattttttctcttccccaccctcgactttgtcaacctaatcacccaccctgtctcttttctaccaggcaaaccaggacagtggtgaagtgcagcaggtactgtgaagagttgatgtcctatccagggttgggggtgggcagggaggataccctgccagtcacgattctactattgtaacagaaaacaactcaaacaggtttaaggggaaaaaaaaaataggctctattgatgcatgaaactaaaactggcttcaggtgcggctggatccag

SEQ ID NO: 351764 - DNA, 2057 bp, Homo sapiens
tgaagaggcgggacacagacgacgattgggcgacgaaggactctatcgcggtcaactttcctcaggatctgattggctcgtcacggtcaggttcgctgccttgcaattggtctaaacgcggagtgggcgggacgaagtgccgccttgtccccggtccaagatggctgcgtccatggcgcggcgcttgtggcctttgctgactcgtcgggggttccggccccggggaggctgcatctccaacgatagtccaaggagaagtttcactacagagaaacgaaaccggaacctcctgtacgagtatgcgcgcgagggctacagcgcactccctcagctggacatagagcggttctgcgcatgcccagaagaggccgcacacgccctggagctccgcaagggggagctgcgctcggcggacctgcccgcgatcatctcgacatggcaggagctgaggcagctgcaggagcagatccggagcctggaggaagagaaggcagctgtgactgaggcagtgcgggccctgctggcaaaccaggacagtggtgaagtgcagcaggaccccaagtaccagggtctgcgggcacgtggccgggagatccggaaggagcttgttcacctgtaccccagggaggcccagcttgaggagcagttctacctgcaggcgctgaagctgcccaaccagacccacccagacgtgcccgtcggggatgagagccaggctcgagtgctccacatggtcggagacaagccagttttctccttccaacctcggggccacctggaaattggcgagaaactcgacatcatccgtcagaagcgcctgtcccacgtgtctggccaccggtcctattacctgcgcggggctggagccctcctgcagcacggcctggtcaacttcacattcaacaagcttctccgccggggcttcacccccatgacggtgccagaccttctccgcggagcagtgtttgaaggctgtgggatgacaccaaatgccaacccatcccaaatttacaacatcgaccctgcccgcttcaaagatctcaacctggctggaacagcggaggtggggcttgcaggctacttcatggaccacaccgtggccttcagggacctgccagtcaggatggtttgctccagcacctgctaccgggcagagacaaacacgggacaggaaccccgggggctgtatcgagtacaccacttcaccaaggtggagatgtttggggtgacaggccctgggctggagcagagctcacagctgctggaggagttcctgtcccttcagatggagatcttgacagagctgggcttgcacttccgggtcctggatatgcccacccaagaactgggcctccccgcctaccgcaagtttgacattgaggcctggatgccaggccgaggccgctttggagaggtcaccagtgcttccaactgcacagacttccagagccgccgcctccacatcatgttccagaccgaggctggggagctgcagtttgcccacacggtgaacgccaccgcctgtgctgtcccccgccttctcatcgcgctcctggagagtaaccagcagaaggacggctcagtgctcgtgccccctgccctccagtcctacctcggcactgatcggatcacagcccctacccacgtgcctctccagtacatcggccccaaccagccccggaagcctgggctgcctggccagcctgctgtaagctaagaacccacccacagcagccctcgggggtgtcactgcttcctggagttcaggagaccccggacacctgggacctgtgttgctgagcccgtcctgacatctgtgttcttcctgtcagctccacgcccgggcccctggaccacggggtccacctctcctctgtccttgctgcctcagagtcagtcactgaccctgttatcattgagggtcccagtgggaagcaggacgtctgggctttacggttctagggacaggagaagcagaggaagaggcttccatccctccttccttctttcctcctacagtgctgagcaaaaagtccccaataaatggtcaggacaaa

SEQ ID NO: 351765 - DNA, 2917 bp, Homo sapiens
tgaagaggcgggacacagacgacgattgggcgacgaaggactctatcgcggtcaactttcctcaggatctgattggctcgtcacggtcaggttcgctgccttgcaattggtctaaacgcggagtgggcgggacgaagtgccgccttgtccccggtccaagatggctgcgtccatggcgcggcgcttgtggcctttgctgactcgtcgggggttccggccccggggaggctgcatctccaacgatagtccaaggagaagtttcactacagagaaacgaaaccggaacctcctgtacgagtatgcgcgcgagggctacagcgcactccctcagctggacatagagcggttctgcgcatgcccagaagaggccgcacacgccctggagctccgcaagggggagctgcgctcggcggacctgcccgcgatcatctcgacatggcaggagctgaggcagctgcaggagcagatccggagcctggaggaagagaaggcagctgtgactgaggcagtgcgggccctgctggcaaaccaggacagtggtgaagtgcagcaggaccccaagtaccagggtctgcgggcacgtggccgggagatccggaaggagcttgttcacctgtaccccagggaggcccagcttgaggagcagttctacctgcaggcgctgaagctgcccaaccagacccacccagacgtgcccgtcggggatgagagccaggctcgagtgctccacatggtcggagacaagccagttttctccttccaacctcggggccacctggaaattggcgagaaactcgacatcatccgtcagaagcgcctgtcccacgtgtctggccaccggtcctattacctgcgcggggctggagccctcctgcagcacggcctggtcaacttcacattcaacaagcttctccgccggggcttcacccccatgacggtgccagaccttctccgcggagcagtgtttgaaggctgtgggatgacaccaaatgccaacccatcccaaatttacaacatcgaccctgcccgcttcaaagatctcaacctggctggaacagcggaggtggggcttgcaggctacttcatggaccacaccgtggccttcagggacctgccagtcaggatggtttgctccagcacctgctaccgggcagagacaaacacgggacaggaaccccgggggctgtatcgagtacaccacttcaccaaggtggagatgtttggggtgacaggccctgggctggagcagagctcacagctgctggaggagttcctgtcccttcagatggagatcttgacagagctgggcttgcacttccgggtcctggatatgcccacccaagaactgggcctccccgcctaccgcaagtttgacattgaggcctggatgccaggccgaggccgctttggagaggtcaccagtgcttccaactgcacagacttccagagccgccgcctccacatcatgttccagaccgaggctggggagctgcagtttgcccacacggtgaacgccaccgcctgtgctgtcccccgccttctcatcgcgctcctggagagtaaccagcagaaggacggctcagtgctcgtgccccctgccctccagtcctacctcggcactgatcggatcacagcccctacccacgtgcctctccagtacatcggccccaaccagccccggaagcctgggctgcctggccagcctgctgtaagctaagaacccacccacagcagccctcgggggtgtcactgcttcctggagttcaggagaccccggacacctgggacctgtgttgctgagcccgtcctgacatctgtgttcttcctgtcagctccacgcccgggcccctggaccacggggtccacctctcctctgtccttgctgcctcagagtcagtcactgaccctgttatcattgagggtcccagtgggaagcaggacgtctgggctttacggttctagggacaggagaagcagaggaagaggcttccatccctccttccttctttcctcctacagtgctgagcaaaaagtccccaataaatggtcaggacaaaaaaaaaaaaaaaaaaaaaaaaacaaaaaaaaccccggggcgccctctattattgcgcgggggcgcgggacaaaaggggtgtaagaaatgggcgccctgtggcgccaaaaacgcgtgtgtctcccgtggccccaagtttctccttgtgtgcaccaaggggggggaaaaatccgcgcgcgcgggtgtccccccctataagaggaggggcgcgggatataaaaaattcgccgagataacaccccgagtgtgtgacaccccgcgcgcgtttatataggtattcgggcgagcggaaaagaaccccccaacacgcaaaccaagacccccggcggcgccaacaaaggagagagcaaccgcgcgcgccccgaccaccacccgccgcggaacgcgggcgcgcacacagcgcgacaacactagtgcgggcagaccacaacacacaccaacgagtaggagcacccaggcgggagacaaacacacgcgcaggaaccaaacaggagggacacaaacaacacaaaaacagacacaaccagcgaatgaacaacgcccaacacacccgaagcgcaaacaaaagacaaacaggacacgcgcgaatacaacaccgaacatgcaacccacacagcaatcttattataccccggacaagggggacaaacgagaggagcaagaggcaggcggaagaggcgacggagcacaaagaagccagcaccgcgaacagagggagcaggacgacggcagacgaaagagagagaagaggcgagcggagcgataagaagaggaggggaggaccaagcacaaaaacgaagagcgaaagcacggcggcggcgacgacgaccgggccggccggaagcaaaaggaacgcgcaag

SEQ ID NO: 351766 - DNA, 2187 bp, Homo sapiens
tgaagaggcgggacacagacgacgattgggcgacgaaggactctatcgcggtcaactttcctcaggatctgattggctcgtcacggtcaggttcgctgccttgcaattggtctaaacgcggagtgggcgggacgaagtgccgccttgtccccggtccaagatggctgcgtccatggcgcggcgcttgtggcctttgctgactcgtcgggggttccggccccggggaggctgcatctccaacgatagtccaaggagaagtttcactacagagaaacgaaaccggaacctcctgtacgagtatgcgcgcgagggctacagcgcactccctcagctggacatagagcggttctgcgcatgcccagaagaggccgcacacgccctggagctccgcaagggggagctgcgctcggcggacctgcccgcgatcatctcgacatggcaggagctgaggcagctgcaggagcagatccggagcctggaggaagagaaggcagctgtgactgaggcagtgcgggccctgctggcaaaccaggacagtggtgaagtgcagcaggaccccaagtaccagggtctgcgggcacgtggccgggagatccggaaggagcttgttcacctgtaccccagggaggcccagcttgaggagcagttctacctgcaggcgctgaagctgcccaaccagacccacccagacgtgcccgtcggggatgagagccaggctcgagtgctccacatggtcggagacaagccagttttctccttccaacctcggggccacctggaaattggcgagaaactcgacatcatccgtcagaagcgcctgtcccacgtgtctggccaccggtcctattacctgcgcggggctggagccctcctgcagcacggcctggtcaacttcacattcaacaagcttctccgccggggcttcacccccatgacggtgccagaccttctccgcggagcagtgtttgaaggctgtgggatgacaccaaatgccaacccatcccaaatttacaacatcgaccctgcccgcttcaaagatctcaacctggctggaacagcggaggtggggcttgcaggctacttcatggaccacaccgtggccttcagggacctgccagtcaggatggtttgctccagcacctgctaccgggcagagacaaacacgggacaggaaccccgggggctgtatcgagtacaccacttcaccaaggtggagatgtttggggtgacaggccctgggctggagcagagctcacagctgctggaggagttcctgtcccttcagatggagatcttgacagagctgggcttgcacttccgggtcctggatatgcccacccaagaactgggcctccccgcctaccgcaagtttgacattgaggcctggatgccaggccgaggccgctttggagaggtcaccagtgcttccaactgcacagacttccagagccgccgcctccacatcatgttccagaccgaggctggggagctgcagtttgcccacacggtgaggcccgcacagcctcctgcccgcgtgccctcgcccgcagcctctgccgccctagacccacccaccttggctcctccccgggctcagcttggggtgggcgccagttccgagcatggctgtctcacaggtgaacgccaccgcctgtgctgtcccccgccttctcatcgcgctcctggagagtaaccagcagaaggacggctcagtgctcgtgccccctgccctccagtcctacctcggcactgatcggatcacagcccctacccacgtgcctctccagtacatcggccccaaccagccccggaagcctgggctgcctggccagcctgctgtaagctaagaacccacccacagcagccctcgggggtgtcactgcttcctggagttcaggagaccccggacacctgggacctgtgttgctgagcccgtcctgacatctgtgttcttcctgtcagctccacgcccgggcccctggaccacggggtccacctctcctctgtccttgctgcctcagagtcagtcactgaccctgttatcattgagggtcccagtgggaagcaggacgtctgggctttacggttctagggacaggagaagcagaggaagaggcttccatccctccttccttctttcctcctacagtgctgagcaaaaagtccccaataaatggtcaggacaaa

SEQ ID NO: 351767 - DNA, 2614 bp, Homo sapiens
tgaagaggcgggacacagacgacgattgggcgacgaaggactctatcgcggtcaactttcctcaggatctgattggctcgtcacggtcaggttcgctgccttgcaattggtctaaacgcggagtgggcgggacgaagtgccgccttgtccccggtccaagatggctgcgtccatggcgcggcgcttgtggcctttgctgactcgtcgggggttccggccccggggaggctgcatctccaacgatagtccaaggagaagtttcactacagagaaacgaaaccggaacctcctgtacgagtatgcgcgcgagggctacagcgcactccctcagctggacatagagcggttctgcgcatgcccagaagaggccgcacacgccctggagctccgcaagggggagctgcgctcggcggacctgcccgcgatcatctcgacatggcaggagctgaggcagctgcaggagcagatccggagcctggaggaagagaaggcagctgtgactgaggcagtgcgggccctgctggcaaaccaggacagtggtgaagtgcagcaggaccccaagtaccagggtctgcgggcacgtggccgggagatccggaaggagcttgttcacctgtaccccagggaggcccagcttgaggagcagttctacctgcaggcgctgaagctgcccaaccagacccacccagacgtgcccgtcggggatgagagccaggctcgagtgctccacatggtcggagacaagccagttttctccttccaacctcggggccacctggaaattggcgagaaactcgacatcatccgtcagaagcgcctgtcccacgtgtctggccaccggtcctattacctgcgcggggctggagccctcctgcagcacggcctggtcaacttcacattcaacaagcttctccgccggggcttcacccccatgacggtgccagaccttctccgcggagcagtgtttgaaggctgtgggatgacaccaaatgccaacccatcccaaatttacaacatcgaccctgcccgcttcaaagatctcaacctggctggaacagcggaggtggggcttgcaggctacttcatggaccacaccgtggccttcagggacctgccagtcaggatggtttgctccagcacctgctaccgggcagagacaaacacgggacaggaaccccgggggctgtatcgagtacaccacttcaccaaggtggagatgtttggggtgacaggccctgggctggagcagagctcacagctgctggaggagttcctgtcccttcagatggagatcttgacagagctgggcttgcacttccgggtcctggatatgcccacccaagaactgggcctccccgcctaccgcaagtttgacattgaggcctggatgccaggccgaggccgctttggagaggtcaccagtgcttccaactgcacagacttccagagccgccgcctccacatcatgttccagaccgaggctggggagctgcagtttgcccacacggtgaacgccaccgcctgtgctgtcccccgccttctcatcgcgctcctggagagtaaccagcagaaggacggctcagtgctcgtgccccctgccctccagtcctacctcggcactgatcggatcacagcccctacccacgtgcctctccagtacatcggccccaaccagccccggaagcctgggctgcctggccagcctgctctccacgcccgggcccctggaccacggggtccacctctcctctgtccttgctgcctcagagtcagtcactgaccctgttatcattgagggtcccagtgggaagcaggacgtctgggctttacggttctagggacaggagaagcagaggaagaggcttccatccctccttccttctttcctcctacagtgctgagcaaaaagtccccaataaatggtcaggacaaaaaaaaaaaaaaaaaaaaaaaaacaaaaaaaaaaactctccgagaggcctttcttattcgcggggtcgtgcgcgagaaaaagaagggttgatagagaaagtgggcccagtgtggtcctataagcggtgttccctcggaccaccgtttttttcttgttcaaccaagggcgtcaaaaacgcggcgcgggtccacccctaatagggaggagcccgaataactaactctcccgcaaaaaacccgcgggtctacaccccggcatcttaacggaacccgcgggaacaaagggcaaacacagccaccacaccagacaccaacgccaacacaaaccacaacacccgccacccgcaacgccggcgccaagagacaccgacacaccggcagcaacaaccacacacacagcccagcagacgagccagaacagagcagcacgacaaggcagctagccacacacagacaccaaccgcccccgagccccacgagacaccacacacggcaccgacggcgcaccgcgcagcacacaacagacacaagcccatccccggagcggaacgacacgtgagagcgggagggcagacgaggagagacgagggaaaagcacggggggcggcgacaggacgaggcgggcacgaggggcgggagagggaggcgcgccgaccaccgaagacggcgggcgaggaaagcg

SEQ ID NO: 351768 - DNA, 1988 bp, Homo sapiens
tgaagaggcgggacacagacgacgattgggcgacgaaggactctatcgcggtcaactttcctcaggatctgattggctcgtcacggtcaggttcgctgccttgcaattggtctaaacgcggagtgggcgggacgaagtgccgccttgtccccggtccaagatggctgcgtccatggcgcggcgcttgtggcctttgctgactcgtcgggggttccggccccggggaggctgcatctccaacgatagtccaaggagaagtttcactacagagaaacgaaaccggaacctcctgtacgagtatgcgcgcgagggctacagcgcactccctcagctggacatagagcggttctgcgcatgcccagaagaggccgcacacgccctggagctccgcaagggggagctgcgctcggcggacctgcccgcgatcatctcgacatggcaggagctgaggcagctgcaggagcagatccggagcctggaggaagagaaggcagctgtgactgaggcagtgcgggccctgctgatccggaaggagcttgttcacctgtaccccagggaggcccagcttgaggagcagttctacctgcaggcgctgaagctgcccaaccagacccacccagacgtgcccgtcggggatgagagccaggctcgagtgctccacatggtcggagacaagccagttttctccttccaacctcggggccacctggaaattggcgagaaactcgacatcatccgtcagaagcgcctgtcccacgtgtctggccaccggtcctattacctgcgcggggctggagccctcctgcagcacggcctggtcaacttcacattcaacaagcttctccgccggggcttcacccccatgacggtgccagaccttctccgcggagcagtgtttgaaggctgtgggatgacaccaaatgccaacccatcccaaatttacaacatcgaccctgcccgcttcaaagatctcaacctggctggaacagcggaggtggggcttgcaggctacttcatggaccacaccgtggccttcagggacctgccagtcaggatggtttgctccagcacctgctaccgggcagagacaaacacgggacaggaaccccgggggctgtatcgagtacaccacttcaccaaggtggagatgtttggggtgacaggccctgggctggagcagagctcacagctgctggaggagttcctgtcccttcagatggagatcttgacagagctgggcttgcacttccgggtcctggatatgcccacccaagaactgggcctccccgcctaccgcaagtttgacattgaggcctggatgccaggccgaggccgctttggagaggtcaccagtgcttccaactgcacagacttccagagccgccgcctccacatcatgttccagaccgaggctggggagctgcagtttgcccacacggtgaacgccaccgcctgtgctgtcccccgccttctcatcgcgctcctggagagtaaccagcagaaggacggctcagtgctcgtgccccctgccctccagtcctacctcggcactgatcggatcacagcccctacccacgtgcctctccagtacatcggccccaaccagccccggaagcctgggctgcctggccagcctgctgtaagctaagaacccacccacagcagccctcgggggtgtcactgcttcctggagttcaggagaccccggacacctgggacctgtgttgctgagcccgtcctgacatctgtgttcttcctgtcagctccacgcccgggcccctggaccacggggtccacctctcctctgtccttgctgcctcagagtcagtcactgaccctgttatcattgagggtcccagtgggaagcaggacgtctgggctttacggttctagggacaggagaagcagaggaagaggcttccatccctccttccttctttcctcctacagtgctgagcaaaaagtccccaataaatggtcaggacaaa

SEQ ID NO: 351769 - DNA, 890 bp, Homo sapiens
ccaagagctcagagcctcctgactcctgtgccctctgtcccaggtggagatgtttggggtgacaggccctgggctggagcagagctcacagctgctggaggagttcctgtcccttcagatggagatcttgacagagctgggcttgcacttccgggtcctggatatgcccacccaagaactgggcctccccgcctaccgcaagtttgacattgaggcctggatgccaggccgaggccgctttggagaggtcaccagtgcttccaactgcacagacttccagagccgccgcctccacatcatgttccagaccgaggctggggagctgcagtttgcccacacggtgaacgccaccgcctgtgctgtcccccgccttctcatcgcgctcctggagagtaaccagcagaaggacggctcagtgctcgtgccccctgccctccagtcctacctcggcactgatcggatcacagcccctacccacgtgcctctccagtacatcggccccaaccagccccggaagcctgggctgcctggccagcctgctgtaagctaagaacccacccacagcagccctcgggggtgtcactgcttcctggagttcaggagaccccggacacctgggacctgtgttgctgagcccgtcctgacatctgtgttcttcctgtcagctccacgcccgggcccctggaccacggggtccacctctcctctgtccttgctgcctcagagtcagtcactgaccctgttatcattgagggtcccagtgggaagcaggacgtctgggctttacggttctagggacaggagaagcagaggaagaggcttccatccctccttccttctttcctcctacagtgctgagcaaaaagtccccaataaatggtcaggacaaa

SEQ ID NO: 351770 - DNA, 347 bp, Homo sapiens
tcaataccaagcaggaagagggggcagggagagagagcatgagtggtagtctgtccttccacaagctgctgacagatggaaattaaagtggtctggggagagacattgggggaggaggcagtggcggcagcagaagtacagcaaggcagcagaattgggagcagccctggctgggggccaaagccagctcaccctgacagccagcttaaaatcagggagaatttggagggagggggtggcaacagcaccccacccagactacagaggccaggcccaaagcctctccctggggtggggcaaaagaaggctaagggcaggccccatgagctaaagagatgtgaaatgcc

SEQ ID NO: 351771 - DNA, 1291 bp, Homo sapiens
aaagttcatccccccagaatgaaaatgaggacatttgagaaggtgatttaaggtgtggacatttgagaaggtgtcctatcaaattagtaaaccaaaggaaaagtactgaatagattaatccaaaacacttactgttttttaaacgaagaggatttcaccttgacagaaaaacaacttttattcaatatgtatttcctgaaattaaagagacaagtacagactgaaaggaaaatagattcgtaaataagctacgtcaactctatcctgctgaggatagctcagtgatgttaaatcctttacaaatccctggttgtcttcctacagacaagactgctttttgatgggactgatattaagagaaataggacctttggggcattcaactccttgataaaacttaaaagtatcggcatgagtggcttaacagaggaaataaagaagttttcaactaaatccaaaagtgcggtcattttctttactgctgttattttaaaaacctcttcataaccattgaaaaagaatcgacaactattttaaaagattaaagaaaggcagatgtctgcaaataattcccctccatcagcccagaagtctgtattacccacagctattcctgctgtgcttccagctgcttctccgtgttcaagtcctaagacgggactctctgcccgactctctaatggaagcttcagtgcaccatcactcaccaactccagaggctcagtgcatacagtttcatttctactgcaaattggcctcacacgggagagtgttaccattgaagcccaggaactgtctttatctgctgtcaaggatcttgtgtgctccatagtttatcaaaagtttccagagtgtggattctttggcatgtatgacaaaattcttctctttcgccatgacatgaactcagaaaacattttgcagctgattacctcagcagatgaaatacatgaaggagacctagtggaagtggttctttcaggtaagtaagtggctttttagagtgattgccttttcccctcaaagagcctaattttctgtactaaatgctgcaattcgattatatttagtctttgtattattgttacttaatttctttcatctctaataatggtcaccatatgatttttcctttcaggcatgttatatcaccattaagaaagaaaaatacctggcaacggtggctcacacctgtaagcccagcactttgggaagctgaggcgggaggattgcttatctcaggagtttgagaccagcctgagcagcatacctcgtctctactaaaaattta

SEQ ID NO: 351772 - DNA, 6360 bp, Homo sapiens
aaagttcatccccccagaatgaaaatgaggacatttgagaaggtgatttaaggtgtggacatttgagaaggtgtcctatcaaattagtaaaccaaaggaaaagtactgaatagattaatccaaaacacttactgttttttaaacgaagaggatttcaccttgacagaaaaacaacttttattcaatatgtatttcctgaaattaaagagacaagtacagactgaaaggaaaatagattcgtaaataagctacgtcaactctatcctgctgaggatagctcagtgatgttaaatcctttacaaatccctggttgtcttcctacagacaagactgctttttgatgggactgatattaagagaaataggacctttggggcattcaactccttgataaaacttaaaagtatcggcatgagtggcttaacagaggaaataaagaagttttcaactaaatccaaaagtgcggtcattttctttactgctgttattttaaaaacctcttcataaccattgaaaaagaatcgacaactattttaaaagattaaagaaaggcagatgtctgcaaataattcccctccatcagcccagaagtctgtattacccacagctattcctgctgtgcttccagctgcttctccgtgttcaagtcctaagacgggactctctgcccgactctctaatggaagcttcagtgcaccatcactcaccaactccagaggctcagtgcatacagtttcatttctactgcaaattggcctcacacgggagagtgttaccattgaagcccaggaactgtctttatctgctgtcaaggatcttgtgtgctccatagtttatcaaaagtttccagagtgtggattctttggcatgtatgacaaaattcttctctttcgccatgacatgaactcagaaaacattttgcagctgattacctcagcagatgaaatacatgaaggagacctagtggaagtggttctttcagctttagccacagtagaagacttccagattcgtccacatactctctatgtacattcttacaaagctcctactttctgtgattactgtggtgagatgctgtggggattggtacgtcaaggactgaaatgtgaaggctgtggattaaattaccataaacgatgtgccttcaagattccaaataactgtagtggagtaagaaagagacgtctgtcaaatgtatctttaccaggacccggcctctcagttccaagacccctacagcctgaatatgtagcccttcccagtgaagagtcacatgtccaccaggaaccaagtaagagaattccttcttggagtggtcgcccaatctggatggaaaagatggtaatgtgcagagtgaaagttccacacacatttgctgttcactcttacacccgtcccacgatatgtcagtactgcaagcggttactgaaaggcctctttcgccaaggaatgcagtgtaaagattgcaaattcaactgccataaacgctgtgcatcaaaagtaccaagagactgccttggagaggttactttcaatggagaaccttccagtctgggaacagatacagatataccaatggatattgacaataatgacataaatagtgatagtagtcggggtttggatgacacagaagagccatcacccccagaagataagatgttcttcttggatccatctgatctcgatgtggaaagagatgaagaagccgttaaaacaatcagtccatcaacaagcaataatattccgctaatgagggttgtacaatccatcaagcacacaaagaggaagagcagcacaatggtgaaggaagggtggatggtccattacaccagcagggataacctgagaaagaggcattattggagacttgacagcaaatgtctaacattatttcagaatgaatctggatcaaagtattataaggaaattccactttcagaaattctccgcatatcttcaccacgagatttcacaaacatttcacaaggcagcaatccacactgttttgaaatcattactgatactatggtatacttcgttggtgagaacaatggggacagctctcataatcctgttcttgctgccactggagttggacttgatgtagcacagagctgggaaaaagcaattcgccaagccctcatgcctgttactcctcaagcaagtgtttgcacttctccagggcaagggaaagatcacaaagatttgtctacaagtatctctgtatctaattgtcagattcaggagaatgtggatatcagtactgtttaccagatctttgcagatgaggtgcttggttcaggccagtttggcatcgtttatggaggaaaacatagaaagactgggagggatgtggctattaaagtaattgataagatgagattccccacaaaacaagaaagtcaactccgtaatgaagtggctattttacagaatttgcaccatcctgggattgtaaacctggaatgtatgtttgaaaccccagaacgagtctttgtagtaatggaaaagctgcatggagatatgttggaaatgattctatccagtgagaaaagtcggcttccagaacgaattactaaattcatggtcacacagatacttgttgctttgaggaatctgcattttaagaatattgtgcactgtgatttaaagccagaaaatgtgctgcttgcatcagcagagccatttcctcaggtgaagctgtgtgactttggatttgcacgcatcattggtgaaaagtcattcaggagatctgtggtaggaactccagcatacttagcccctgaagttctccggagcaaaggttacaaccgttccctagatatgtggtcagtgggagttatcatctatgtgagcctcagtggcacatttccttttaatgaggatgaagatataaatgaccaaatccaaaatgctgcatttatgtacccaccaaatccatggagagaaatttctggtgaagcaattgatctgataaacaatctgcttcaagtgaagatgagaaaacgttacagtgttgacaaatctcttagtcatccctggctacaggactatcagacttggcttgaccttagagaatttgaaactcgcattggagaacgttacattacacatgaaagtgatgatgctcgctgggaaatacatgcatacacacataaccttgtatacccaaagcacttcattatggctcctaatccagatgatatggaagaagatccttaatcactgagctaacctaaataaggaaggatttcattttatggactgatattttgctgtgtaacttgttctttgtagattgtcatctgcagtgctgcaaagatatgaagaaatatgataacgaataagtgacaccagtactgtagttcataatgagtaggtacaggcgggaaactgaataataagaagtcataatggaatcaaggtgaagctttttataaacttttttagcctaagcaataactggttttgtattttttcttaatccttcactttaatacaataggctcacttaatttgtcttcccatttctctttatatatatatatatatataaatataaatatatgtttgtttgtttgtttttttaaggaaaaacaagtcaagctagcatccagttactatatagcttggctaaattatacaagacttacaagattgattactcgacaggcttgtatttaagagataactgtgaggttaccattatgtgatgttactataaggacttttaacattggtttaacaaaccatagaggcattgaagggtttttcttagatgcctagaaaaagcacactgggctgttttacctttcttttttaggtcaatcaagactccaaaatagtgattcctaacctttttggagttgctctgctactctgaatatgttctatacagcataaggattgtcaccttctgtgtgttgcaacagcttctaagataattagggacaaatgatgttacaaaaggaagagtactgctggtctaagtgctgagttgtatgtctttgcatagctccactctgctgctaaatatgcatgttctgactgacaccatcttgatgccagtactggattccagcattcagcaggtgcagatctcggctttacacaatttatctttacctagggttcagtcagtaatttctgctttttagcagggccagtgcagggtcagttaatgctacagttactgtatagcaaacagtatccttttttctccttcccctagcctattgggctttgcagatatctggagtgttttaaagtcaattattttaagcagtttgaggggatgtgtaggagtggagcatgaaacagtttataaggctggggctgtattatcagcacagcaaattaaagaatgaaagaagtacttctttttacatttcagctccagcagccagctatttaaaaaatatttttaaatatcttccccaaagtttaagatgtgggaccatctacttgtaagaaacagtggcttatttcttcatttctcagtaatcattgtaaacctttttttttttcttctccactctaacaaaagtaaaagaacaaaacttttgctgaggtcttggactccactacttgttagttatgttggcctggacagatggcaggtctgtcggcagttcctcagtctgtaaaatgaagattatcattcttgcctctccctttgtcacagtgttgtcgtgaagatcagatatgtatgaatgcagtcaaataaactaaaaactaggaaagtgttaactatcgttgcccaccgaatttgaggtagcaaaaaaaaaaaagaatgttctggtacatgaacagactgagaaggcctttcgacatccctgaagctagtctcctgtctagactaaaaatatccttgaaagaatagtagcaaacagtatgcagtactcctgtgttctaagttcttttatgttttagtttaccctcacagcagccatagtgttaagtcattatgagcttcatcttaaagataagaaaactgaggcaaggggagattaacttactgccaaatttcaaacagttagtagtatttgagaccagtagtatggctctaatcttacccttagccctcccaaccattatgctgtactatctacccataaatacctccaggaaacattcccctcttggtaatttgtccttctatagaagcttcaaagattaaatcaaattaattttcaaaaaaaatttttttttagaaatgttattttccctgtgatagaggatgacttcccagtttcaccaaagtctgtttatatcaacacacacaaaatggaataattctgagtcactaggcaatcaatctactgtggttttactatgtaaggtgaaaattaactggaacgatgtttgtttgctatacttacatagtcaaactttacaagccatgaaattaattgcactctttgtatttgttgttaaatgcctaagaagttttctaaaaattttgtaaaggcactgtcagagaatctggagttgaatgattattccagatactgtataacctgcataactttttgtctttaagtcgtgtttgtaaaagaagtaattgctagaaacatttgataatgtacaaagtagtctataatgactgttcagtacatttttaatatttttttggttatatccaactttttgtaaatatactggaagcttgataataaaatgtatttcctatcaccatacttttccatgtgaaaacctgagcctatttctagtataagtatccaaagaaaagttttacctggttgtgttattttaccagaccttggtaaaagaactattttggaaacagtatttgtaaatggaactaatgctatatttaaaaacactgatttttttttaacctgccaaaaataaaaaaaagctcattttataattttctactaaatttgagttgattatctggaggtctcatttcttgtaaagtataactttttcagaaactaccaccaaattatccaactgttatactaccagaaggctttaaaaagttaaaaacctaatatcaaactttctaggtgttaagatataaggcattgcctgactctagccccttaattataaaaactttaacatatctgagaggagccaactatggacgtttaactcatctttcaaaaattctcccaaccaagtctttgaaaaaagaaaacaaatacaggaatctagaatgagaacaactaggagtggcccgaggctgggcagcatctgaaaagcaaggcctccgtcttcctttactttagtgcaggggtgtctaatcttttaggtcctagccacattggaagaactgtcttgtgccacacataaaatacaccaccactaatgatagctaatgag

SEQ ID NO: 351773 - DNA, 4365 bp, Homo sapiens
catacagtatttccatcttgacagagtctctgaaggactaggtcagggtaattaactatcattgatttaacaaggtagattacttttcagcaacaagttcattcaaattttctcctgtttagataatgcagctgactttattaggggcaaatattatgtatggaggggaaaacaattttttcctaaattaaaggtgagtgaaggagtgtggagaaagaacaaaaatgagccaaaaagaaaattcaagagtaaatacatataaatttcagtctgtggacaactccctaataaagctgtcagtttgcttcattcgttcctcttctttttttcttaataggaaaacatagaaagactgggagggatgtggctattaaagtaattgataagatgagattccccacaaaacaagaaagtcaactccgtaatgaagtggctattttacagaatttgcaccatcctgggattgtaaacctggaatgtatgtttgaaaccccagaacgagtctttgtagtaatggaaaagctgcatggagatatgttggaaatgattctatccagtgagaaaagtcggcttccagaacgaattactaaattcatggtcacacagatacttgttgctttgaggaatctgcattttaagaatattgtgcactgtgatttaaagccagaaaatgtgctgcttgcatcagcagagccatttcctcaggtgaagctgtgtgactttggatttgcacgcatcattggtgaaaagtcattcaggagatctgtggtaggaactccagcatacttagcccctgaagttctccggagcaaaggttacaaccgttccctagatatgtggtcagtgggagttatcatctatgtgagcctcagtggcacatttccttttaatgaggatgaagatataaatgaccaaatccaaaatgctgcatttatgtacccaccaaatccatggagagaaatttctggtgaagcaattgatctgataaacaatctgcttcaagtgaagatgagaaaacgttacagtgttgacaaatctcttagtcatccctggctacaggactatcagacttggcttgaccttagagaatttgaaactcgcattggagaacgttacattacacatgaaagtgatgatgctcgctgggaaatacatgcatacacacataaccttgtatacccaaagcacttcattatggctcctaatccagatgatatggaagaagatccttaatcactgagctaacctaaataaggaaggatttcattttatggactgatattttgctgtgtaacttgttctttgtagattgtcatctgcagtgctgcaaagatatgaagaaatatgataacgaataagtgacaccagtactgtagttcataatgagtaggtacaggcgggaaactgaataataagaagtcataatggaatcaaggtgaagctttttataaacttttttagcctaagcaataactggttttgtattttttcttaatccttcactttaatacaataggctcacttaatttgtcttcccatttctctttatatatatatatatatataaatataaatatatgtttgtttgtttgtttttttaaggaaaaacaagtcaagctagcatccagttactatatagcttggctaaattatacaagacttacaagattgattactcgacaggcttgtatttaagagataactgtgaggttaccattatgtgatgttactataaggacttttaacattggtttaacaaaccatagaggcattgaagggtttttcttagatgcctagaaaaagcacactgggctgttttacctttcttttttaggtcaatcaagactccaaaatagtgattcctaacctttttggagttgctctgctactctgaatatgttctatacagcataaggattgtcaccttctgtgtgttgcaacagcttctaagataattagggacaaatgatgttacaaaaggaagagtactgctggtctaagtgctgagttgtatgtctttgcatagctccactctgctgctaaatatgcatgttctgactgacaccatcttgatgccagtactggattccagcattcagcaggtgcagatctcggctttacacaatttatctttacctagggttcagtcagtaatttctgctttttagcagggccagtgcagggtcagttaatgctacagttactgtatagcaaacagtatccttttttctccttcccctagcctattgggctttgcagatatctggagtgttttaaagtcaattattttaagcagtttgaggggatgtgtaggagtggagcatgaaacagtttataaggctggggctgtattatcagcacagcaaattaaagaatgaaagaagtacttctttttacatttcagctccagcagccagctatttaaaaaatatttttaaatatcttccccaaagtttaagatgtgggaccatctacttgtaagaaacagtggcttatttcttcatttctcagtaatcattgtaaacctttttttttttcttctccactctaacaaaagtaaaagaacaaaacttttgctgaggtcttggactccactacttgttagttatgttggcctggacagatggcaggtctgtcggcagttcctcagtctgtaaaatgaagattatcattcttgcctctccctttgtcacagtgttgtcgtgaagatcagatatgtatgaatgcagtcaaataaactaaaaactaggaaagtgttaactatcgttgcccaccgaatttgaggtagcaaaaaaaaaaaagaatgttctggtacatgaacagactgagaaggcctttcgacatccctgaagctagtctcctgtctagactaaaaatatccttgaaagaatagtagcaaacagtatgcagtactcctgtgttctaagttcttttatgttttagtttaccctcacagcagccatagtgttaagtcattatgagcttcatcttaaagataagaaaactgaggcaaggggagattaacttactgccaaatttcaaacagttagtagtatttgagaccagtagtatggctctaatcttacccttagccctcccaaccattatgctgtactatctacccataaatacctccaggaaacattcccctcttggtaatttgtccttctatagaagcttcaaagattaaatcaaattaattttcaaaaaaaatttttttttagaaatgttattttccctgtgatagaggatgacttcccagtttcaccaaagtctgtttatatcaacacacacaaaatggaataattctgagtcactaggcaatcaatctactgtggttttactatgtaaggtgaaaattaactggaacgatgtttgtttgctatacttacatagtcaaactttacaagccatgaaattaattgcactctttgtatttgttgttaaatgcctaagaagttttctaaaaattttgtaaaggcactgtcagagaatctggagttgaatgattattccagatactgtataacctgcataactttttgtctttaagtcgtgtttgtaaaagaagtaattgctagaaacatttgataatgtacaaagtagtctataatgactgttcagtacatttttaatatttttttggttatatccaactttttgtaaatatactggaagcttgataataaaatgtatttcctatcaccatacttttccatgtgaaaacctgagcctatttctagtataagtatccaaagaaaagttttacctggttgtgttattttaccagaccttggtaaaagaactattttggaaacagtatttgtaaatggaactaatgctatatttaaaaacactgatttttttttaacctgccaaaaataaaaaaaagctcattttataattttctactaaatttgagttgattatctggaggtctcatttcttgtaaagtataactttttcagaaactaccaccaaattatccaactgttatactaccagaaggctttaaaaagttaaaaacctaatatcaaactttctaggtgttaagatataaggcattgcctgactctagccccttaattataaaaactttaacatatctgagaggagccaactatggacgtttaactcatctttcaaaaattctcccaaccaagtctttgaaaaaagaaaacaaatacaggaatctagaatgagaacaactaggagtggcccgaggctgggcagcatctgaaaagcaaggcctccgtcttcctttactttagtgcaggggtgtctaatcttttaggtcctagccacattggaagaactgtcttgtgccacacataaaatacaccaccactaatgatagctaatgag

SEQ ID NO: 351774 - DNA, 4565 bp, Homo sapiens
aaagttcatccccccagaatgaaaatgaggacatttgagaaggtgatttaaggtgtggacatttgagaaggtgtcctatcaaattagtaaaccaaaggaaaagtactgaatagattaatccaaaacacttactgttttttaaacgaagaggatttcaccttgacagaaaaacaacttttattcaatatgtatttcctgaaattaaagagacaagtacagactgaaaggaaaatagattcgtaaataagctacgtcaactctatcctgctgaggatagctcagtgatgttaaatcctttacaaatccctggttgtcttcctacagacaagactgctttttgatgggactgatattaagagaaataggacctttggggcattcaactccttgataaaacttaaaagtatcggcatgagtggcttaacagaggaaataaagaagttttcaactaaatccaaaagtgcggtcattttctttactgctgttattttaaaaacctcttcataaccattgaaaaagaatcgacaactattttaaaagattaaagaaaggcagatgtctgcaaataattcccctccatcagcccagaagtctgtattacccacagctattcctgctgtgcttccagctgcttctccgtgttcaagtcctaagacgggactctctgcccgactctctaatggaagcttcagtgcaccatcactcaccaactccagaggctcagtgcatacagtttcatttctactgcaaattggcctcacacgggagagtgttaccattgaagcccaggaactgtctttatctgctgtcaaggatcttgtgtgctccatagtttatcaaaagtttccagagtgtggattctttggcatgtatgacaaaattcttctctttcgccatgacatgaactcagaaaacattttgcagctgattacctcagcagatgaaatacatgaaggagacctagtggaagtggttctttcagctttagccacagtagaagacttccagattcgtccacatactctctatgtacattcttacaaagctcctactttctgtgattactgtggtgagatgctgtggggattggtacgtcaaggactgaaatgtgaaggctgtggattaaattaccataaacgatgtgccttcaagattccaaataactgtagtggagtaagaaagagacgtctgtcaaatgtatctttaccaggacccggcctctcagttccaagacccctacagcctgaatatgtagcccttcccagtgaagagtcacatgtccaccaggaaccaagtaagagaattccttcttggagtggtcgcccaatctggatggaaaagatggtaatgtgcagagtgaaagttccacacacatttgctgttcactcttacacccgtcccacgatatgtcagtactgcaagcggttactgaaaggcctctttcgccaaggaatgcagtgtaaagattgcaaattcaactgccataaacgctgtgcatcaaaagtaccaagagactgccttggagaggttactttcaatggagaaccttccagtctgggaacagatacagatataccaatggatattgacaataatgacataaatagtgatagtagtcggggtttggatgacacagaagagccatcacccccagaagataagatgttcttcttggatccatctgatctcgatgtggaaagagatgaagaagccgttaaaacaatcagtccatcaacaagcaataatattccgctaatgagggttgtacaatccatcaagcacacaaagaggaagagcagcacaatggtgaaggaagggtggatggtccattacaccagcagggataacctgagaaagaggcattattggagacttgacagcaaatgtctaacattatttcagaatgaatctggatcaaagtattataaggaaattccactttcagaaattctccgcatatcttcaccacgagatttcacaaacatttcacaaggcagcaatccacactgttttgaaatcattactgatactatggtatacttcgttggtgagaacaatggggacagctctcataatcctgttcttgctgccactggagttggacttgatgtagcacagagctgggaaaaagcaattcgccaagccctcatgcctgttactcctcaagcaagtgtttgcacttctccagggcaagggaaagatcacaaagatttgtctacaagtatctctgtatctaattgtcagattcaggagaatgtggatatcagtactgtttaccagatctttgcagatgaggtgcttggttcaggccagtttggcatcgtttatggaggaaaacatagaaagactgggagggatgtggctattaaagtaattgataagatgagattccccacaaaacaagaaagtcaactccgtaatgaagtggctattttacagaatttgcaccatcctgggattgtaaacctggaatgtatgtttgaaaccccagaacgagtctttgtagtaatggaaaagctgcatggagatatgttggaaatgattctatccagtgagaaaagtcggcttccagaacgaattactaaattcatggtcacacagatacttgttgctttgaggaatctgcattttaagaatattgtgcactgtgatttaaagccagaaaatgtgctgcttgcatcagcagagccatttcctcaggtgaagctgtgtgactttggatttgcacgcatcattggtgaaaagtcattcaggagatctgtggtaggaactccagcatacttagcccctgaagttctccggagcaaaggttacaaccgttccctagatatgtggtcagtgggagttatcatctatgtgagcctcagtggcacatttccttttaatgaggatgaagatataaatgaccaaatccaaaatgctgcatttatgtacccaccaaatccatggagagaaatttctggtgaagcaattgatctgataaacaatctgcttcaagtgaagatgagaaaacgttacagtgttgacaaatctcttagtcatccctggctacaggactatcagacttggcttgaccttagagaatttgaaactcgcattggagaacgttacattacacatgaaagtgatgatgctcgctgggaaatacatgcatacacacataaccttgtatacccaaagcacttcattatggctcctaatccagatgatatggaagaagatccttaatcactgagctaacctaaataaggaaggatttcattttatggactgatattttgctgtgtaacttgttctttgtagattgtcatctgcagtgctgcaaagatatgaagaaatatgataacgaataagtgacaccagtactgtagttcataatgagtaggtacaggcgggaaactgaataataagaagtcataatggaatcaaggtgaagctttttataaacttttttagcctaagcaataactggttttgtattttttcttaatccttcactttaatacaataggctcacttaatttgtcttcccatttctctttatatatatatatatatataaatataaatatatgtttgtttgtttgtttttttaaggaaaaacaagtcaagctagcatccagttactatatagcttggctaaattatacaagacttacaagattgattactcgacaggcttgtatttaagagataactgtgaggttaccattatgtgatgttactataaggacttttaacattggtttaacaaaccatagaggcattgaagggtttttcttagatgcctagaaaaagcacactgggctgttttacctttcttttttaggtcaatcaagactccaaaatagtgattcctaacctttttggagttgctctgctactctgaatatgttctatacagcataaggattgtcaccttctgtgtgttgcaacagcttctaagataattagggacaaatgatgttacaaaaggaagagtactgctggtctaagtgctgagttgtatgtctttgcatagctccactctgctgctaaatatgcatgttctgactgacaccatcttgatgccagtactggattccagcattcagcaggtgcagatctcggctttacacaatttatctttacctagggttcagtcagtaatttctgctttttagcagggccagtgcagggtcagttaatgctacagttactgtatagcaaacagtatccttttttctccttcccctagcctattgggctttgcagatatctggagtgttttaaagtcaattattttaagcagtttgaggggatgtgtaggagtggagcatgaaacagtttataaggctggggctgtattatcagcacagcaaattaaagaatgaaagaagtacttctttttacatttcagctccagcagccagctatttaaaaaatatttttaaatatcttccccaaagtttaagatgtgggaccatctacttgtaagaaacggggtattctcatttcggatctgggactcttttcttcccccccaggtcaatggggggggccacccaatttttgccgccgatgcg

SEQ ID NO: 351775 - DNA, 2445 bp, Homo sapiens
aaagttcatccccccagaatgaaaatgaggacatttgagaaggtgatttaaggtgtggacatttgagaaggtgtcctatcaaattagtaaaccaaaggaaaagtactgaatagattaatccaaaacacttactgttttttaaacgaagaggatttcaccttgacagaaaaacaacttttattcaatatgtatttcctgaaattaaagagacaagtacagactgaaaggaaaatagattcgtaaataagctacgtcaactctatcctgctgaggatagctcagtgatgttaaatcctttacaaatccctggttgtcttcctacagacaagactgctttttgatgggactgatattaagagaaataggacctttggggcattcaactccttgataaaacttaaaagtatcggcatgagtggcttaacagaggaaataaagaagttttcaactaaatccaaaagtgcggtcattttctttactgctgttattttaaaaacctcttcataaccattgaaaaagaatcgacaactattttaaaagattaaagaaaggcagatgtctgcaaataattcccctccatcagcccagaagtctgtattacccacagctattcctgctgtgcttccagctgcttctccgtgttcaagtcctaagacgggactctctgcccgactctctaatggaagcttcagtgcaccatcactcaccaactccagaggctcagtgcatacagtttcatttctactgcaaattggcctcacacgggagagtgttaccattgaagcccaggaactgtctttatctgctgtcaaggatcttgtgtgctccatagtttatcaaaagtttccagagtgtggattctttggcatgtatgacaaaattcttctctttcgccatgacatgaactcagaaaacattttgcagctgattacctcagcagatgaaatacatgaaggagacctagtggaagtggttctttcagctttagccacagtagaagacttccagattcgtccacatactctctatgtacattcttacaaagctcctactttctgtgattactgtggtgagatgctgtggggattggtacgtcaaggactgaaatgtgaaggctgtggattaaattaccataaacgatgtgccttcaagattccaaataactgtagtggagtaagaaagagacgtctgtcaaatgtatctttaccaggacccggcctctcagttccaagacccctacagcctgaatatgtagcccttcccagtgaagagtcacatgtccaccaggaaccaagtaagagaattccttcttggagtggtcgcccaatctggatggaaaagatggtaatgtgcagagtgaaagttccacacacatttgctgttcactcttacacccgtcccacgatatgtcagtactgcaagcggttactgaaaggcctctttcgccaaggaatgcagtgtaaagattgcaaattcaactgccataaacgctgtgcatcaaaagtaccaagagactgccttggagaggttactttcaatggagaaccttccagtctgggaacagatacagatataccaatggatattgacaataatgacataaatagtgatagtagtcggggtttggatgacacagaagagccatcacccccagaagataagatgttcttcttggatccatctgatctcgatgtggaaagagatgaagaagccgttaaaacaatcagtccatcaacaagcaataatattccgctaatgagggttgtacaatccatcaagcacacaaagaggaagagcagcacaatggtgaaggaagggtggatggtccattacaccagcagggataacctggtcagtaatcaaatacatttgaatatgctagtaagactttgttatgagtttcattctgtgcattttttaaatcaaaatgatgatgagatacatattaagacattatatacaccacagcaatttgtaaaagatgcactggaattatagttaaatttgtaaggaatttttaacaggcagaatatttaatgtattgtctttacaaactggtagagcagtcaatattcaaaaaggatctgggattgttccacaataaaaaataattaactcgaaacacagtggagccacaaatagagatagaaggaactaagacttcatctaaaaagtcatcttattaccaaagataggaaggaagcatgtttgattttatgtagactttaacttagtgtaaatgtgcaacgtttttttttagatccagcaaagacgaggaatgatgacattctagtagaaagacaatagatttgaagaatcagcgtagtgtaataactaagaacacagactttggagctagactgcctaagtctctgtaacttactataaaactatatgaacttgggaaagttacttagtttctttatgcttttgtttccttgtgta

SEQ ID NO: 351776 - DNA, 772 bp, Homo sapiens
aaaatctacacaaacttacaaattttaaatattttttagtccatcaacaagcaataatattccgctaatgagggttgtacaatccatcaagcacacaaagaggaagagcagcacaatggtgaaggaagggtggatggtccattacaccagcagggataacctggtcagtaatcaaatacatttgaatatgctagtaagactttgttatgagtttcattctgtgcattttttaaatcaaaatgatgatgagatacatattaagacattatatacaccacagcaatttgtaaaagatgcactggaattatagttaaatttgtaaggaatttttaacaggcagaatatttaatgtattgtctttacaaactggtagagcagtcaatattcaaaaaggatctgggattgttccacaataaaaaataattaactcgaaacacagtggagccacaaatagagatagaaggaactaagacttcatctaaaaagtcatcttattaccaaagataggaaggaagcatgtttgattttatgtagactttaacttagtgtaaatgtgcaacgtttttttttagatccagcaaagacgaggaatgatgacattctagtagaaagacaatagatttgaagaatcagcgtagtgtaataactaagaacacagactttggagctagactgcctaagtctctgtaacttactataaaactatatgaacttgggaaagttacttagtttctttatgcttttgtttccttgtgtaaaattggcataataa

SEQ ID NO: 351777 - DNA, 6307 bp, Homo sapiens
aaagttcatccccccagaatgaaaatgaggacatttgagaaggtgatttaaggtgtggacatttgagaaggtgtcctatcaaattagtaaaccaaaggaaaagtactgaatagattaatccaaaacacttactgttttttaaacgaagaggatttcaccttgacagaaaaacaacttttattcaatatgtatttcctgaaattaaagagacaagtacagactgaaaggaaaatagattcgtaaataagctacgtcaactctatcctgctgaggatagctcagtgatgttaaatcctttacaaatccctggttgtcttcctacagacaagactgctttttgatgggactgatattaagagaaataggacctttggggcattcaactccttgataaaacttaaaagtatcggcatgagtggcttaacagaggaaataaagaagttttcaactaaatccaaaagtgcggtcattttctttactgctgttattttaaaaacctcttcataaccattgaaaaagaatcgacaactattttaaaagattaaagaaaggcagatgtctgcaaataattcccctccatcagcccagaagtctgtattacccacagctattcctgctgtgcttccagctgcttctccgtgttcaagtcctaagacgggactctctgcccgactctctaatggaagcttcagtgcaccatcactcaccaactccagaggctcagtgcatacagtttcatttctactgcaaattggcctcacacgggagagtgttaccattgaagcccaggaactgtctttatctgctgtcaaggatcttgtgtgctccatagtttatcaaaagtttccagagtgtggattctttggcatgtatgacaaaattcttctctttcgccatgacatgaactcagaaaacattttgcagctgattacctcagcagatgaaatacatgaaggagacctagtggaagtggttctttcagctttagccacagtagaagacttccagattcgtccacatactctctatgtacattcttacaaagctcctactttctgtgattactgtggtgagatgctgtggggattggtacgtcaaggactgaaatgtgaaggctgtggattaaattaccataaacgatgtgccttcaagattccaaataactgtagtggagtaagaaagagacgtctgtcaaatgtatctttaccaggacccggcctctcagttccaagacccctacagcctgaatatgtagcccttcccagtgaagagtcacatgtccaccaggaaccaagtaagagaattccttcttggagtggtcgcccaatctggatggaaaagatggtaatgtgcagagtgaaagttccacacacatttgctgttcactcttacacccgtcccacgatatgtcagtactgcaagcggttactgaaaggcctctttcgccaaggaatgcagtgtaaagattgcaaattcaactgccataaacgctgtgcatcaaaagtaccaagagactgccttggagaggttactttcaatggagaaccttccagtctgggaacagatacagatataccaatggatattgacaataatgacataaatagtgatagtagtcggggtttggatgacacagaagagccatcacccccagaagataagatgttcttcttggatccatctgatctcgatgtggaaagagatgaagaagccgttaaaacaatcagtccatcaacaagcaataatattccgctaatgagggttgtacaatccatcaagcacacaaagaggaagagcagcacaatggtgaaggaagggtggatggtccattacaccagcagggataacctgagaaagaggcattattggagacttgacagcaaatgtctaacattatttcagaatgaatctggatcaaagtattataaggaaattccactttcagaaattctccgcatatcttcaccacgagatttcacaaacatttcacaaggcagcaatccacactgttttgaaatcattactgatactatggtatacttcgttggtgagaacaatggggacagctctcataatcctgttcttgctgccactggagttggacttgatgtagcacagagctgggaaaaagcaattcgccaagccctcatgcctgttactcctcaagcaagtgtttgcacttctccagggcaagggaaagatcacaaagatttgtctacaagtatctctgtatctaattgtcagattcaggagaatgtggatatcagtactgtttaccagatctttgcagatgaggtgcttggttcaggccagtttggcatcgtttatggaggaaaacatagaaagactgggagggatgtggctattaaagtaattgataagatgagattccccacaaaacaagaaagtcaactccgtaatgaagtggctattttacagaatttgcaccatcctgggattgtaaacctggaatgtatgtttgaaaccccagaacgagtctttgtagtaatggaaaagctgcatggagatatgttggaaatgattctatccagtgagaaaagtcggcttccagaacgaattactaaattcatggtcacacagatacttgttgctttgaggaatctgcattttaagaatattgtgcactgtgatttaaagccagaaaatgtgctgcttgcatcagcagagccatttcctcaggtgaagctgtgtgactttggatttgcacgcatcattggtgaaaagtcattcaggagatctgtggtaggaactccagcatacttagcccctgaagttctccggagcaaaggttacaaccgttccctagatatgtggtcagtgggagttatcatctatgtgagcctcagtggcacatttccttttaatgaggatgaagatataaatgaccaaatccaaaatgctgcatttatgtacccaccaaatccatggagagaaatttctggtgaagcaattgatctgataaacaatctgcttcaagtgaagatgagaaaacgttacagtgttgacaaatctcttagtcatccctggctacaggactatcagacttggcttgaccttagagaatttgaaactcgcattggagaacgttacattacacatgaaagtgatgatgctcgctgggaaatacatgcatacacacataaccttgtatacccaaagcacttcattatggctcctaatccagatgatatggaagaagatccttaatcactgagctaacctaaataaggaaggatttcattttatggactgatattttgctgtgtaacttgttctttgtagattgtcatctgcagtgctgcaaagatatgaagaaatatgataacgaataagtgacaccagtactgtagttcataatgagtaggtacaggcgggaaactgaataataagaagtcataatggaatcaaggtgaagctttttataaacttttttagcctaagcaataactggttttgtattttttcttaatccttcactttaatacaataggctcacttaatttgtcttcccatttctctttatatatatatatatatataaatataaatatatgtttgtttgtttgtttttttaaggaaaaacaagtcaagctagcatccagttactatatagcttggctaaattatacaagacttacaagattgattactcgacaggcttgtatttaagagataactgtgaggttaccattatgtgatgttactataaggacttttaacattggtttaacaaaccatagaggcattgaagggtttttcttagatgcctagaaaaagcacactgggctgttttacctttcttttttaggtcaatcaagactccaaaatagtgattcctaacctttttggagttgctctgctactctgaatatgttctatacagcataaggattgtcaccttctgtgtgttgcaacagcttctaagataattagggacaaatgatgttacaaaaggaagagtactgctggtctaagtgctgagttgtatgtctttgcatagctccactctgctgctaaatatgcatgttctgactgacaccatcttgatgccagtactggattccagcattcagcaggtgcagatctcggctttacacaatttatctttacctagggttcagtcagtaatttctgctttttagcagggccagtgcagggtcagttaatgctacagttactgtatagcaaacagtatccttttttctccttcccctagcctattgggctttgcagatatctggagtgttttaaagtcaattattttaagcagtttgaggggatgtgtaggagtggagcatgaaacagtttataaggctggggctgtattatcagcacagcaaattaaagaatgaaagaagtacttctttttacatttcagctccagcagccagctatttaaaaaatatttttaaatatcttccccaaagtttaagatgtgggaccatctacttgtaagaaacagtggcttatttcttcatttctcagtaatcattgtaaacctttttttttttcttctccactctaacaaaagtaaaagaacaaaacttttgctgaggtcttggactccactacttgttagttatgttggcctggacagatggcaggtctgtcggcagttcctcagtctgtaaaatgaagattatcattcttgcctctccctttgtcacagtgttgtcgtgaagatcagatatgtatgaatgcagtcaaataaactaaaaactaggaaagtgttaactatcgttgcccaccgaatttgaggtagcaaaaaaaaaaaagaatgttctggtacatgaacagactgagaaggcctttcgacatccctgaagctagtctcctgtctagactaaaaatatccttgaaagaatagtagcaaacagtatgcagtactcctgtgttctaagttcttttatgttttagtttaccctcacagcagccatagtgttaagtcattatgagcttcatcttaaagataagtatttgagaccagtagtatggctctaatcttacccttagccctcccaaccattatgctgtactatctacccataaatacctccaggaaacattcccctcttggtaatttgtccttctatagaagcttcaaagattaaatcaaattaattttcaaaaaaaatttttttttagaaatgttattttccctgtgatagaggatgacttcccagtttcaccaaagtctgtttatatcaacacacacaaaatggaataattctgagtcactaggcaatcaatctactgtggttttactatgtaaggtgaaaattaactggaacgatgtttgtttgctatacttacatagtcaaactttacaagccatgaaattaattgcactctttgtatttgttgttaaatgcctaagaagttttctaaaaattttgtaaaggcactgtcagagaatctggagttgaatgattattccagatactgtataacctgcataactttttgtctttaagtcgtgtttgtaaaagaagtaattgctagaaacatttgataatgtacaaagtagtctataatgactgttcagtacatttttaatatttttttggttatatccaactttttgtaaatatactggaagcttgataataaaatgtatttcctatcaccatacttttccatgtgaaaacctgagcctatttctagtataagtatccaaagaaaagttttacctggttgtgttattttaccagaccttggtaaaagaactattttggaaacagtatttgtaaatggaactaatgctatatttaaaaacactgatttttttttaacctgccaaaaataaaaaaaagctcattttataattttctactaaatttgagttgattatctggaggtctcatttcttgtaaagtataactttttcagaaactaccaccaaattatccaactgttatactaccagaaggctttaaaaagttaaaaacctaatatcaaactttctaggtgttaagatataaggcattgcctgactctagccccttaattataaaaactttaacatatctgagaggagccaactatggacgtttaactcatctttcaaaaattctcccaaccaagtctttgaaaaaagaaaacaaatacaggaatctagaatgagaacaactaggagtggcccgaggctgggcagcatctgaaaagcaaggcctccgtcttcctttactttagtgcaggggtgtctaatcttttaggtcctagccacattggaagaactgtcttgtgccacacataaaatacaccaccactaatgatagctaatgag

SEQ ID NO: 351778 - DNA, 5023 bp, Homo sapiens
aaagttcatccccccagaatgaaaatgaggacatttgagaaggtgatttaaggtgtggacatttgagaaggtgtcctatcaaattagtaaaccaaaggaaaagtactgaatagattaatccaaaacacttactgttttttaaacgaagaggatttcaccttgacagaaaaacaacttttattcaatatgtatttcctgaaattaaagagacaagtacagactgaaaggaaaatagattcgtaaataagctacgtcaactctatcctgctgaggatagctcagtgatgttaaatcctttacaaatccctggttgtcttcctacagacaagactgctttttgatgggactgatattaagagaaataggacctttggggcattcaactccttgataaaacttaaaagtatcggcatgagtggcttaacagaggaaataaagaagttttcaactaaatccaaaagtgcggtcattttctttactgctgttattttaaaaacctcttcataaccattgaaaaagaatcgacaactattttaaaagattaaagaaaggcagatgtctgcaaataattcccctccatcagcccagaagtctgtattacccacagctattcctgctgtgcttccagctgcttctccgtgttcaagtcctaagacgggactctctgcccgactctctaatggaagcttcagtgcaccatcactcaccaactccagaggctcagtgcatacagtttcatttctactgcaaattggcctcacacgggagagtgttaccattgaagcccaggaactgtctttatctgctgtcaaggatcttgtgtgctccatagtttatcaaaagtttccagagtgtggattctttggcatgtatgacaaaattcttctctttcgccatgacatgaactcagaaaacattttgcagctgattacctcagcagatgaaatacatgaaggagacctagtggaagtggttctttcagctttagccacagtagaagacttccagattcgtccacatactctctatgtacattcttacaaagctcctactttctgtgattactgtggtgagatgctgtggggattggtacgtcaaggactgaaatgtgaaggctgtggattaaattaccataaacgatgtgccttcaagattccaaataactgtagtggagtaagaaagagacgtctgtcaaatgtatctttaccaggacccggcctctcagttccaagacccctacagcctgaatatgtagcccttcccagtgaagagtcacatgtccaccaggaaccaagtaagagaattccttcttggagtggtcgcccaatctggatggaaaagatggtaatgtgcagagtgaaagttccacacacatttgctgttcactcttacacccgtcccacgatatgtcagtactgcaagcggttactgaaaggcctctttcgccaaggaatgcagtgtaaagattgcaaattcaactgccataaacgctgtgcatcaaaagtaccaagagactgccttggagaggttactttcaatggagaaccttccagtctgggaacagatacagatataccaatggatattgacaataatgacataaatagtgatagtagtcggggtttggatgacacagaagagccatcacccccagaagataagatgttcttcttggatccatctgatctcgatgtggaaagagatgaagaagccgttaaaacaatcagtccatcaacaagcaataatattccgctaatgagggttgtacaatccatcaagcacacaaagaggaagagcagcacaatggtgaaggaagggtggatggtccattacaccagcagggataacctgagaaagaggcattattggagacttgacagcaaatgtctaacattatttcagaatgaatctggatcaaagtattataaggaaattccactttcagaaattctccgcatatcttcaccacgagatttcacaaacatttcacaaggcagcaatccacactgttttgaaatcattactgatactatggtatacttcgttggtgagaacaatggggacagctctcataatcctgttcttgctgccactggagttggacttgatgtagcacagagctgggaaaaagcaattcgccaagccctcatgcctgttactcctcaagcaagtgtttgcacttctccagggcaagggaaagatcacaaagatttgtctacaagtatctctgtatctaattgtcagattcaggagaatgtggatatcagtactgtttaccagatctttgcagatgaggtgcttggttcaggccagtttggcatcgtttatggaggaaaacatagaaagactgggagggatgtggctattaaagtaattgataagatgagattccccacaaaacaagaaagtcaactccgtaatgaagtggctattttacagaatttgcaccatcctgggattgtaaacctggaatgtatgtttgaaaccccagaacgagtctttgtagtaatggaaaagctgcatggagatatgttggaaatgattctatccagtgagaaaagtcggcttccagaacgaattactaaattcatggtcacacagatacttgttgctttgaggaatctgcattttaagaatattgtgcactgtgatttaaagccagaaaatgtgctgcttgcatcagcagagccatttcctcaggtgaagctgtgtgactttggatttgcacgcatcattggtgaaaagtcattcaggagatctgtggtaggaactccagcatacttagcccctgaagttctccggagcaaaggttacaaccgttccctagatatgtggtcagtgggagttatcatctatgtgagcctcagtggcacatttccttttaatgaggatgaagatataaatgaccaaatccaaaatgctgcatttatgtacccaccaaatccatggagagaaatttctggtgaagcaattgatctgataaacaatctgcttcaagtgaagatgagaaaacgttacagtgttgacaaatctcttagtcatccctggctacaggactatcagacttggcttgaccttagagaatttgaaactcgcattggagaacgttacattacacatgaaagtgatgatgctcgctgggaaatacatgcatacacacataaccttgtatacccaaagcacttcattatggctcctaatccagatgatatggaagaagatccttaatcactgagctaacctaaataaggaaggatttcattttatggactgatattttgctgtgtaacttgttctttgtagattgtcatctgcagtgctgcaaagatatgaagaaatatgataacgaataagtgacaccagtactgtagttcataatgagtaggtacaggcgggaaactgaataataagaagtcataatggaatcaaggtgaagctttttataaacttttttagcctaagcaataactggttttgtattttttcttaatccttcactttaatacaataggctcacttaatttgtcttcccatttctctttatatatatatatatatataaatataaatatatgtttgtttgtttgtttttttaaggaaaaacaagtcaagctagcatccagttactatatagcttggctaaattatacaagacttacaagattgattactcgacaggcttgtatttaagagataactgtgaggttaccattatgtgatgttactataaggacttttaacattggtttaacaaaccatagaggcattgaagggtttttcttagatgcctagaaaaagcacactgggctgttttacctttcttttttaggtcaatcaagactccaaaatagtgattcctaacctttttggagttgctctgctactctgaatatgttctatacagcataaggattgtcaccttctgtgtgttgcaacagcttctaagataattagggacaaatgatgttacaaaaggaagagtactgctggtctaagtgctgagttgtatgtctttgcatagctccactctgctgctaaatatgcatgttctgactgacaccatcttgatgccagtactggattccagcattcagcaggtgcagatctcggctttacacaatttatctttacctagggttcagtcagtaatttctgctttttagcagggccagtgcagggtcagttaatgctacagttactgtatagcaaacagtatccttttttctccttcccctagcctattgggctttgcagatatctggagtgttttaaagtcaattattttaagcagtttgaggggatgtgtaggagtggagcatgaaacagtttataaggctggggctgtattatcagcacagcaaattaaagaatgaaagaagtacttctttttacatttcagctccagcagccagctatttaaaaaatatttttaaatatcttccccaaagtttaagatgtgggaccatctacttgtaagaaacagtggcttatttcttcatttctcagtaatcattgtaaacctttttttttttcttctccactctaacaaaagtaaaagaacaaaacttttgctgaggtcttggactccactacttgttagttatgttggcctggacagatggcaggtctgtcggcagttcctcagtctgtaaaatgaagattatcattcttgcctctccctttgtcacagtgttgtcgtgaagatcagatatgtatgaatgcagtcaaataaactaaaaactaggaaagtgttaactatcgttgcccaccgaatttgaggtagcaaaaaaaaaaaagaatgttctggtacatgaacagactgagaaggcctttcgacatccctgaagctagtctcctgtctagactaaaaatatccttgaaagaatagtagcaaacagtggcttatttcttcatttctcagtaatcattgtaaatcttttttttttttcttctccactctaacaaaagtaaaagaacaaaacttttgctgaggtcttggactccactacttgttagttatgtt

SEQ ID NO: 351779 - DNA, 2553 bp, Homo sapiens
aaagttcatccccccagaatgaaaatgaggacatttgagaaggtgatttaaggtgtggacatttgagaaggtgtcctatcaaattagtaaaccaaaggaaaagtactgaatagattaatccaaaacacttactgttttttaaacgaagaggatttcaccttgacagaaaaacaacttttattcaatatgtatttcctgaaattaaagagacaagtacagactgaaaggaaaatagattcgtaaataagctacgtcaactctatcctgctgaggatagctcagtgatgttaaatcctttacaaatccctggttgtcttcctacagacaagactgctttttgatgggactgatattaagagaaataggacctttggggcattcaactccttgataaaacttaaaagtatcggcatgagtggcttaacagaggaaataaagaagttttcaactaaatccaaaagtgcggtcattttctttactgctgttattttaaaaacctcttcataaccattgaaaaagaatcgacaactattttaaaagattaaagaaaggcagatgtctgcaaataattcccctccatcagcccagaagtctgtattacccacagctattcctgctgtgcttccagctgcttctccgtgttcaagtcctaagacgggactctctgcccgactctctaatggaagcttcagtgcaccatcactcaccaactccagaggctcagtgcatacagtttcatttctactgcaaattggcctcacacgggagagtgttaccattgaagcccaggaactgtctttatctgctgtcaaggatcttgtgtgctccatagtttatcaaaagtttccagagtgtggattctttggcatgtatgacaaaattcttctctttcgccatgacatgaactcagaaaacattttgcagctgattacctcagcagatgaaatacatgaaggagacctagtggaagtggttctttcagctttagccacagtagaagacttccagattcgtccacatactctctatgtacattcttacaaagctcctactttctgtgattactgtggtgagatgctgtggggattggtacgtcaaggactgaaatgtgaaggctgtggattaaattaccataaacgatgtgccttcaagattccaaataactgtagtggagtaagaaagagacgtctgtcaaatgtatctttaccaggacccggcctctcagttccaagacccctacagcctgaatatgtagcccttcccagtgaagagtcacatgtccaccaggaaccaagtaagagaattccttcttggagtggtcgcccaatctggatggaaaagatggtaatgtgcagagtgaaagttccacacacatttgctgttcactcttacacccgtcccacgatatgtcagtactgcaagcggttactgaaaggcctctttcgccaaggaatgcagtgtaaagattgcaaattcaactgccataaacgctgtgcatcaaaagtaccaagagactgccttggagaggttactttcaatggagaaccttccagtctgggaacagatacagatataccaatggatattgacaataatgacataaatagtgatagtagtcggggtttggatgacacagaagagccatcacccccagaagataagatgttcttcttggatccatctgatctcgatgtggaaagagatgaagaagccgttaaaacaatcagtccatcaacaagcaataatattccgctaatgagggttgtacaatccatcaagcacacaaagaggaagagcagcacaatggtgaaggaagggtggatggtccattacaccagcagggataacctgagaaagaggcattattggagacttgacagcaaatgtctaacattatttcagaatgaatctggatcaaagtattataaggaaattccactttcagaaattctccgcatatcttcaccacgagatttcacaaacatttcacaaggcagcaatccacactgttttgaaatcattactgatactatggtatacttcgttggtgagaacaatggggacagctctcataatcctgttcttgctgccactggagttggacttgatgtagcacagagctgggaaaaagcaattcgccaagccctcatgcctgttactcctcaagcaagtgtttgcacttctccagggcaagggaaagatcacaaagatttgtctacaagtatctctgtatctaattgtcagattcaggagaatgtggatatcagtactgtttaccagatctttgcagatgaggtgcttggttcaggccagtttggcatcgtttatggaggtaagcaactacagccgtttgcatattgtacacattattttaaaaactggaaaatgtaaaacatctgccagctgttttgtcatctcatagttttgtccagtgccttttttttaaaggctgacttgttatctttcagctaaatccttctcactgtaatttgagtattcttcccttaatgtcattgcaaactttaaaaattaacagaatcagaaaattttaca

SEQ ID NO: 351780 - DNA, 697 bp, Homo sapiens
ggtgtcctcatccttccatcctcacaacaaggcacaggcaggcagcacgtggggccagttcatagccgggaccaccccaagctcttggggaggtgcctcagccaccccagtgtagattctgatccaagttggaggtgtagggcctggaggtccagagtgggaaggagggccttccccaagtccttagagtcacacaggcagggaacaggcaggagatggtggcttttcaggttttcagagtctcacttgatccctattttgctggtcttgagattaggaatctctgtaaacctgctgattgttaatttagccgtatgttcactgcctaaggagtcagctctgttcagattctcagttgaatcgtttttatctatacgtgattgttattaagacatcgggtaaatataggcctggcgcggtggctcacacctgtaatcccagcactttgggaggccaaggcgggtggatcacgaggtcacaagattgagaccatcctggccaatatggtgaaaccccgtctctactgaaaatacaaaaattagctggatgtggcggcatgcgcctatagtcccagctactcgggaggctgaggcagaggatttgcttcaacccaggaagcagaggttgcagtgagctgagattgcatcattgcactccagcctgggagacagggcgagactccgtctcaaaaaaaaaa

SEQ ID NO: 351781 - DNA, 1159 bp, Homo sapiens
  misc_feature (42)..(44): n is a, c, g, or t
gcggccgcctactactactactactactactactactactgnnngaattcaagcttctaacgatgtacggggacatgaattttggaagcaaatggtaccgtaagtaccacagcaaattccttctggtcattatacaggcgtacctcagagatactacaggttaggtttcagaccacatcaaaaaagcaactattgcaaatagagtgagtcacatctagtttttggtttcccagtgcctataaaacttgtgtttatactacagtcttaaatttctaaaaaatgtacataccttaagaatactttattgctaaaaaatgctaacaatcatctgagccttcagcgagtcataatctttttgctggtggagggtcttgatactgctggctgttgactaaggtggttactgaaggttggggtggctgtggcagttccttaaaataagatagcgatgaagttttccaaatcaattgacttcctttcacaaatgagatctctgtaacatgtaatactatttaatagcattttacccacagtagaacttctttcaaaatttagagtctgtcatctcaaatcctgatgctcctttatgaactaagtttatagaatattctaaatcctttgttgtcatttcaactatgtttacagcatcttcactgtggaaatgactgtctccagaaaccactttctatacacattcttaagcaacttctcatctattaaagtttgatcatgagattacagcaattcattcacatcttcaggctccacttcttccagactccttttaatgctggaattttgaccgcctcccatgaatcagaatgttcttagtggcatctagaatgctaaatgcttcccagaaggttttcaattgactttgcccagactcttcagaggaatcactagttagggcagctacagccttattaaatgtatttcttaaataaataagacttaaaagtcaaagtgactccttgacccatggactgcagcatagatgttgtggtagctggcacgaagacaacatgaacctccttgtacatctccatcagaactcttaggtgaccaggtaacattgtaatgggcagtaatatttggaaagaaatttgagcaggtctcaaccataggcttaaatattcaataaaccatgctataaaca

SEQ ID NO: 351782 - DNA, 2546 bp, Homo sapiens
gcgcgccccgcaatcgccgcagccgcccccgccgtcggccgccgcaccccaagcgactgcccaaactaagcctccgtggctgggtacgggagcgctttggggacaaaaattctccctcaactgtggtctgcattccttcggcccgtgggctgatctggggcgggaagtattagcgtctcagttgcgctgcagccggggaggaaggaggaggccgagcctggggcggagtttgggctgactggggctggaccgggcaagacgccgccgctgcccggatgttgcgatggctgatcgggggaggccgagaaccgcagggactggccgagaaatctcctttacagacaataggtgaagaacaaacccagaatccctacactgaactgctagtactgaaggctcatcatgatattgtacgatttctggtacagttagatgactacagatttgcatctgctggtgatgatggaattgtagttgtgtggaatgcccagacaggggaaaaacttttagaactgaatggacacactcaaaagataacagctattattacatttccttccttggaatcttgtgaagagaaaaatcaactcatcttgacagcctctgctgatagaacagttattgtgtgggatggtgatactaccagacaagttcagagaatatcatgcttccagtctactgtaaagtgtttaactgttcttcagagactagatgtttggctttctggtgggaatgacctgtgtgtgtggaaccgaaaattagatctcctgtgtaagactagccacctttctgatacaggtattagtgctttggttgaaatacctaagaactgtgttgtggcagcagttggcaaagaactgataattttcaggttggtagcacccacagaaggatcactagaatgggatattcttgaagttaagcgcctccttgatcaccaggataatattctctcattgattaatgtcaatgatttgagttttgtcaccggctcccacgtcggagagctgatcatctgggatgccctggactggaccatgcaggcctatgaacgcaacttctgggacccatctccacaactggacacccaacaagaaataaaactctgtcaaaaatcaaatgacatttctattcatcatttcacatgtgatgaagagaatgtatttgctgcagttggaaggggtttatacgtgtatagccttcaaatgaagcgtgtgattgcctgccagaaaactgcacatgactccaatgtcctgcacattgccagacttccaaacaggcagttaatctcatgctcagaagatggcagtgtacgcatttgggagttaagagaaaaacagcagcttgcagctgagcctgtaccaacaggtttttttaacatgtggggatttggaagagtcagcaaacaagccagccaacctgttaaaaagcagcaagaaaatgctacttcatgttcactggagcttattggagatttgattggacactcatcatctgtggagatgtttctatactttgaagatcatggactagtgacgtgctccgctgatcatctcattattttgtggaaaaatggagagcgagaatctggattgcgcagtttaagattatttcaaaaattagaggagaatggtgacttataccttgctgtctagtttaaggaattaaaaatacacatgcatgaaccttgaacatcaaatatcgggtactactctgaaaaccattaatatattgatcacttaaattggtaattttttttgtcagtccataaaattctacatgtttaaattttttgtggacctaccaaccaggaacatgttgcttctcaggtcctagtatatcctccaaagaatataccacaagtttttccatttgactttgagctgctgttgaagtggtgagtgctgtgttttgagcttattttgaacctagatccttgtgaaaggtacaaatagaggtaatagttaagttatggcatttattagaagttttattatttggcttcctttagaattattgtgaagtttaaaaatagcctttctcctgcaaattttcctagtctttagtaactgttagtgttctatatagcacaaacttgaatctctcagccaaaaaagggaacatatatactgtttaagtatggcaagttttctttggtaccaatttgtttagataattttaaaaatgttttttagttctagctactaaaacctgtatgaactcaaatggataggcatcttgtgagggtgtgtttttcccagtgtgaattggcttgaagagccatgggctaaatgggtactagaacaacaactgcccctcatgtacgccaaggatgagctctagatcatttgagaggcacagtgtttccggagtcagggactgcagctgagcgcaactgccccatctgaccactgactcaaatacgaactgcttgagacagacttcttttatgtagttctttgcagtgtccattgagacactataaccagccttgtaacaatatgttttctccttttggtgctaaaaaataaaaatattagaaagta

SEQ ID NO: 351783 - DNA, 889 bp, Homo sapiens
gcgcgccccgcaatcgccgcagccgcccccgccgtcggccgccgcaccccaagcgactgcccaaactaagcctccgtggctgggtacgggagcgctttggggacaaaaattctccctcaactgtggtctgcattccttcggcccgtgggctgatctggggcgggaagtattagcgtctcagttgcgctgcagccggggaggaaggaggaggccgagcctggggcggagtttgggctgactggggctggaccgggcaagacgccgccgctgcccggatgttgcgatggctgatcgggggaggccgagaaccgcagggactggccgagaaatctcctttacagacaataggtgaagaacaaacccagaatccctacactgaactgctagtactgaaggctcatcatgatattgtacgatttctggtacagttagatgactacagatttgcatctgctggtgatgatggaattgtagttgtgtggaatgcccagacaggggaaaaacttttagaactgaatggacacactcaaaagataacagctattattacatttccttccttggaatcttgtgaagagaaaaatcaactcatcttgacagcctctgctgatagaacagttattgtgtgggatggtgatactaccagacaagttcagagaatatcatgcttccagtctactgtaaaggtaaaatcttaagtaaatatgagtttttatgacaatctatttttgtctcagaagacatggtttaaagagttagacgaaattacttttgtgggtcttatgaattatttctttccacacacttgtagtcatttgcttcgtgtaagatcagatttttgagagcacatgtattaagtgttagaatgtttcaatttgaaattagagca

SEQ ID NO: 351784 - DNA, 4214 bp, Homo sapiens
gcgcgccccgcaatcgccgcagccgcccccgccgtcggccgccgcaccccaagcgactgcccaaactaagcctccgtggctgggtacgggagcgctttggggacaaaaattctccctcaactgtggtctgcattccttcggcccgtgggctgatctggggcgggaagtattagcgtctcagttgcgctgcagccggggaggaaggaggaggccgagcctggggcggagtttgggctgactggggctggaccgggcaagacgccgccgctgcccggatgttgcgatggctgatcgggggaggccgagaaccgcagggactggccgagaaatctcctttacagacaataggtgaagaacaaacccagaatccctacactgaactgctagtactgaaggctcatcatgatattgtacgatttctggtacagttagatgactacagatttgcatctgctggtgatgatggaattgtagttgtgtggaatgcccagacaggggaaaaacttttagaactgaatggacacactcaaaagataacagctattattacatttccttccttggaatcttgtgaagagaaaaatcaactcatcttgacagcctctgctgatagaacagttattgtgtgggatggtgatactaccagacaagttcagagaatatcatgcttccagtctactgtaaagtgtttaactgttcttcagagactagatgtttggctttctggtgggaatgacctgtgtgtgtggaaccgaaaattagatctcctgtgtaagactagccacctttctgatacaggtattagtgctttggttgaaatacctaagaactgtgttgtggcagcagttggcaaagaactgataattttcaggttggtagcacccacagaaggatcactagaatgggatattcttgaagttaagcgcctccttgatcaccaggataatattctctcattgattaatgtcaatgatttgagttttgtcaccggctcccacgtcggagagctgatcatctgggatgccctggactggaccatgcaggcctatgaacgcaacttctgggacccatctccacaactggacacccaacaagaaataaaactctgtcaaaaatcaaatgacatttctattcatcatttcacatgtgatgaagagaatgtatttgctgcagttggaaggggtttatacgtgtatagccttcaaatgaagcgtgtgattgcctgccagaaaactgcacatgactccaatgtcctgcacattgccagacttccaaacaggcagttaatctcatgctcagaagatggcagtgtacgcatttgggagttaagagaaaaacagcagcttgcagctgagcctgtaccaacaggtttttttaacatgtggggatttggaagagtcagcaaacaagccagccaacctgttaaaaagcagcaagaaaatgctacttcatgttcactggagcttattggagatttgattggacactcatcatctgtggagatgtttctatactttgaagatcatggactagtgacgtgctccgctgatcatctcattattttgtggaaaaatggagagcgagaatctggattgcgcagtttaagattatttcaaaaattagaggagaatggtgacttataccttgctgtctagtttaaggaattaaaaatacacatgcatgaaccttgaacatcaaatatcgggtactactctgaaaaccattaatatattgatcacttaaattggtaattttttttgtcagtccataaaattctacatgtttaaattttttgtggacctaccaaccaggaacatgttgcttctcaggtcctagtatatcctccaaagaatataccacaagtttttccatttgactttgagctgctgttgaagtggtgagtgctgtgttttgagcttattttgaacctagatccttgtgaaaggtacaaatagaggtaatagttaagttatggcatttattagaagttttattatttggcttcctttagaattattgtgaagtttaaaaatagcctttctcctgcaaattttcctagtctttagtaactgttagtgttctatatagcacaaacttgaatctctcagccaaaaaagggaacatatatactgtttaagtatggcaagttttctttggtaccaatttgtttagataattttaaaaatgttttttagttctagctactaaaacctgtatgaactcaaatggataggcatcttgtgagggtgtgtttttcccagtgtgaattggcttgaagagccatgggctaaatgggtactagaacaacaactgcccctcatgtacgccaaggatgagctctagatcatttgagaggcacagtgtttccggagtcagggactgcagctgagcgcaactgccccatctgaccactgactcaaatacgaactgcttgagacagacttcttttatgtagttctttgcagtgtccattgagacactataaccagccttgtaacaatatgttttctccttttggtgctaaaaaataaaaatattagaaagtagtctacacattaaagattgaaattcttaaactactgatgaagaaagggcaacgtgacagatgttagcagactgacccttcttacagaaaacctacagatttatttgttcattatacaaatatactacaaatataccctaaagggaatctccataagttcttttactagttttagctttgacagttgcttccacaactacctacaaagactggaagagttaaggtcatctgagtagaccagtggcataatgttacaaatgaggaaactgaggcccagtgcagtaaggccttgcaattaaatctgtagtgcccagtatcaccaagcagctctaaaaacaggaactgaagactgaatgagaaaaggcttatatgactactttaaatccaaacaacattgagtcatgaaaagttctatggagaaatattttcctttagaaattctgcattggcccatacatttgtaaagttgttttctgaagttgtatgacacaagggagccatagacttaactgttttacttcctagcctgttctaggctagtattttgtgatagtaatctattcaaatggagtggtagaaatcacatgaattttggaagcaaatggtaccgtaagtaccacagcaaattccttctggtcattatacaggcgtacctcagagatactacaggttaggtttcagaccacatcaaaaaagcaactattgcaaatagagtgagtcacatctagtttttggtttcccagtgcctataaaacttgtgtttatactacagtcttaaatttctaaaaaatgtacataccttaagaatactttattgctaaaaaatgctaacaatcatctgagccttcagcgagtcataatctttttgctggtggagggtcttgatactgctggctgttgactaaggtggttactgaaggttggggtggctgtggcagttccttaaaataagatagcgatgaagttttccaaatcaattgacttcctttcacaaatgagatctctgtaacatgtaatactatttaatagcattttacccacagtagaacttctttcaaaatttagagtctgtcatctcaaatcctgatgctcctttatgaactaagtttatagaatattctaaatcctttgttgtcatttcaactatgtttacagcatcttcactgtggaaatgactgtctccagaaaccactttctatacacattcttaagcaacttctcatctattaaagtttgatcatgagattacagcaattcattcacatcttcaggctccacttcttccagactccttttaatgctggaattttgaccgcctcccatgaatcagaatgttcttagtggcatctagaatgctaaatgcttcccagaaggttttcaattgactttgcccagactcttcagaggaatcactagttagggcagctacagccttattaaatgtatttcttaaataaataagacttaaaagtcaaagtgactccttgacccatggactgcagcatagatgttgtggtagctggcacgaagacaacatgaacctccttgtacatctccatcagaactcttaggtgaccaggtaacattgtaatgggcagtaatatttggaaagaaatttgagcaggtctcaaccataggcttaaatattcaataaaccatgctataaaca

SEQ ID NO: 351785 - DNA, 4205 bp, Homo sapiens
gcgcgccccgcaatcgccgcagccgcccccgccgtcggccgccgcaccccaagcgactgcccaaactaagcctccgtggctgggtacgggagcgctttggggacaaaaattctccctcaactgtggtctgcattccttcggcccgtgggctgatctggggcgggaagtattagcgtctcagttgcgctgcagccggggaggaaggaggaggccgagcctggggcggagtttgggctgactggggctggaccgggcaagacgccgccgctgcccggatgttgcgatggctgatcgggggaggccgagaaccgcagggactggccgagaaatctcctttacagacaataggtgaagaacaaacccagaatccctacactgaactgctagtactgaaggctcatcatgatattgtacgatttctggtacagttagatgactacagatttgcatctgctggtgatgatggaattgtagttgtgtggaatgcccagacaggggaaaaacttttagaactgaatggacacactcaaaagataacagctattattacatttccttccttggaatcttgtgaagagaaaaatcaactcatcttgacagcctctgctgatagaacagttattgtgtgggatggtgatactaccagacaagttcagagaatatcatgcttccagtctactgtaaagtgtttaactgttcttcagagactagatgtttggctttctggtgggaatgacctgtgtgtgtggaaccgaaaattagatctcctgtgtaagactagccacctttctgatacagtaattttcaggttggtagcacccacagaaggatcactagaatgggatattcttgaagttaagcgcctccttgatcaccaggataatattctctcattgattaatgtcaatgatttgagttttgtcaccggctcccacgtcggagagctgatcatctgggatgccctggactggaccatgcaggcctatgaacgcaacttctgggacccatctccacaactggacacccaacaagaaataaaactctgtcaaaaatcaaatgacatttctattcatcatttcacatgtgatgaagagaatgtatttgctgcagttggaaggggtttatacgtgtatagccttcaaatgaagcgtgtgattgcctgccagaaaactgcacatgactccaatgtcctgcacattgccagacttccaaacaggcagttaatctcatgctcagaagatggcagtgtacgcatttgggagttaagagaaaaacagcagcttgcagctgagcctgtaccaacaggtttttttaacatgtggggatttggaagagtcagcaaacaagccagccaacctgttaaaaagcagcaagaaaatgctacttcatgttcactggagcttattggagatttgattggacactcatcatctgtggagatgtttctatactttgaagatcatggactagtgacgtgctccgctgatcatctcattattttgtggaaaaatggagagcgagaatctggattgcgcagtttaagattatttcaaaaattagaggagaatggtgacttataccttgctgtctagtttaaggaattaaaaatacacatgcatgaaccttgaacatcaaatatcgggtactactctgaaaaccattaatatattgatcacttaaattggtaattttttttgtcagtccataaaattctacatgtttaaattttttgtggacctaccaaccaggaacatgttgcttctcaggtcctagtatatcctccaaagaatataccacaagtttttccatttgactttgagctgctgttgaagtggtgagtgctgtgttttgagcttattttgaacctagatccttgtgaaaggtacaaatagaggtaatagttaagttatggcatttattagaagttttattatttggcttcctttagaattattgtgaagtttaaaaatagcctttctcctgcaaattttcctagtctttagtaactgttagtgttctatatagcacaaacttgaatctctcagccaaaaaagggaacatatatactgtttaagtatggcaagttttctttggtaccaatttgtttagataattttaaaaatgttttttagttctagctactaaaacctgtatgaactcaaatggataggcatcttgtgagggtgtgtttttcccagtgtgaattggcttgaagagccatgggctaaatgggtactagaacaacaactgcccctcatgtacgccaaggatgagctctagatcatttgagaggcacagtgtttccggagtcagggactgcagctgagcgcaactgccccatctgaccactgactcaaatacgaactgcttgagacagacttcttttatgtagttctttgcagtgtccattgagacactataaccagccttgtaacaatatgttttctccttttggtgctaaaaaataaaaatattagaaagtagtctacacattaaagattgaaattcttaaactactgatgaagaaagggcaacgtgacagatgttagcagactgacccttcttacagaaaacctacagatttatttgttcattatacaaatatactacaaatataccctaaagggaatctccataagttcttttactagttttagctttgacagttgcttccacaactacctacaaagactggaagagttaaggtcatctgagtagaccagtggcataatgttacaaatgaggaaactgaggcccagtgcagtaaggccttgcaattaaatctgtagtgcccagtatcaccaagcagctctaaaaacaggaactgaagactgaatgagaaaaggcttatatgactactttaaatccaaacaacattgagtcatgaaaagttctatggagaaatattaaaacttaagctacctcaattacagaagactttctcccattattcacgtgctttttcctttagaaattctgcattggcccatacatttgtaaagttgttttctgaagttgtatgacacaagggagccatagacttaactgttttacttcctagcctgttctaggctagtattttgtgatagtaatctattcaaatggagtggtagaaatcacatgaattttggaagcaaatggtaccgtaagtaccacagcaaattccttctggtcattatacaggcgtacctcagagatactacaggttaggtttcagaccacatcaaaaaagcaactattgcaaatagagtgagtcacatctagtttttggtttcccagtgcctataaaacttgtgtttatactacagtcttaaatttctaaaaaatgtacataccttaagaatactttattgctaaaaaatgctaacaatcatctgagccttcagcgagtcataatctttttgctggtggagggtcttgatactgctggctgttgactaaggtggttactgaaggttggggtggctgtggcagttccttaaaataagatagcgatgaagttttccaaatcaattgacttcctttcacaaatgagatctctgtaacatgtaatactatttaatagcattttacccacagtagaacttctttcaaaatttagagtctgtcatctcaaatcctgatgctcctttatgaactaagtttatagaatattctaaatcctttgttgtcatttcaactatgtttacagcatcttcactgtggaaatgactgtctccagaaaccactttctatacacattcttaagcaacttctcatctattaaagtttgatcatgagattacagcaattcattcacatcttcaggctccacttcttccagactccttttaatgctggaattttgaccgcctcccatgaatcagaatgttcttagtggcatctagaatgctaaatgcttcccagaaggttttcaattgactttgcccagactcttcagaggaatcactagttagggcagctacagccttattaaatgtatttcttaaataaataagacttaaaagtcaaagtgactccttgacccatggactgcagcatagatgttgtggtagctggcacgaagacaacatgaacctccttgtacatctccatcagaactcttaggtgaccaggtaacattgtaatgggcagtaatatttggaaagaaatttgagcaggtctcaaccataggcttaaatattcaataaaccatgctataaaca

SEQ ID NO: 351786 - DNA, 4224 bp, Homo sapiens
gcgcgccccgcaatcgccgcagccgcccccgccgtcggccgccgcaccccaagcgactgcccaaactaagcctccgtggctgggtacgggagcgctttggggacaaaaattctccctcaactgtggtctgcattccttcggcccgtgggctgatctggggcgggaagtattagcgtctcagttgcgctgcagccggggaggaaggaggaggccgagcctggggcggagtttgggctgactggggctggaccgggcaagacgccgccgctgcccggatgttgcgatggctgatcgggggaggccgagaaccgcagggactggccgagaaatctcctttacagacaataggtgaagaacaaacccagaatccctacactgaactgctagtactgaaggctcatcatgatattgtacgatttctggtacagttagatgactacagatttgcatctgctggtgatgatggaattgtagttgtgtggaatgcccagacaggggaaaaacttttagaactgaatggacacactcaaaagataacagctattattacatttccttccttggaatcttgtgaagagagtgtgggatggtgatactaccagacaagttcagagaatatcatgcttccagtctactgtaaagtgtttaactgttcttcagagactagatgtttggctttctggtgggaatgacctgtgtgtgtggaaccgaaaattagatctcctgtgtaagactagccacctttctgatacaggtattagtgctttggttgaaatacctaagaactgtgttgtggcagcagttggcaaagaactgataattttcaggttggtagcacccacagaaggatcactagaatgggatattcttgaagttaagcgcctccttgatcaccaggataatattctctcattgattaatgtcaatgatttgagttttgtcaccggctcccacgtcggagagctgatcatctgggatgccctggactggaccatgcaggcctatgaacgcaacttctgggacccatctccacaactggacacccaacaagaaataaaactctgtcaaaaatcaaatgacatttctattcatcatttcacatgtgatgaagagaatgtatttgctgcagttggaaggggtttatacgtgtatagccttcaaatgaagcgtgtgattgcctgccagaaaactgcacatgactccaatgtcctgcacattgccagacttccaaacaggcagttaatctcatgctcagaagatggcagtgtacgcatttgggagttaagagaaaaacagcagcttgcagctgagcctgtaccaacaggtttttttaacatgtggggatttggaagagtcagcaaacaagccagccaacctgttaaaaagcagcaagaaaatgctacttcatgttcactggagcttattggagatttgattggacactcatcatctgtggagatgtttctatactttgaagatcatggactagtgacgtgctccgctgatcatctcattattttgtggaaaaatggagagcgagaatctggattgcgcagtttaagattatttcaaaaattagaggagaatggtgacttataccttgctgtctagtttaaggaattaaaaatacacatgcatgaaccttgaacatcaaatatcgggtactactctgaaaaccattaatatattgatcacttaaattggtaattttttttgtcagtccataaaattctacatgtttaaattttttgtggacctaccaaccaggaacatgttgcttctcaggtcctagtatatcctccaaagaatataccacaagtttttccatttgactttgagctgctgttgaagtggtgagtgctgtgttttgagcttattttgaacctagatccttgtgaaaggtacaaatagaggtaatagttaagttatggcatttattagaagttttattatttggcttcctttagaattattgtgaagtttaaaaatagcctttctcctgcaaattttcctagtctttagtaactgttagtgttctatatagcacaaacttgaatctctcagccaaaaaagggaacatatatactgtttaagtatggcaagttttctttggtaccaatttgtttagataattttaaaaatgttttttagttctagctactaaaacctgtatgaactcaaatggataggcatcttgtgagggtgtgtttttcccagtgtgaattggcttgaagagccatgggctaaatgggtactagaacaacaactgcccctcatgtacgccaaggatgagctctagatcatttgagaggcacagtgtttccggagtcagggactgcagctgagcgcaactgccccatctgaccactgactcaaatacgaactgcttgagacagacttcttttatgtagttctttgcagtgtccattgagacactataaccagccttgtaacaatatgttttctccttttggtgctaaaaaataaaaatattagaaagtagtctacacattaaagattgaaattcttaaactactgatgaagaaagggcaacgtgacagatgttagcagactgacccttcttacagaaaacctacagatttatttgttcattatacaaatatactacaaatataccctaaagggaatctccataagttcttttactagttttagctttgacagttgcttccacaactacctacaaagactggaagagttaaggtcatctgagtagaccagtggcataatgttacaaatgaggaaactgaggcccagtgcagtaaggccttgcaattaaatctgtagtgcccagtatcaccaagcagctctaaaaacaggaactgaagactgaatgagaaaaggcttatatgactactttaaatccaaacaacattgagtcatgaaaagttctatggagaaatattaaaacttaagctacctcaattacagaagactttctcccattattcacgtgctttttcctttagaaattctgcattggcccatacatttgtaaagttgttttctgaagttgtatgacacaagggagccatagacttaactgttttacttcctagcctgttctaggctagtattttgtgatagtaatctattcaaatggagtggtagaaatcacatgaattttggaagcaaatggtaccgtaagtaccacagcaaattccttctggtcattatacaggcgtacctcagagatactacaggttaggtttcagaccacatcaaaaaagcaactattgcaaatagagtgagtcacatctagtttttggtttcccagtgcctataaaacttgtgtttatactacagtcttaaatttctaaaaaatgtacataccttaagaatactttattgctaaaaaatgctaacaatcatctgagccttcagcgagtcataatctttttgctggtggagggtcttgatactgctggctgttgactaaggtggttactgaaggttggggtggctgtggcagttccttaaaataagatagcgatgaagttttccaaatcaattgacttcctttcacaaatgagatctctgtaacatgtaatactatttaatagcattttacccacagtagaacttctttcaaaatttagagtctgtcatctcaaatcctgatgctcctttatgaactaagtttatagaatattctaaatcctttgttgtcatttcaactatgtttacagcatcttcactgtggaaatgactgtctccagaaaccactttctatacacattcttaagcaacttctcatctattaaagtttgatcatgagattacagcaattcattcacatcttcaggctccacttcttccagactccttttaatgctggaattttgaccgcctcccatgaatcagaatgttcttagtggcatctagaatgctaaatgcttcccagaaggttttcaattgactttgcccagactcttcagaggaatcactagttagggcagctacagccttattaaatgtatttcttaaataaataagacttaaaagtcaaagtgactccttgacccatggactgcagcatagatgttgtggtagctggcacgaagacaacatgaacctccttgtacatctccatcagaactcttaggtgaccaggtaacattgtaatgggcagtaatatttggaaagaaatttgagcaggtctcaaccataggcttaaatattcaataaaccatgctataaaca

SEQ ID NO: 351787 - DNA, 2556 bp, Homo sapiens
gcgcgccccgcaatcgccgcagccgcccccgccgtcggccgccgcaccccaagcgactgcccaaactaagcctccgtggctgggtacgggagcgctttggggacaaaaattctccctcaactgtggtctgcattccttcggcccgtgggctgatctggggcgggaagtattagcgtctcagttgcgctgcagccggggaggaaggaggaggccgagcctggggcggagtttgggctgactggggctggaccgggcaagacgccgccgctgcccggatgttgcgatggctgatcgggggaggccgagaaccgcagggactggccgagaaatctcctttacagacaataggtgaagaacaaacccagaatccctacactgaactgctagtactgaaggctcatcatgatattgtacgatttctggtacagttagatgactacagatttgcatctgctggtgatgatggaattgtagttgtgtggaatgcccagacaggggaaaaacttttagaactgaatggacacactcaaaagataacagctattattacatttccttccttggaatcttgtgaagagaaaaatcaactcatcttgacagcctctgctgatagaacagttattgtgtgggatggtgatactaccagacaagttcagagaatatcatgcttccagtctactgtaaagtgtttaactgttcttcagagactagatgtttggctttctggtgggaatgacctgtgtgtgtggaaccgaaaattagatctcctgtgtaagactagccacctttctgatacaggtattagtgctttggttgaaatacctaagaactgtgttgtggcagcagttggcaaagaactgataattttcaggttggtagcacccacagaaggatcactagaatgggatattcttgaagttaagcgcctccttgatcaccaggataatattctctcattgattaatgtcaatgatttgagttttgtcaccggctcccacgtcggagagctgatcatctgggatgccctggactggaccatgcaggcctatgaacgcaacttctgggacccatctccacaactggacacccaacaagaaataaaactctgtcaaaaatcaaatgacatttctattcatcatttcacatgtgatgaagagaatgtatttgctgcagttggaaggggtttatacgtgtatagccttcaaatgaagcgtgtgattgcctgccagaaaactgcacatgactccaatgtcctgcacattgccagacttccaaacaggcagttaatctcatgctcagaagatggcagtgtacgcatttgggagttaagagaaaaacagcagcttgcagctgagcctgtaccaacaggtttttttaacatgtggggatttggaagagtcagcaaacaagccagccaacctgttaaaaagcagcaagaaaatgctacttcatgttcactggagcttattggagatttgattggacactcatcatctgtggagatgtttctatactttgaagatcatggactagtgacgtgctccgctgatcatctcattattttgtggaaaaatggagagcgagaatctggattgcgcagtttaagattatttcaaaaattagaggagaatggtgacttataccttgctgtctagtttaaggaattaaaaatacacatgcatgaaccttgaacatcaaatatcgggtactactctgaaaaccattaatatattgatcacttaaattggtaattttttttgtcagtccataaaattctacatgtttaaattttttgtggacctaccaaccaggaacatgttgcttctcaggtcctagtatatcctccaaagaatataccacaagtttttccatttgactttgagctgctgttgaagtgataaatctgttcagataagctccttatgaatccttcagatcgatgttcttgaggaaaacagtcaagctaaacagcaatgatgacttttatggtaaaggatgagctgatcactagctaagctacttagtcaccatcctgggagatgagctcacaggcaccaaggctttgcttcctgtggcctgctagttacagtgaaccagctccatggattgacaagggtacacaggatgacagcagagcaaaggagtttgccaagtatttgttctgtcattaagtattcaaaagaacatatatttttcttcatggaacataactttctaagaatgaaatttggggacttgaatgattcaaggtcaaatattaaacattagctccttcaccaatacctgtcattgtcattagaaaggaaggcctcttgtttacgctactgtgattcacagtgtcctttgtcggtcaagaggccccctctgtggcttggctttagctgtcagatggaagcctcaaacttttgcactttaggtcatctagtgtcttccagtgtttgtagttgtcagccaaatgttgcatcagggctggcagatgtgcaaaggcatcccaagcatcaaacatctctttcattgactacttcataacagacatgtttgatgttggagcggccg

SEQ ID NO: 351788 - DNA, 2279 bp, Homo sapiens
gcgcgccccgcaatcgccgcagccgcccccgccgtcggccgccgcaccccaagcgactgcccaaactaagcctccgtggctgggtacgggagcgctttggggacaaaaattctccctcaactgtggtctgcattccttcggcccgtgggctgatctggggcgggaagtattagcgtctcagttgcgctgcagccggggaggaaggaggaggccgagcctggggcggagtttgggctgactggggctggaccgggcaagacgccgccgctgcccggatgttgcgatggctgatcgggggaggccgagaaccgcagggactggccgagaaatctcctttacagacaataggtgaagaacaaacccagaatccctacactgaactgctagtactgaaggctcatcatgatattgtacgatttctggtacagttagatgactacagatttgcatctgctggtgatgatggaattgtagttgtgtggaatgcccagacaggggaaaaacttttagaactgaatggacacactcaaaagataacagctattattacatttccttccttggaatcttgtgaagagaaaaatcaactcatcttgacagcctctgctgatagaacagttattgtgtgggatggtgatactaccagacaagttcagagaatatcatgcttccagtctactgtaaagtgtttaactgttcttcagagactagatgtttggctttctggtgggaatgacctgtgtgtgtggaaccgaaaattagatctcctgtgtaagactagccacctttctgatacaggtattagtgctttggttgaaatacctaagaactgtgttgtggcagcagttggcaaagaactgataattttcaggttggtagcacccacagaaggatcactagaatgggatattcttgaagttaagcgcctccttgatcaccaggataatattctctcattgattaatgtcaatgatttgagttttgtcaccggctcccacgtcggagagctgatcatctgggatgccctggactggaccatgcaggcctatgaacgcaacttctgggacccatctccacaactggacacccaacaagaaataaaactctgtcaaaaatcaaatgacatttctattcatcatttcacatgtgatgaagagaatgtatttgctgcagttggaaggggtttatacgtgtatagccttcaaatgaagcgtgtgattgcctgccagaaaactgcacatgactccaatgtcctgcacattgccagacttccaaacaggcagttaatctcatgctcagaagatggcagtgtacgcatttgggagttaagagaaaaacagcagcttgcagctgagcctgtaccaacaggtttttttaacatgtggggatttggaagagtcagcaaacaagccagccaacctgttaaaaagcagcaagaaaatgctacttcatgttcactggagcttattggagatttgattggacactcatcatctgtggagatgtttctatactttgaagatcatggactagtgacgtgctccgctgatcatctcattattttgtggaaaaatggagagcgagaatctggattgcgcagtttaagattatttcaaaaattagaggagaatggtgacttataccttgctgtctagtttaaggaattaaaaatacacatgcatgaaccttgaacatcaaatatcgggtactactctgaaaaccattaatatattgatcacttaaattggtaattttttttgtcagtccataaaattctacatgtttaaattttttgtggacctaccaaccaggaacatgttgcttctcaggtcctagtatatcctccaaagaatataccacaagtttttccatttgactttgagctgctgttgaagtgataaatctgttcagataagctccttatgaatccttcagatcgatgttcttgaggaaaacagtcaagctaaacagcaatgatgacttttatggtaaaggatgagctgatcactagctaagctacttagtcaccatcctgggagatgagctcacaggcaccaaggctttgcttcctgtggcctgctagttacagtgaaccagctccatggattgacaagggtacacaggatgacagcagagcaaaggagtttgccaagtatttgttctgtcattaagtattcaaaagaacatatatttttcttcatggaacataactttctaagaatgaaatttggggacttgaatgattcaaggtcaaatattaaacattagctccttcacca

SEQ ID NO: 351789 - DNA, 1219 bp, Homo sapiens
gcgcgccccgcaatcgccgcagccgcccccgccgtcggccgccgcaccccaagcgactgcccaaactaagcctccgtggctgggtacgggagcgctttggggacaaaaattctccctcaactgtggtctgcattccttcggcccgtgggctgatctggggcgggaagtattagcgtctcagttgcgctgcagccggggaggaaggaggaggccgagcctggggcggagtttgggctgactggggctggaccgggcaagacgccgccgctgcccggatgttgcgatggctgatcgggggaggccgagaaccgcagggactggccgagaaatctcctttacagacaataggtgaagaacaaacccagaatccctacactgaactgctagtactgaaggctcatcatgatattgtacgatttctggtacagttagatgactacagatttgcatctgctggtgatgatggaattgtagttgtgtggaatgcccagacaggggaaaaacttttagaactgaatggacacactcaaaagataacagctattattacatttccttccttggaatcttgtgaagagaaaaatcaactcatcttgacagcctctgctgatagaacagttattgtgtgggatggtgatactaccagacaagttcagagaatatcatgcttccagtctactgtaaagtgtttaactgttcttcagagactagatgtttggctttctggtgggaatgacctgtgtgtgtggaaccgaaaattagatctcctgtgtaagactagccacctttctgatacaggtattagtgctttggttgaaatacctaagaactgtgttgtggcagcagttggcaaagaactgataattttcaggttggtagcacccacagaaggatcactagaatgggatattcttgaagttaagcgcctccttgatcaccaggataatattctctcattgattaatgtcaatgacaggggaaaaacttttagaactgaatggacacactcaaaagataacagctattattacatttccttccttggaatcttgtgaagagaaaaatcaactcatcttgacagcctctgctgatagaacagttattgtgtgggatggtgatactaccagacaagttcagagaatatcatgcttccagtctactgtaaagtgtttaactgttcttcagagactagatgtttggctttctggtgggcaatgac

SEQ ID NO: 351790 - DNA, 2024 bp, Homo sapiens
  misc_feature (42)..(44): n is a, c, g, or t
gcggccgcctactactactactactactactactactactgnnngaattcaagcttctaacgatgtacggggaccatgtacgccaaggatgagctctagatcatttgagaggcacagtgtttccggagtcagggactgcagctgagcgcaactgccccatctgaccactgactcaaatacgaactgcttgagacagacttcttttatgtagttctttgcagtgtccattgagacactataaccagccttgtaacaatatgttttctccttttggtgctaaaaaataaaaatattagaaagtagtctacacattaaagattgaaattcttaaactactgatgaagaaagggcaacgtgacagatgttagcagactgacccttcttacagaaaacctacagatttatttgttcattatacaaatatactacaaatataccctaaagggaatctccataagttcttttactagttttagctttgacagttgcttccacaactacctacaaagactggaagagttaaggtcatctgagtagaccagtggcataatgttacaaatgaggaaactgaggcccagtgcagtaaggccttgcaattaaatctgtagtgcccagtatcaccaagcagctctaaaaacaggaactgaagactgaatgagaaaaggcttatatgactactttaaatccaaacaacattgagtcatgaaaagttctatggagaaatattaaaacttaagctacctcaattacagaagactttctcccattattcacgtgctttttcctttagaaattctgcattggcccatacatttgtaaagttgttttctgaagttgtatgacacaagggagccatagacttaactgttttacttcctagcctgttctaggctagtattttgtgatagtaatctattcaaatggagtggtagaaatcacatgaattttggaagcaaatggtaccgtaagtaccacagcaaattccttctggtcattatacaggcgtacctcagagatactacaggttaggtttcagaccacatcaaaaaagcaactattgcaaatagagtgagtcacatctagtttttggtttcccagtgcctataaaacttgtgtttatactacagtcttaaatttctaaaaaatgtacataccttaagaatactttattgctaaaaaatgctaacaatcatctgagccttcagcgagtcataatctttttgctggtggagggtcttgatactgctggctgttgactaaggtggttactgaaggttggggtggctgtggcagttccttaaaataagatagcgatgaagttttccaaatcaattgacttcctttcacaaatgagatctctgtaacatgtaatactatttaatagcattttacccacagtagaacttctttcaaaatttagagtctgtcatctcaaatcctgatgctcctttatgaactaagtttatagaatattctaaatcctttgttgtcatttcaactatgtttacagcatcttcactgtggaaatgactgtctccagaaaccactttctatacacattcttaagcaacttctcatctattaaagtttgatcatgagattacagcaattcattcacatcttcaggctccacttcttccagactccttttaatgctggaattttgaccgcctcccatgaatcagaatgttcttagtggcatctagaatgctaaatgcttcccagaaggttttcaattgactttgcccagactcttcagaggaatcactagttagggcagctacagccttattaaatgtatttcttaaataaataagacttaaaagtcaaagtgactccttgacccatggactgcagcatagatgttgtggtagctggcacgaagacaacatgaacctccttgtacatctccatcagaactcttaggtgaccaggtaacattgtaatgggcagtaatatttggaaagaaatttgagcaggtctcaaccataggcttaaatattcaataaaccatgctataaaca

SEQ ID NO: 351791 - DNA, 550 bp, Homo sapiens
aaaatcaactcatcttgacagcctctgctgatagaacagttattgtatcctttaatctggaagaaatgaacaagctgtagtggcctaaggagccactacatacactattagtctttagctgatagggtcttgtctgtatattcttgttatagcaaaaatgatttttgttctgttacttataagataccatttattaggtatctgaaaagtattagactggaaataggaggttaaggcttgttattgatggaaactccgtgactattgctgttctttccagagttactctatcaggttgtataaaattgatgaaatgggaaaatgtggacttaaaaataatttattttactatctcagtttgcttttcaatttagggaaacaacgatgagttggactggagaataatttacattttttttccccactatacagcagaagaaaccaaatggtcccaacccataaaaatctttggagcatctgagtctgatagaaaagtgaattactgtttgttcagtgtgtaatatttaataattaaaaacaattttataaa

SEQ ID NO: 351792 - DNA, 236 bp, Homo sapiens
tagacattccattcagttatatctttacatagataaaatgatcgataatgaggcatatgtgaactttgcctagatttgagttttgtcaccggctcccacgtcggagagctgatcatctgggatgccctggactggaccatgcaggcctatgaacgcaacttctgggacccatctccacaactggacacccaacaagaaataaaactctgtcaaaaatcaaatgacatttctattca

SEQ ID NO: 351793 - DNA, 468 bp, Homo sapiens
ctgcaaagacagaaaagaatcaaaagaaaccggtgaacttagaccccaggagcatttataagcctgggggtgtctgggacaagtttgggatcagaattagaggaggcacaccctgggcgaagcatgaggacaagtcattaaacactagtttctgaaatgcaaacaggtcctttttgaaaagctgcttatcagtgacattatcagaagaacctgtgattcagagtaaactaaatacattttgcattctttctagagttttcctccaacgacagaaaaacactgcagtaagctttggcagcgtgtcctttgaagaggcagagactcgtttatccagctatcaaaaatccatcaagtcttctgcacacaagcttctgtgccagctgctggggatgcaaagaatgcaccccaccccacttggccacaaaaagctgacagccacatttttaaaaatatattttgtttaccttt

SEQ ID NO: 351794 - DNA, 423 bp, Homo sapiens
ctgtttaagtatggcaagttttctttggtaccaatttgtttagataattttaaaaatgttttttagttctagctactaaaacctgtatgaactcaaatggataggcatcttgtgagggtgtgtttttcccagtgtgaattggcttgaagagccatgggctaaatgggtactagaacaacaactgcccctcatgtacgccaaggatgagctctagatcatttgagaggcacagtgtttccggagtcagggactgcagctgagcgcaactgccccatctgaccactgactcaaatacgaactgcttgagacagacttcttttatgtagttctttgcagtgtccattgagacactataaccagccttgtaacaatatgttttctccttttggtgctaaaaaataaaaatattagaaagtagtctac

SEQ ID NO: 351795 - DNA, 1697 bp, Homo sapiens
gcgcgccccgcaatcgccgcagccgcccccgccgtcggccgccgcaccccaagcgactgcccaaactaagcctccgtggctgggtacgggagcgctttggggacaaaaattctccctcaactgtggtctgcattccttcggcccgtgggctgatctggggcgggaagtattagcgtctcagttgcgctgcagccggggaggaaggaggaggccgagcctggggcggagtttgggctgactggggctggaccgggcaagacgccgccgctgcccggatgttgcgatggctgatcgggggaggccgagaaccgcagggactggccgagaaatctcctttacagacaataggtgaagaacaaacccagaatccctacactgaactgctagtactgaaggctcatcatgatattgtacgatttctggtacagttagatgactacagatttgcatctgctggtgatgatggaattgtagttgtgtggaatgcccagacaggggaaaaacttttagaactgaatggacacactcaaaagataacagctattattacatttccttccttggaatcttgtgaagagaaaaatcaactcatcttgacagcctctgctgatagaacagttattgtgtgggatggtgatactaccagacaagttcagagaatatcatgcttccagtctactgtaaagtgtttaactgttcttcagagactagatgtttggctttctggtgggaatgacctgtgtgtgtggaaccgaaaattagatctcctgtgtaagactagccacctttctgatacaggtattagtgctttggttgaaatacctaagaactgtgttgtggcagcagttggcaaagaactgataattttcaggttggtagcacccacagaaggatcactagaatgggatattcttgaagttaagcgcctccttgatcaccaggataatattctctcattgattaatgtcaatgatttgagttttgtcaccggctcccacgtcggagagctgatcatctgggatgccctggactggaccatgcaggcctatgaacgcaacttctgggacccatctccacaactggacacccaacaagaaataaaactctgtcaaaaatcaaatgacatttctattcatcatttcacatgtgatgaagagaatgtatttgctgcagttggaaggggtttatacgtgtatagccttcaaatgaagcgtgtgattgcctgccagaaaactgcacatgactccaatgtcctgcacattgccagacttccaaacaggcagttaatctcatgctcagaagatggcagtgtacgcatttgggagttaagagaaaaacagcagcttgcagctgagcctgtaccaacaggtttttttaacatgtggggatttggaagagtcagcaaacaagccagccaacctgttaaaaagcagcaagaaaatgctacttcatgttcactggagcttattggagatttgattggacactcatcatctgtggagatgtttctatactttgaagatcatggactagtgacgtgctccgctgatcatctcattattttgtggaaaaatggagagcgagaatctggattgcgcagtttaagattatttcaaaaattagaggagaatggtgacttataccttgctgtctagtttaaggaattaaaaatacacatgcatgaaccttgaacatca

SEQ ID NO: 351796 - DNA, 4268 bp, Homo sapiens
gcgcgccccgcaatcgccgcagccgcccccgccgtcggccgccgcaccccaagcgactgcccaaactaagcctccgtggctgggtacgggagcgctttggggacaaaaattctccctcaactgtggtctgcattccttcggcccgtgggctgatctggggcgggaagtattagcgtctcagttgcgctgcagccggggaggaaggaggaggccgagcctggggcggagtttgggctgactggggctggaccgggcaagacgccgccgctgcccggatgttgcgatggctgatcgggggaggccgagaaccgcagggactggccgagaaatctcctttacagacaataggtgaagaacaaacccagaatccctacactgaactgctagtactgaaggctcatcatgatattgtacgatttctggtacagttagatgactacagatttgcatctgctggtgatgatggaattgtagttgtgtggaatgcccagacaggggaaaaacttttagaactgaatggacacactcaaaagataacagctattattacatttccttccttggaatcttgtgaagagaaaaatcaactcatcttgacagcctctgctgatagaacagttattgtgtgggatggtgatactaccagacaagttcagagaatatcatgcttccagtctactgtaaagtgtttaactgttcttcagagactagatgtttggctttctggtgggaatgacctgtgtgtgtggaaccgaaaattagatctcctgtgtaagactagccacctttctgatacaggtattagtgctttggttgaaatacctaagaactgtgttgtggcagcagttggcaaagaactgataattttcaggttggtagcacccacagaaggatcactagaatgggatattcttgaagttaagcgcctccttgatcaccaggataatattctctcattgattaatgtcaatgatttgagttttgtcaccggctcccacgtcggagagctgatcatctgggatgccctggactggaccatgcaggcctatgaacgcaacttctgggacccatctccacaactggacacccaacaagaaataaaactctgtcaaaaatcaaatgacatttctattcatcatttcacatgtgatgaagagaatgtatttgctgcagttggaaggggtttatacgtgtatagccttcaaatgaagcgtgtgattgcctgccagaaaactgcacatgactccaatgtcctgcacattgccagacttccaaacaggcagttaatctcatgctcagaagatggcagtgtacgcatttgggagttaagagaaaaacagcagcttgcagctgagcctgtaccaacaggtttttttaacatgtggggatttggaagagtcagcaaacaagccagccaacctgttaaaaagcagcaagaaaatgctacttcatgttcactggagcttattggagatttgattggacactcatcatctgtggagatgtttctatactttgaagatcatggactagtgacgtgctccgctgatcatctcattattttgtggaaaaatggagagcgagaatctggattgcgcagtttaagattatttcaaaaattagaggagaatggtgacttataccttgctgtctagtttaaggaattaaaaatacacatgcatgaaccttgaacatcaaatatcgggtactactctgaaaaccattaatatattgatcacttaaattggtaattttttttgtcagtccataaaattctacatgtttaaattttttgtggacctaccaaccaggaacatgttgcttctcaggtcctagtatatcctccaaagaatataccacaagtttttccatttgactttgagctgctgttgaagtggtgagtgctgtgttttgagcttattttgaacctagatccttgtgaaaggtacaaatagaggtaatagttaagttatggcatttattagaagttttattatttggcttcctttagaattattgtgaagtttaaaaatagcctttctcctgcaaattttcctagtctttagtaactgttagtgttctatatagcacaaacttgaatctctcagccaaaaaagggaacatatatactgtttaagtatggcaagttttctttggtaccaatttgtttagataattttaaaaatgttttttagttctagctactaaaacctgtatgaactcaaatggataggcatcttgtgagggtgtgtttttcccagtgtgaattggcttgaagagccatgggctaaatgggtactagaacaacaactgcccctcatgtacgccaaggatgagctctagatcatttgagaggcacagtgtttccggagtcagggactgcagctgagcgcaactgccccatctgaccactgactcaaatacgaactgcttgagacagacttcttttatgtagttctttgcagtgtccattgagacactataaccagccttgtaacaatatgttttctccttttggtgctaaaaaataaaaatattagaaagtagtctacacattaaagattgaaattcttaaactactgatgaagaaagggcaacgtgacagatgttagcagactgacccttcttacagaaaacctacagatttatttgttcattatacaaatatactacaaatataccctaaagggaatctccataagttcttttactagttttagctttgacagttgcttccacaactacctacaaagactggaagagttaaggtcatctgagtagaccagtggcataatgttacaaatgaggaaactgaggcccagtgcagtaaggccttgcaattaaatctgtagtgcccagtatcaccaagcagctctaaaaacaggaactgaagactgaatgagaaaaggcttatatgactactttaaatccaaacaacattgagtcatgaaaagttctatggagaaatattaaaacttaagctacctcaattacagaagactttctcccattattcacgtgctttttcctttagaaattctgcattggcccatacatttgtaaagttgttttctgaagttgtatgacacaagggagccatagacttaactgttttacttcctagcctgttctaggctagtattttgtgatagtaatctattcaaatggagtggtagaaatcacatgaattttggaagcaaatggtaccgtaagtaccacagcaaattccttctggtcattatacaggcgtacctcagagatactacaggttaggtttcagaccacatcaaaaaagcaactattgcaaatagagtgagtcacatctagtttttggtttcccagtgcctataaaacttgtgtttatactacagtcttaaatttctaaaaaatgtacataccttaagaatactttattgctaaaaaatgctaacaatcatctgagccttcagcgagtcataatctttttgctggtggagggtcttgatactgctggctgttgactaaggtggttactgaaggttggggtggctgtggcagttccttaaaataagatagcgatgaagttttccaaatcaattgacttcctttcacaaatgagatctctgtaacatgtaatactatttaatagcattttacccacagtagaacttctttcaaaatttagagtctgtcatctcaaatcctgatgctcctttatgaactaagtttatagaatattctaaatcctttgttgtcatttcaactatgtttacagcatcttcactgtggaaatgactgtctccagaaaccactttctatacacattcttaagcaacttctcatctattaaagtttgatcatgagattacagcaattcattcacatcttcaggctccacttcttccagactccttttaatgctggaattttgaccgcctcccatgaatcagaatgttcttagtggcatctagaatgctaaatgcttcccagaaggttttcaattgactttgcccagactcttcagaggaatcactagttagggcagctacagccttattaaatgtatttcttaaataaataagacttaaaagtcaaagtgactccttgacccatggactgcagcatagatgttgtggtagctggcacgaagacaacatgaacctccttgtacatctccatcagaactcttaggtgaccaggtaacattgtaatgggcagtaatatttggaaagaaatttgagcaggtctcaaccataggcttaaatattcaataaaccatgctataaaca

SEQ ID NO: 351797 - DNA, 4282 bp, Homo sapiens
gcgcgccccgcaatcgccgcagccgcccccgccgtcggccgccgcaccccaagcgactgcccaaactaagcctccgtggctgggtacgggagcgctttggggacaaaaattctccctcaactgtggtctgcattccttcggcccgtgggctgatctggggcgggaagtattagcgtctcagttgcgctgcagccggggaggaaggaggaggccgagcctggggcggagtttgggctgactggggctggaccgggcaagacgccgccgctgcccggatgttgcgatggctgatcgggggaggccgagaaccgcagggactggccgagaaatctcctttacagacaataggtgaagaacaaacccagaatccctacactgaactgctagtactgaaggctcatcatgatattgtacgatttctggtacagttagatgactacagatttgcatctgctggtgatgatggaattgtagttgtgtggaatgcccagacaggggaaaaacttttagaactgaatggacacactcaaaagataacagctattattacatttccttccttggaatcttgtgaagagaaaaatcaactcatcttgacagcctctgctgatagaacagttattgtgtgggatggtgatactaccagacaagttcagagaatatcatgcttccagtctactgtaaagtgtttaactgttcttcagagactagatgtttggctttctggtgggaatgacctgtgtgtgtggaaccgaaaattagatctcctgtgtaagactagccacctttctgatacaggtattagtgctttggttgaaatacctaagaactgtgttgtggcagcagttggcaaagaactgataattttcaggttggtagcacccacagaaggatcactagaatgggatattcttgaagttaagcgcctccttgatcaccaggataatattctctcattgattaatgtcaatgatttgagttttgtcaccggctcccacgtcggagagctgatcatctgggatgccctggactggaccatgcaggcctatgaacgcaacttctgggacccatctccacaactggacacccaacaagaaataaaactctgtcaaaaatcaaatgacatttctattcatcatttcacatgtgatgaagagaatgtatttgctgcagttggaaggggtttatacgtgtatagccttcaaatgaagcgtgtgattgcctgccagaaaactgcacatgactccaatgtcctgcacattgccagacttccaaacaggcagttaatctcatgctcagaagatggcagtgtacgcatttgggagttaagagaaaaacagcagcttgcagctgagcctgtaccaacaggtttttttaacatgtggggatttggaagagtcagcaaacaagccagccaacctgttaaaaagcagcaagaaaatgctacttcatgttcactggagcttattggagatttgattggacactcatcatctgtggagatgtttctatactttgaagatcatggactagtgacgtgctccgctgatcatctcattattttgtggaaaaatggagagcgagaatctggattgcgcagtttaagattatttcaaaaattagaggagaatggtgacttataccttgctgtctagtttaaggaattaaaaatacacatgcatgaaccttgaacatcaaatatcgggtactactctgaaaaccattaatatattgatcacttaaattggtaattttttttgtcagtccataaaattctacatgtttaaattttttgtggacctaccaaccaggaacatgttgcttctcaggtcctagtatatcctccaaagaatataccacaagtttttccatttgactttgagctgctgttgaagtgataaatctgttcagataagctccttatgaatccttcagatcgatgttcttgaggaaaacagtcaagctaaacagcaatgatgacttttatggtaaaggatgagctgatcactagctaagctacttagtcaccatcctgggagatgagctcacaggcaccaaggctttgcttcctgtggcctgctagttacagtgaaccagctccatggattgacaagggtacacaggatgacagcagagcaaaggagtttgccaagtatttgttctgtcattaagtattcaaaagaacatatatttttcttcatggaacataactttctaagaatgaaatttggggacttgaatgattcaaggtcaaatattaaacattagctccttcaccaatacctgtcattgtcattagaaaggaaggcctcttgtttacgctactgtgattcacagtgtcctttgtcggtcaagaggccccctctgtggcttggctttagctgtcagatggaagcctcaaacttttgcactttaggtcatctagtgtcttccagtgtttgtagttgtcagccaaatgttgcatcagggctggcagatgtgcaaaggcatcccaagcatcaaacatgtctgttatgaagtagtcaatgaaagagatctgagacttggggatgctacaggtattccggtcaaacactggcatcaccacaggtagtccctgtctcttctcttcatcagtctgtgcaaaatactcctcagagatcctcccagcccattcaatgcacaggtccaaggggcggcatgggttggccacgtcagcacacttaatcatcatgcgtttgatcaggatttggttttcagggaagttcttcccagcagggttgcattcacagtcgctgccttcaatctcagctgccattggcttgttgatgctgttcacaaacttattcacatgttcaaagtgttttgtcatctctgttgccaaaaccatgtcaataatagcctggcgcagcgttcgataatggttcctgtcaatattcttgaaaatgttgcatttggtgtccttgaccgtgagctggaaggccagggcggtgtggtgactctccagaacagcagtgtcattgtagagcacagcaagctcactgcctgcattgcagaggaaagagttggtccttcccgggtgatccacgtcatggactgtggcagcaatgagggctgccacctcatccaactgatcgaggcttccctttactctttcctttccaagaaagaaagcggtggcgtgcaggacgtcggcagcatgggtggagttgtggtaggcattggaagagtggtagttggcttcgatcacttggaaccaggcccgaagagtggtttcagaacagtttaaaaactcacatactccaaaccgagagaagacctttaagcccagataaaccaatggccttttatgcgtaatggcttccaattcaaagatgttgaagtcccaactctcctcattatcaagtaattgagagatacaagggggaacatcattgatggttattggcattgcaaggtgactgtgactctggtgcacattcttagtaaacacatactcgtttcctgacagtcttctcaagccgtcagtcatcaggcctccaacaagatcactggtgtggggatcttcatctttggtacccagctgaggggagtacagttctgtggtccgtaaaatctctagaactctgtccaaggcttccgctactgtgactgggctgttttcttgggctgcattgattatatttataacctttgtgatgggagcctcgatggtcatggagtggatcctcgccatggacggatagcgacgattctgcaggcttggtgcatcactgcctcgagatgatatcgatttcacgtcaatggactctttcctcctgttcttatatctgaatgaatgaggctctgtctgagaattgtctcctgaatcacgatgaatcttgtgaatctgcttattattgtcagtggtacaacacagtttcttgagcgagacaaaatgcctaattttccctccttggccaatcactggggtgatcttcacgtgctgttggatgctgtccccggatttccgtctggcatagtaaaccccctgccactcctttcccttcttgatgcatgtattgatggtgtcgagaaggtctgcccggttcttatcgcttttgggcagatcagcgagttcttttcccaggagctcacctttgtggtagcccatcatcctttcgaaggctgggttgacatactgaatcacgtggtcatcgcttgttatttctatggcttcatgacagtgatctaatgctgtaaacactgaattacaggcccgtaatttgaactgggagcgaacttccccatgttctatttgaat

SEQ ID NO: 351798 - DNA, 4224 bp, Homo sapiens
gcgcgccccgcaatcgccgcagccgcccccgccgtcggccgccgcaccccaagcgactgcccaaactaagcctccgtggctgggtacgggagcgctttggggacaaaaattctccctcaactgtggtctgcattccttcggcccgtgggctgatctggggcgggaagtattagcgtctcagttgcgctgcagccggggaggaaggaggaggccgagcctggggcggagtttgggctgactggggctggaccgggcaagacgccgccgctgcccggatgttgcgatggctgatcgggggaggccgagaaccgcagggactggccgagaaatctcctttacagacaataggtgaagaacaaacccagaatccctacactgaactgctagtactgaaggctcatcatgatattgtacgatttctggtacagttagatgactacagatttgcatctgctggtgatgatggaattgtagttgtgtggaatgcccagacaggggaaaaacttttagaactgaatggacacactcaaaagataacagctattattacatttccttccttggaatcttgtgaagagaaaaatcaactcatcttgacagcctctgctgatagaacagttattgtgtgggatggtgatactaccagacaagttcagagaatatcatgcttccagtctactgtaaagtgtttaactgttcttcagagactagatgtttggctttctggtgggaatgacctgtgtgtgtggaaccggtattagtgctttggttgaaatacctaagaactgtgttgtggcagcagttggcaaagaactgataattttcaggttggtagcacccacagaaggatcactagaatgggatattcttgaagttaagcgcctccttgatcaccaggataatattctctcattgattaatgtcaatgatttgagttttgtcaccggctcccacgtcggagagctgatcatctgggatgccctggactggaccatgcaggcctatgaacgcaacttctgggacccatctccacaactggacacccaacaagaaataaaactctgtcaaaaatcaaatgacatttctattcatcatttcacatgtgatgaagagaatgtatttgctgcagttggaaggggtttatacgtgtatagccttcaaatgaagcgtgtgattgcctgccagaaaactgcacatgactccaatgtcctgcacattgccagacttccaaacaggcagttaatctcatgctcagaagatggcagtgtacgcatttgggagttaagagaaaaacagcagcttgcagctgagcctgtaccaacaggtttttttaacatgtggggatttggaagagtcagcaaacaagccagccaacctgttaaaaagcagcaagaaaatgctacttcatgttcactggagcttattggagatttgattggacactcatcatctgtggagatgtttctatactttgaagatcatggactagtgacgtgctccgctgatcatctcattattttgtggaaaaatggagagcgagaatctggattgcgcagtttaagattatttcaaaaattagaggagaatggtgacttataccttgctgtctagtttaaggaattaaaaatacacatgcatgaaccttgaacatcaaatatcgggtactactctgaaaaccattaatatattgatcacttaaattggtaattttttttgtcagtccataaaattctacatgtttaaattttttgtggacctaccaaccaggaacatgttgcttctcaggtcctagtatatcctccaaagaatataccacaagtttttccatttgactttgagctgctgttgaagtggtgagtgctgtgttttgagcttattttgaacctagatccttgtgaaaggtacaaatagaggtaatagttaagttatggcatttattagaagttttattatttggcttcctttagaattattgtgaagtttaaaaatagcctttctcctgcaaattttcctagtctttagtaactgttagtgttctatatagcacaaacttgaatctctcagccaaaaaagggaacatatatactgtttaagtatggcaagttttctttggtaccaatttgtttagataattttaaaaatgttttttagttctagctactaaaacctgtatgaactcaaatggataggcatcttgtgagggtgtgtttttcccagtgtgaattggcttgaagagccatgggctaaatgggtactagaacaacaactgcccctcatgtacgccaaggatgagctctagatcatttgagaggcacagtgtttccggagtcagggactgcagctgagcgcaactgccccatctgaccactgactcaaatacgaactgcttgagacagacttcttttatgtagttctttgcagtgtccattgagacactataaccagccttgtaacaatatgttttctccttttggtgctaaaaaataaaaatattagaaagtagtctacacattaaagattgaaattcttaaactactgatgaagaaagggcaacgtgacagatgttagcagactgacccttcttacagaaaacctacagatttatttgttcattatacaaatatactacaaatataccctaaagggaatctccataagttcttttactagttttagctttgacagttgcttccacaactacctacaaagactggaagagttaaggtcatctgagtagaccagtggcataatgttacaaatgaggaaactgaggcccagtgcagtaaggccttgcaattaaatctgtagtgcccagtatcaccaagcagctctaaaaacaggaactgaagactgaatgagaaaaggcttatatgactactttaaatccaaacaacattgagtcatgaaaagttctatggagaaatattaaaacttaagctacctcaattacagaagactttctcccattattcacgtgctttttcctttagaaattctgcattggcccatacatttgtaaagttgttttctgaagttgtatgacacaagggagccatagacttaactgttttacttcctagcctgttctaggctagtattttgtgatagtaatctattcaaatggagtggtagaaatcacatgaattttggaagcaaatggtaccgtaagtaccacagcaaattccttctggtcattatacaggcgtacctcagagatactacaggttaggtttcagaccacatcaaaaaagcaactattgcaaatagagtgagtcacatctagtttttggtttcccagtgcctataaaacttgtgtttatactacagtcttaaatttctaaaaaatgtacataccttaagaatactttattgctaaaaaatgctaacaatcatctgagccttcagcgagtcataatctttttgctggtggagggtcttgatactgctggctgttgactaaggtggttactgaaggttggggtggctgtggcagttccttaaaataagatagcgatgaagttttccaaatcaattgacttcctttcacaaatgagatctctgtaacatgtaatactatttaatagcattttacccacagtagaacttctttcaaaatttagagtctgtcatctcaaatcctgatgctcctttatgaactaagtttatagaatattctaaatcctttgttgtcatttcaactatgtttacagcatcttcactgtggaaatgactgtctccagaaaccactttctatacacattcttaagcaacttctcatctattaaagtttgatcatgagattacagcaattcattcacatcttcaggctccacttcttccagactccttttaatgctggaattttgaccgcctcccatgaatcagaatgttcttagtggcatctagaatgctaaatgcttcccagaaggttttcaattgactttgcccagactcttcagaggaatcactagttagggcagctacagccttattaaatgtatttcttaaataaataagacttaaaagtcaaagtgactccttgacccatggactgcagcatagatgttgtggtagctggcacgaagacaacatgaacctccttgtacatctccatcagaactcttaggtgaccaggtaacattgtaatgggcagtaatatttggaaagaaatttgagcaggtctcaaccataggcttaaatattcaataaaccatgctataaaca

SEQ ID NO: 351799 - DNA, 3644 bp, Homo sapiens
gcgcgccccgcaatcgccgcagccgcccccgccgtcggccgccgcaccccaagcgactgcccaaactaagcctccgtggctgggtacgggagcgctttggggacaaaaattctccctcaactgtggtctgcattccttcggcccgtgggctgatctggggcgggaagtattagcgtctcagttgcgctgcagccggggaggaaggaggaggccgagcctggggcggagtttgggctgactggggctggaccgggcaagacgccgccgctgcccggatgttgcgatggctgatcgggggaggccgagaaccgcagggactggccgagaaatctcctttacagacaatagatttgagttttgtcaccggctcccacgtcggagagctgatcatctgggatgccctggactggaccatgcaggcctatgaacgcaacttctgggacccatctccacaactggacacccaacaagaaataaaactctgtcaaaaatcaaatgacatttctattcatcatttcacatgtgatgaagagaatgtatttgctgcagttggaaggggtttatacgtgtatagccttcaaatgaagcgtgtgattgcctgccagaaaactgcacatgactccaatgtcctgcacattgccagacttccaaacaggcagttaatctcatgctcagaagatggcagtgtacgcatttgggagttaagagaaaaacagcagcttgcagctgagcctgtaccaacaggtttttttaacatgtggggatttggaagagtcagcaaacaagccagccaacctgttaaaaagcagcaagaaaatgctacttcatgttcactggagcttattggagatttgattggacactcatcatctgtggagatgtttctatactttgaagatcatggactagtgacgtgctccgctgatcatctcattattttgtggaaaaatggagagcgagaatctggattgcgcagtttaagattatttcaaaaattagaggagaatggtgacttataccttgctgtctagtttaaggaattaaaaatacacatgcatgaaccttgaacatcaaatatcgggtactactctgaaaaccattaatatattgatcacttaaattggtaattttttttgtcagtccataaaattctacatgtttaaattttttgtggacctaccaaccaggaacatgttgcttctcaggtcctagtatatcctccaaagaatataccacaagtttttccatttgactttgagctgctgttgaagtggtgagtgctgtgttttgagcttattttgaacctagatccttgtgaaaggtacaaatagaggtaatagttaagttatggcatttattagaagttttattatttggcttcctttagaattattgtgaagtttaaaaatagcctttctcctgcaaattttcctagtctttagtaactgttagtgttctatatagcacaaacttgaatctctcagccaaaaaagggaacatatatactgtttaagtatggcaagttttctttggtaccaatttgtttagataattttaaaaatgttttttagttctagctactaaaacctgtatgaactcaaatggataggcatcttgtgagggtgtgtttttcccagtgtgaattggcttgaagagccatgggctaaatgggtactagaacaacaactgcccctcatgtacgccaaggatgagctctagatcatttgagaggcacagtgtttccggagtcagggactgcagctgagcgcaactgccccatctgaccactgactcaaatacgaactgcttgagacagacttcttttatgtagttctttgcagtgtccattgagacactataaccagccttgtaacaatatgttttctccttttggtgctaaaaaataaaaatattagaaagtagtctacacattaaagattgaaattcttaaactactgatgaagaaagggcaacgtgacagatgttagcagactgacccttcttacagaaaacctacagatttatttgttcattatacaaatatactacaaatataccctaaagggaatctccataagttcttttactagttttagctttgacagttgcttccacaactacctacaaagactggaagagttaaggtcatctgagtagaccagtggcataatgttacaaatgaggaaactgaggcccagtgcagtaaggccttgcaattaaatctgtagtgcccagtatcaccaagcagctctaaaaacaggaactgaagactgaatgagaaaaggcttatatgactactttaaatccaaacaacattgagtcatgaaaagttctatggagaaatattaaaacttaagctacctcaattacagaagactttctcccattattcacgtgctttttcctttagaaattctgcattggcccatacatttgtaaagttgttttctgaagttgtatgacacaagggagccatagacttaactgttttacttcctagcctgttctaggctagtattttgtgatagtaatctattcaaatggagtggtagaaatcacatgaattttggaagcaaatggtaccgtaagtaccacagcaaattccttctggtcattatacaggcgtacctcagagatactacaggttaggtttcagaccacatcaaaaaagcaactattgcaaatagagtgagtcacatctagtttttggtttcccagtgcctataaaacttgtgtttatactacagtcttaaatttctaaaaaatgtacataccttaagaatactttattgctaaaaaatgctaacaatcatctgagccttcagcgagtcataatctttttgctggtggagggtcttgatactgctggctgttgactaaggtggttactgaaggttggggtggctgtggcagttccttaaaataagatagcgatgaagttttccaaatcaattgacttcctttcacaaatgagatctctgtaacatgtaatactatttaatagcattttacccacagtagaacttctttcaaaatttagagtctgtcatctcaaatcctgatgctcctttatgaactaagtttatagaatattctaaatcctttgttgtcatttcaactatgtttacagcatcttcactgtggaaatgactgtctccagaaaccactttctatacacattcttaagcaacttctcatctattaaagtttgatcatgagattacagcaattcattcacatcttcaggctccacttcttccagactccttttaatgctggaattttgaccgcctcccatgaatcagaatgttcttagtggcatctagaatgctaaatgcttcccagaaggttttcaattgactttgcccagactcttcagaggaatcactagttagggcagctacagccttattaaatgtatttcttaaataaataagacttaaaagtcaaagtgactccttgacccatggactgcagcatagatgttgtggtagctggcacgaagacaacatgaacctccttgtacatctccatcagaactcttaggtgaccaggtaacattgtaatgggcagtaatatttggaaagaaatttgagcaggtctcaaccataggcttaaatattcaataaaccatgctataaaca

SEQ ID NO: 351800 - DNA, 2220 bp, Homo sapiens
gcgcgccccgcaatcgccgcagccgcccccgccgtcggccgccgcaccccaagcgactgcccaaactaagcctccgtggctgggtacgggagcgctttggggacaaaaattctccctcaactgtggtctgcattccttcggcccgtgggctgatctggggcgggaagtattagcgtctcagttgcgctgcagccggggaggaaggaggaggccgagcctggggcggagtttgggctgactggggctggaccgggcaagacgccgccgctgcccggatgttgcgatggctgatcgggggaggccgagaaccgcagggactggccgagaaatctcctttacagacaataggtgaagaacaaacccagaatccctacactgaactgctagtactgaaggctcatcatgatattgtacgatttctggtacagttagatgactacagatttgcatctgctggtgatgatggaattgtagttgtgtggaatgcccagacaggggaaaaacttttagaactgaatggacacactcaaaagataacagctattattacatttccttccttggaatcttgtgaagagaaaaatcaactcatcttgacagcctctgctgatagaacagttattgtgtgggatggtgatactaccagacaagttcagagaatatcatgcttccagtctactgtaaagtgtttaactgttcttcagagactagatgtttggctttctggtgggaatgacctgtgtgtgtggaaccgaaaattagatctcctgtgtaagactagccacctttctgatacaggtattagtgctttggttgaaatacctaagaactgtgttgtggcagcagttggcaaagaactgataattttcaggttggtagcacccacagaaggatcactagaatgggatattcttgaagttaagcgcctccttgatcaccaggataatattctctcattgattaatgtcaatgatttgagttttgtcaccggctcccacgtcggagagctgatcatctgggatgccctggactggaccatgcaggcctatgaacgcaacttctgggacccatctccacaactggacacccaacaagaaataaaactctgtcaaaaatcaaatgacatttctattcatcatttcacatgtgatgaagagaatgtatttgctgcagttggaaggggtttatacgtgtatagccttcaaatgaagcgtgtgattgcctgccagaaaactgcacatgactccaatgtcctgcacattgccagacttccaaacaggcagttaatctcatgctcagaagatggcagtgtacgcatttgggagttaagagaaaaacagcagcttgcagctgagcctgtaccaacaggtttttttaacatgtggggatttggaagagtcagcaaacaagccagccaacctgttaaaaagcagcaagaaaatgctacttcatgttcactggagcttattggagatttgattggacactcatcatctgtggagatgtttctatactttgaagatcatggactagtgacgtgctccgctgatcatctcattattttgtggaaaaatggagagcgagaatctggattgcgcagtttaagattatttcaaaaattagaggagaatggtgacttataccttgctgtctagtttaaggaattaaaaatacacatgcatgaaccttgaacatcaaatatcgggtactactctgaaaaccattaatatattgatcacttaaattggtaattttttttgtcagtccataaaattctacatgtttaaattttttgtggacctaccaaccaggaacatgttgcttctcaggtcctagtatatcctccaaagaatataccacaagtttttccatttgactttgagctgctgttgaagtgataaatctgttcagataagctccttatgaatccttcagatcgatgttcttgaggaaaacagtcaagctaaacagcaatgatgacttttatgagttttcctccaacgacagaaaaacactgcagtaagctttggcagcgtgtcctttgaagaggcagagactcgtttatccagctatcaaaaatccatcaagtcttctgcacacaagcttctgtgccagctgctggggatgcaaagaatgcaccccaccccacttggccacaaaaagctgacagccacatttttaaaaatatattttgtttacctttaggctcaccctgtgtca

SEQ ID NO: 351801 - DNA, 476 bp, Homo sapiens
tcagtggtgaactgactgttggcctggcagatgagaagttttactcccccactctccagtgaaactggtgaaaagtatttttaaaggaattaagaatgggtcaatgaaatatacagctcctttctggaatgtacctgttctgctacaaccatggatatcctgacctttctgtgcctttcagggacaagggtaatagaggagtttcagactccctctaaaacaaaacaacaactgaacaataaacaacagaaaaagaacacaaaaaaagacggtggtactctttcccctttccttgctttctcctgctaccaaaacaaacaacaaaaactacattgtctcattggatgacgaagctaaaattttgtagcaaatctatagaagaaaagaagtggaaatctactcaagagctactgtaaaacactgtatacaaaacaaccactttgattcacattaaaaagtgttatctgtttctttga

SEQ ID NO: 351802 - DNA, 876 bp, Homo sapiens
gaattgtaatgaactcttgttgcgttcacttctttgcataactcgttattgcctgtacaaacaaattaagcaggaagaggaagaacctccacaatgacattagcctttcctggcctgttttcagtagttgatactttaggggcaattaaattctttggtcgagtaagtcaggcaaagctgaatcctcactggagttgctgaatctgaaagagattcctctactccttagagctcatgatataatgattggaatattgcactaggggaaggaaacctgggtttcacctccaagttgaccatgaacttagtgtgcagctgtggatggggttcttaattctctgggtctttgaatctgcacatgatgatgttcgccgccaggaaacctgtggagcacctgccctgattcttcctttctgttctgtgttcgctgacataagcaaaacggaacagacaacatgtgcaggggtgaatttgtgagcatgcccagggctgctgtgcttggggtgaatcacattacccttgggtacctcttcacttgcatctgggaaaaaactgattgagtctcacatgcatgatattcctctgtggaaatgcatggcatgtatctacagctcagtccatgccagaagttcctgagagctggctgggtgtggtggttcaggcctgtaatcccagcatttttagaggccaagtggggggaattgcttgaggccaggagttcaagaccagcctaagcaatatagtgagaccccatcactattttttttttttggagacagaatatcactctttcacccaggctggagtgcagtggcagcatcttggcttactgcaacctcttcctcctgggttcaagcgatcctcgtgcctcagcct

SEQ ID NO: 351803 - DNA, 1149 bp, Homo sapiens
gaattgtaatgaactcttgttgcgttcacttctttgcataactcgttattgcctgtacaaacaaattaagcaggaagaggaagaacctccacaatgacattagcctttcctggcctgttttcagtagttgatactttaggggcaattaaattctttggtcgagtaagtcaggcaaagctgaatcctcactggagttgctgaatctgaaagagattcctctactccttagagctcatgatataatgattggaatattgcactaggggaaggaaacctgggtttcacctccaagttgaccatgaacttagtgtgcagctgtggatggggttcttaattctctgggtctttgaatctgcacatgatgatgttcgccgccaggaaacctgtggagcacctgccctgattcttcctttctgttctgtgttcgctgacataagcaaaacggaacagacaacatgtgcaggggtgaatttgtgagcatgcccagggctgctgtgcttggggtgaatcacattacccttgggtacctcttcacttgcatctgggaaaaaactgattgagtctcacatgcatgatattcctctgtggaaatgcatggcatgtatctacagctcagtccatgccagaagttcctgagagctggctgggtgtggtggttcaggcctgtaatcccagcatttttagaggccaagtggggggaattgcttgaggccaggagttcaagaccagcctgggtgacagaggaggctctgtcctaaaaaaagaagaaaaaaatatgcttttagaggattgtttccaatgtcctgaattaatcatgttactgaatactgcagaatatatgttctttgtcttgcctcttgccttgacgcctcttttccctacttgccgtctttctaaaactgtgcccataattggaaatttgttgttgttttctatctagacttcgagataactctgttgtttgcctggaggctgcttcagcaatacttttgtacaaaaggaatgacctctttacatactgatttcgtttagcttatcttgttatttctattcatgcacccattcccacaaaacacacagacacacacacacacacacacgtgcgcacgtgcactccctccactcatctatgaattcctcatgatattg

SEQ ID NO: 351804 - DNA, 768 bp, Homo sapiens
ccaggctaatttttctgcgtttagtagagatggagtttcaccatgttgaccaggctggtctcaaactcctgacctcaagtaatccaccgcctcgacctcccaaagtgctgggattacaggcatgagccactggccccggctggccccatcactattaaaaaaataaaactcttgagagtaaccagcaactttcttcctaacattttctcctcaaaaataccctttcattagctgagcatggtggcacgcacctgtagccctggcttctcgggagactgaagcgggaggatcattttagcccaggagttctaggctgcagtgggccactatcacggtattgcactccagcctgggtgacagaggaggctctgtcctaaaaaaagaagaaaaaaatatgcttttagaggattgtttccaatgtcctgaattaatcatgttactgaatactgcagaatatatgttctttgtcttgcctcttgccttgacgcctcttttccctacttgccgtctttctaaaactgtgcccataattggaaatttgttgttgttttctatctagacttcgagataactctgttgtttgcctggaggctgcttcagcaatacttttgtacaaaaggaatgacctctttacatactgatttcgtttagcttatcttgttatttctattcatgcacccattcccacaaaacacacagacacacacacacacacacacgtgcgcacgtgcactccctccactcatctatgaattcctcatgatattg

SEQ ID NO: 351805 - DNA, 791 bp, Homo sapiens
aggcggcggccgcagctgcgagcaacagatccggacgccgcgagctgacccgctctgctgttgggcgatttttttttaattgcagaaaaatttattaaattggaaaatcttgcgtttttcaatggcgctggccccgggtcagcgggcgattttctctgcatcaagatgggctttgccgtttccgtagtgggcaccagtggtggcctgattgtcagtcttctcccggcatttttaaggccaggagccgagcgctgcttgtaggcgaataccctacagagcggtttggctttttaaattactgttattattttgggcagagaacagtcggtctggtgcaccccgtcctcgctgcagaagaggctgcgagtccgaggtgggtctctcggaaggtgaaattccttctggggtgagcgagccccggccccgcgcgcagtccagcggccccgcgtgtgtgccctcgccctgccggagccgggaaaatggaggctgtgattgagaaggaatgcagcgcgctcggaggcctcttccagaccatcatcagcgacatgaaggggagctatccagtttgggaagatttcataaacaaagcaggaaagctgcagtcccagcttcggacaacagtagtagcagcagctgccttcttggacgcctttcagaaagtggctgacatggccaccaacacacgtggcactatcatgggaccacaaaaagcaatatgactctccttgtcctggagcggcttacaattgagtggggaaaatgagaagtataaataaagaatttcaacatag

SEQ ID NO: 351806 - DNA, 5652 bp, Homo sapiens
cgtccaccgtggagtctctccttgctttgggtccactgagccccacacattgttgagtgtctgattgtctccttgcccttacaggacaggaaagcgaaatctctgttcctttgtagggacctttcttttgtaggtgaaagggacagaaatatgattctggcctccttgatggtgaatacaggaacactttcagataaattacaatagagaggagtcagcttatttaaacaaactgaggttaagccagagattgcagttaacagtgaaaaaatttaaagcaagtacctggatggatgcaaagcagtgcccaggagacccaacttacgtgacagagatgatcattgtcactcattcattatgttttgagcaccagccatgtgccaggtccagaactagaagaaacttgggtgtaggtgagatcataggaacagtccctgccccagctgaacatcaggaagccagactgggagcacatgccgtggctgactaggactccagcagggacctggggttccatcagatcagtgtaaagcgatggtttcccaaatgagacctctccagagatggttcattccaccccgcaatggccaccagaaacattgtgctgaccagagggcttcactgccccaaaccccaaaatcacactccaggatgagaaacctaaaagtctatcttgatgaggcttcatagctggaaaccacccctcatggatccacaggctgcatttgatgaaaggagactccaggaagtcgagccattccaggcagacatgtagcaaaagcccgagctggggtccgccctcatgcaataaataacacctgtgcacataagagaggtgacaggcagggcatccctggggacctgggcctgtggcacgtgaagaaacacccaagagagcacgaagtcccaatgccatgaccagatatttcggtgccaggcatgcttctgggtcccagcaaaagacacacaaatccgtgtccttggggacccacagtctagtgacctagggctggccgggtcgcacgcttcttttcaagggctcgaaagcctctgcatggatgcaactttgggggaaaagtaaccctaaccctctgcttctctcatcctcccctcttctgtgtatatgtctgtctctttctctctgtgtgtgcccttccccactcccatccccattcctttttttatttattatattttggtggtgtgtggctcggtttctgttggtcccctcgtgtggcccctcccctgctgcagaactcgtccagctcggcctcctccgaagcctcggaaacctgccagtcagtgagcgagtgcagctcccccacctctgtcagctcgggctccaccatgggtgcctgggtgtccacagagaaggtgaccgcccgggtggcagccacagcggccccactctccctggtccccctgcctgctgctcagacagccctcacagccgcggcaacctggaagctcagaatcgacaccaagagtggggctcctcttggggacagagggtgggacaaggctgagagcattttctagaatgagtgcctggctgctggacaatgaccacatggttgtctcaagggagaggaaggggtatggggaatttggaggtgtgaaggctttctcccagaccaggtgttgcgtgcctgtccatcctcctccctcccttcccgagccacccaccagaccgttggatgagccatgtcactgtgtcagaggctgtgtgcttttccgctttttagtttgcacccccacccccctgcccttgattgagaatgtgctcctgagcaatgcgacgattttggaaacctagaatgaacagattcatttgaagatgctttggaatttttaaatttgcataatgaaatgagcaaatcactatcaccattaaatgaggcttcattagttacattatcaaaaaccattgacaaggccacaaattgagggcactgatcaatttccaaacttctaaaacgtaggtcaaacatagatgcttatttgctgtcaaactcatgtgcattctttgcaccccggctcttttctcttgcatcacagatcatccgtgagcagcagagccccaatgtttgttttatttataaatattcaggtttcccctcccttgaatgtcaatgccattttgtatctccgcactcatcctgttatattaattttttttcctttcccccccctttttttgtttgtttccagttgtctaacgggttttctcactatagtttatcaagtgagtcccacgtggggcccacgggtgcaggccttttccctcattgcctgcctgcctcccgcctgctccctcgggtcacctctgtccaccttccagactacgctcattattacaccattgggcccggcatgttcccgtcatctcagatccctagctggaaggactgggctaagcctgggccctatgaccagcctctggtgaacaccctgcagcgccgcaaagagaagcgagaaccggaccccaacgggggaggacccactaccgccagcggcccacctgcagcagctgaggaggctcagagaccacggagcatgactgtatcggctgccaccaggcctggtgaggagatggaggcttgtgaggagctggccctggccctgtctcggggcctgcagctggacacccagaggagcagccgggactcgcttcagtgctccagcggctacagcacccagacaaccaccccctgctgctctgaggacaccatcccttcccaagtttcagattatgattatttctctgtaagtggtgaccaggaggcagatcagcaggagttcgacaagtcctccaccattccaagaaacagcgacatcagccagtcctaccgacggatgttccaagccaagcgtccagcctcaactgctggcctccccaccaccctgggacctgctatggtcactccaggggttgcaactatccgacggaccccttccaccaagccttctgtccgccggggaaccattggagctggtcccatccccatcaagacacccgtgatccctgtcaagaccccaaccgtcccagacctcccaggggtgttgccagcccctccagatgggccagaagagcggggggagcacagccctgagtcgccatctgtgggtgagggcccccaaggtgtcaccagcatgccctcctcaatgtggagcggccaagcttccgttaaccctccacttccaggcccgaagcccagtatccctgaggagcacagacaggcaattccagaaagtgaagctgaagaccaggaacgggaacccccaagtgccactgtctccccaggccagattccagagagtgaccctgcagacctgagcccaagggatactccacaaggagaagacatgctgaacgccatccgaaggggcgtgaaactgaagaagaccacgacaaacgatcgctcagcccctcgcttttcttaggttcacaagaaatgcgccggtggggaatgaactgtttcattaataaaacctaatttgtcttgatccattccactctataataaaacaaaagattttgtaggcaactcggaatatagctcttttgaaagtactcgacacctttagataagaattaaaaccaacctatgtaactgacataatcttgatcttttaatttgtaaatattgacaattttctttctgcacattttaatcttagtttcccttttgatttttctgaaggtgccaaattccatttaacttttttacaagtctttgtaaaattttaaatgcataaagggggttggggcaggggaaccacgaagtagttaattttagaaaaggatttactatacttcactcttctttttttttccccacaagcttttgtagatgcattgtagtagtctagcttagaagcaaatgcaagttattttaatgtacaaactaaatgggtaagaggtaaaatcttcatttaaatatactatgttctggatgaaaagagcaggagtaacaattgatgagcaatattcagagtgaagtaaatctggaaatggtagactgtgttgggattggggggagggccatgggaggggtacatcgtcaacatagccgatcctgttacatttaagagtagcctcgtaggttgaatttcttctggtagcttcatggtaaatgcatccgaataagccatactggattgcagtgtttgtttctgtagggtgtttaaggacttgacttcctttctcccatgattcctctggactgcacacagcacccacaaccagccccatgcatgctgctgcctctgggcagtcgtagaatctcccacttcagtttctcgttgattgtactcacctttatggaatccaaatacatccaaaagggtaaggcagttttaaaaatgtgaaaacatttaaaaatgataatagcagggaattcttagattatagtaaatgccttttacttaactgtgcccagcaggctgggtgcgttaaaaagcccaagtattttgaaaaaactcgaacagatttgacaagggtagccagcttggagtctagcaacttgccaatgtgtttaccaatctgggggcttgtttttcttttcttctttcaaataaatggcagttaactggctttacagtaaacattgaagagaggaggatttgtttattgtcactgggaatctgaccactatactgtcctttttttgtattctgggtaaatgttttttggaaaagatttgtcttttctaagtggaagttaaatttgttatactgcccatcccctaaagccaacagagatttgtagatttaaagggatcacatttgaagacaatagtgtttaagaaagcaagcaagtcccttagcagtcaggtcataacagggcacatttctgaccgaaccctctcaaggcagaggaggagtttggtgggtttcatacaccctgcagattcctgttggctctaaccctcaattacctaatcttatgctttaacacataactgcattggatgtgagagtaacgtaccgtatggtcattgttctatatattaacattgaacactgctgcgattgctcaaggacattttatgttacggctttaaagcaaaggcatgattattagaaactatttaagcttttttctttgaaaaacaagctccttttacagaatataaacaacagtagtgcctgtggtttagcccaccaatcttgatgactaaaagtagctgatgcattgtgcatatgatgcttgagatggtttttgcaaaagcagaaatcgctgcaaggtaatcacaatagataaaagtggtattttaaacctttgaaataaatggatgtaactgtaccttggtacagcttttcacttgtttagtttttaaacgttagtataatctgaataaataaaatgttgccaaattcaatgtagaaagaatgtgacaacacaccttgggtagttctgcttgtgtttttgcatattgtaaaagcagtgtcacagctaaaaagaaagaaatcgtttctaacagtaaattattgtgctttagttgctagtttgtactgagagttgacctctccctgtgcagttttttgttctaaacttgtataaataacaattgtgtaatgtgtctccctcctacattgtaacaattgcttcagcctacgttataaataaagaaccactagattaaaaaa

SEQ ID NO: 351807 - DNA, 4955 bp, Homo sapiens
aggcggcggccgcagctgcgagcaacagatccggacgccgcgagctgacccgctctgctgttgggcgatttttttttaattgcagaaaaatttattaaattggaaaatcttgcgtttttcaatggcgctggccccgggtcagcgggcgattttctctgcatcaagatgggctttgccgtttccgtagtgggcaccagtggtggcctgattgtcagtcttctcccggcatttttaaggccaggagccgagcgctgcttgtaggcgaataccctacagagcggtttggctttttaaattactgttattattttgggcagagaacagtcggtctggtgcaccccgtcctcgctgcagaagaggctgcgagtccgaggtgggtctctcggaaggtgaaattccttctggggtgagcgagccccggccccgcgcgcagtccagcggccccgcgtgtgtgccctcgccctgccggagccgggaaaatggaggctgtgattgagaaggaatgcagcgcgctcggaggcctcttccagaccatcatcagcgacatgaaggggagctatccagtttgggaagatttcataaacaaagcaggaaagctgcagtcccagcttcggacaacagtagtagcagcagctgccttcttggacgcctttcagaaagtggctgacatggccaccaacacacgtggtgggaccagggagattggatctgctctcaccaggatgtgcatgaggcacagaagcattgaagccaagctgaggcagttttcgagcgctttaattgattgtctgataaacccacttcaagaacagatggaagaatggaagaaagtggccaaccagctggataaagaccacgcaaaagaatataagaaagcccgccaagagataaaaaagaagtcctcggatacgctgaaactgcagaagaaagcaaaaaaagggagaggtgatatccagcctcagttggacagtgctctccaagatgtcaatgataagtatctcttattggaagaaacagaaaagcaggctgtccggaaggctttgattgaagaacgtggccgattctgtaccttcatctctatgctgcggccagtgattgaagaagaaatctcaatgctaggggaaataacccaccttcagaccatctcggaagatctaaaaagcctgaccatggaccctcacaaactgccctcctcaagtgaacaggtgattctggacttgaaaggttctgattacagctggtcgtatcagacgccaccctcttcccccagcaccaccatgtccagaaagtccagtgtctgcagcagcctgaacagtgtcaacagcagtgactcccggtccagcggctcccactcgcattcccccagctcacattaccgctaccgcagctccaacctggcccagcaggctcctgtgaggctgtccagcgtgtcctcccatgactcaggattcatatcccaggatgccttccagtccaagtcaccatcccccatgccgccagaggcccccaaccagttgtctaacgggttttctcactatagtttatcaagtgagtcccacgtggggcccacgggtgcaggccttttccctcattgcctgcctgcctcccgcctgctccctcgggtcacctctgtccaccttccagactacgctcattattacaccattgggcccggcatgttcccgtcatctcagatccctagctggaaggactgggctaagcctgggccctatgaccagcctctggtgaacaccctgcagcgccgcaaagagaagcgagaaccggaccccaacgggggaggacccactaccgccagcggcccacctgcagcagctgaggaggctcagagaccacggagcatgactgtatcggctgccaccaggcctggtgaggagatggaggcttgtgaggagctggccctggccctgtctcggggcctgcagctggacacccagaggagcagccgggactcgcttcagtgctccagcggctacagcacccagacaaccaccccctgctgctctgaggacaccatcccttcccaagtttcagattatgattatttctctgtaagtggtgaccaggaggcagatcagcaggagttcgacaagtcctccaccattccaagaaacagcgacatcagccagtcctaccgacggatgttccaagccaagcgtccagcctcaactgctggcctccccaccaccctgggacctgctatggtcactccaggggttgcaactatccgacggaccccttccaccaagccttctgtccgccggggaaccattggagctggtcccatccccatcaagacacccgtgatccctgtcaagaccccaaccgtcccagacctcccaggggtgttgccagcccctccagatgggccagaagagcggggggagcacagccctgagtcgccatctgtgggtgagggcccccaaggtgtcaccagcatgccctcctcaatgtggagcggccaagcttccgttaaccctccacttccaggcccgaagcccagtatccctgaggagcacagacaggcaattccagaaagtgaagctgaagaccaggaacgggaacccccaagtgccactgtctccccaggccagattccagagagtgaccctgcagacctgagcccaagggatactccacaaggagaagacatgctgaacgccatccgaaggggcgtgaaactgaagaagaccacgacaaacgatcgctcagcccctcgcttttcttaggttcacaagaaatgcgccggtggggaatgaactgtttcattaataaaacctaatttgtcttgatccattccactctataataaaacaaaagattttgtaggcaactcggaatatagctcttttgaaagtactcgacacctttagataagaattaaaaccaacctatgtaactgacataatcttgatcttttaatttgtaaatattgacaattttctttctgcacattttaatcttagtttcccttttgatttttctgaaggtgccaaattccatttaacttttttacaagtctttgtaaaattttaaatgcataaagggggttggggcaggggaaccacgaagtagttaattttagaaaaggatttactatacttcactcttctttttttttccccacaagcttttgtagatgcattgtagtagtctagcttagaagcaaatgcaagttattttaatgtacaaactaaatgggtaagaggtaaaatcttcatttaaatatactatgttctggatgaaaagagcaggagtaacaattgatgagcaatattcagagtgaagtaaatctggaaatggtagactgtgttgggattggggggagggccatgggaggggtacatcgtcaacatagccgatcctgttacatttaagagtagcctcgtaggttgaatttcttctggtagcttcatggtaaatgcatccgaataagccatactggattgcagtgtttgtttctgtagggtgtttaaggacttgacttcctttctcccatgattcctctggactgcacacagcacccacaaccagccccatgcatgctgctgcctctgggcagtcgtagaatctcccacttcagtttctcgttgattgtactcacctttatggaatccaaatacatccaaaagggtaaggcagttttaaaaatgtgaaaacatttaaaaatgataatagcagggaattcttagattatagtaaatgccttttacttaactgtgcccagcaggctgggtgcgttaaaaagcccaagtattttgaaaaaactcgaacagatttgacaagggtagccagcttggagtctagcaacttgccaatgtgtttaccaatctgggggcttgtttttcttttcttctttcaaataaatggcagttaactggctttacagtaaacattgaagagaggaggatttgtttattgtcactgggaatctgaccactatactgtcctttttttgtattctgggtaaatgttttttggaaaagatttgtcttttctaagtggaagttaaatttgttatactgcccatcccctaaagccaacagagatttgtagatttaaagggatcacatttgaagacaatagtgtttaagaaagcaagcaagtcccttagcagtcaggtcataacagggcacatttctgaccgaaccctctcaaggcagaggaggagtttggtgggtttcatacaccctgcagattcctgttggctctaaccctcaattacctaatcttatgctttaacacataactgcattggatgtgagagtaacgtaccgtatggtcattgttctatatattaacattgaacactgctgcgattgctcaaggacattttatgttacggctttaaagcaaaggcatgattattagaaactatttaagcttttttctttgaaaaacaagctccttttacagaatataaacaacagtagtgcctgtggtttagcccaccaatcttgatgactaaaagtagctgatgcattgtgcatatgatgcttgagatggtttttgcaaaagcagaaatcgctgcaaggtaatcacaatagataaaagtggtattttaaacctttgaaataaatggatgtaactgtaccttggtacagcttttcacttgtttagtttttaaacgttagtataatctgaataaataaaatgttgccaaattcaatgtagaaagaatgtgacaacacaccttgggtagttctgcttgtgtttttgcatattgtaaaagcagtgtcacagctaaaaagaaagaaatcgtttctaacagtaaattattgtgctttagttgctagtttgtactgagagttgacctctccctgtgcagttttttgttctaaacttgtataaataacaattgtgtaatgtgtctccctcctacattgtaacaattgcttcagcctacgttataaataaagaaccactagattaaaaaa

SEQ ID NO: 351808 - DNA, 1123 bp, Homo sapiens
aggcggcggccgcagctgcgagcaacagatccggacgccgcgagctgacccgctctgctgttgggcgatttttttttaattgcagaaaaatttattaaattggaaaatcttgcgtttttcaatggcgctggccccgggtcagcgggcgattttctctgcatcaagatgggctttgccgtttccgtagtgggcaccagtggtggcctgattgtcagtcttctcccggcatttttaaggccaggagccgagcgctgcttgtaggcgaataccctacagagcggtttggctttttaaattactgttattattttgggcagagaacagtcggtctggtgcaccccgtcctcgctgcagaagaggctgcgagtccgaggtgggtctctcggaaggtgaaattccttctggggtgagcgagccccggccccgcgcgcagtccagcggccccgcgtgtgtgccctcgccctgccggagccgggaaaatggaggctgtgattgagaaggaatgcagcgcgctcggaggcctcttccagaccatcatcagcgacatgaaggggagctatccagtttgggaagatttcataaacaaagcaggaaagctgcagtcccagcttcggacaacagtagtagcagcagctgccttcttggacgcctttcagaaagtggctgacatggccaccaacacacgtggtaagcagatggaggctgactcccagtgttaactgcattctgcacgtggactcttccccttgggtggctgcacaagaagatgcagcttaagttatcagagctgagctgactcgtattttcccattttttaaaactctgtgggattccacatattagaagttgcaactagttttctggataataaagcacatgtgaagaagaatgaaaaaggaagaaaatgaaccactgtttctgcacgagttggcttgatgggttctttgatcactttaatgacgtgctggttgttgaaccttgagctgtgcctttggttgcaatttgcgttttcctccttacgtgggttttccttgtttccttgtggaatgggaagcagtagggatgattggatagaccatttttctgagtttccataaaatgaagaacccttttaaaataagga

SEQ ID NO: 351809 - DNA, 4901 bp, Homo sapiens
aggcggcggccgcagctgcgagcaacagatccggacgccgcgagctgacccgctctgctgttgggcgatttttttttaattgcagaaaaatttattaaattggaaaatcttgcgtttttcaatggcgctggccccgggtcagcgggcgattttctctgcatcaagatgggctttgccgtttccgtagtgggcaccagtggtggcctgattgtcagtcttctcccggcatttttaaggccaggagccgagcgctgcttgtaggcgaataccctacagagcggtttggctttttaaattactgttattattttgggcagagaacagtcggtctggtgcaccccgtcctcgctgcagaagaggctgcgagtccgaggtgggtctctcggaaggtgaaattccttctggggtgagcgagccccggccccgcgcgcagtccagcggccccgcgtgtgtgccctcgccctgccggagccgggaaaatggaggctgtgattgagaaggaatgcagcgcgctcggaggcctcttccagaccatcatcagcgacatgaaggggagctatccagtttgggaagatttcataaacaaagcaggaaagctgcagtcccagcttcggacaacagtagtagcagcagctgccttcttggacgcctttcagaaagtggctgacatggccaccaacacacgtggtgggaccagggagattggatctgctctcaccaggatgtgcatgaggcacagaagcattgaagccaagctgaggcagttttcgagcgctttaattgattgtctgataaacccacttcaagaacagatggaagaatggaagaaagtggccaaccagctggataaagaccacgcaaaagaatataagaaagcccgccaagagataaaaaagaagtcctcggatacgctgaaactgcagaagaaagcaaaaaaagggagaggtgatatccagcctcagttggacagtgctctccaagatgtcaatgataagtatctcttattggaagaaacagaaaagcaggctgtccggaaggctttgattgaagaacgtggccgattctgtaccttcatctctatgctgcggccagtgattgaagaagaaatctcaatgctaggggaaataacccaccttcagaccatctcggaagatctaaaaagcctgaccatggaccctcacaaactgccctcctcaagtgaacaggtgattctggacttgaaaggttctgattacagctggtcgtatcagacgccaccctcttcccccagcaccaccatgtccagaaagtccagtgtctgcagcagcctgaacagtgtcaacagcagtgactcccggtccagcggctcccactcgcattcccccagctcacattaccgctaccgcagctccaacctggcccagcaggctcctgtgaggctgtccagcgtgtcctcccatgactcaggattcatatcccaggatgccttccagtccaagtcaccatcccccatgccgccagaggcccccaaccagttgtctaacgggttttctcactatagtttatcaagtgagtcccacgtggggcccacgggtgcaggccttttccctcattgcctgcctgcctcccgcctgctccctcgggtcacctctgtccaccttccagactacgctcattattacaccattgggcccggcatgttcccgtcatctcagatccctagctggaaggactgggctaagcctgggccctatgaccagcctctggtgaacaccctgcagcgccgcaaagagaagcgagaaccggaccccaacgggggaggacccactaccgccagcggcccacctgcagcagctgaggaggctcagagaccacggagcatgactgtatcggctgccaccaggcctggtgaggagatggaggcttgtgaggagctggccctggccctgtctcggggcctgcagctggacacccagaggagcagccgggactcgcttcagtgctccagcggctacagcacccagacaaccaccccctgctgctctgaggacaccatcccttcccaagtttcagattatgattatttctctgtaagtggtgaccaggaggcagatcagcaggagttcgacaagtcctccaccattccaagaaacagcgacatcagccagtcctaccgacggatgttccaagccaagcgtccagcctcaactgctggcctccccaccaccctgggacctgctatggtcactccaggggttgcaactatccgacggaccccttccaccaagccttctgtccgccggggaaccattggagctggtcccatccccatcaagacacccgtgatccctgtcaagaccccaaccgtcccagacctcccaggggtgttgccagcccctccagatgggccagaagagcggggggagcacagccctgagtcgccatctgtgggtgagggcccccaaggtgtcaccagcatgccctcctcaatgtggagcggccaagcttccgttaaccctccacttccaggcccgaagcccagtatccctgaggagcacagacaggcaattccagaaagtgaagctgaagaccaggaacgggaacccccaagtgccactgtctccccaggccagattccagagagtgaccctgcagacctgagcccaagggatactccacaaggagaagacatgctgaacgccatccgaaggggcgtgaaactgaagaagaccacgacaaacgatcgctcagcccctcgcttttcttaggttcacaagaaatgcgccggtggggaatgaactgtttcattaataaaacctaatttgtcttgatccattccactctataataaaacaaaagattttgtaggcaactcggaatatagctcttttgaaagtactcgacacctttagataagaattaaattttctttctgcacattttaatcttagtttcccttttgatttttctgaaggtgccaaattccatttaacttttttacaagtctttgtaaaattttaaatgcataaagggggttggggcaggggaaccacgaagtagttaattttagaaaaggatttactatacttcactcttctttttttttccccacaagcttttgtagatgcattgtagtagtctagcttagaagcaaatgcaagttattttaatgtacaaactaaatgggtaagaggtaaaatcttcatttaaatatactatgttctggatgaaaagagcaggagtaacaattgatgagcaatattcagagtgaagtaaatctggaaatggtagactgtgttgggattggggggagggccatgggaggggtacatcgtcaacatagccgatcctgttacatttaagagtagcctcgtaggttgaatttcttctggtagcttcatggtaaatgcatccgaataagccatactggattgcagtgtttgtttctgtagggtgtttaaggacttgacttcctttctcccatgattcctctggactgcacacagcacccacaaccagccccatgcatgctgctgcctctgggcagtcgtagaatctcccacttcagtttctcgttgattgtactcacctttatggaatccaaatacatccaaaagggtaaggcagttttaaaaatgtgaaaacatttaaaaatgataatagcagggaattcttagattatagtaaatgccttttacttaactgtgcccagcaggctgggtgcgttaaaaagcccaagtattttgaaaaaactcgaacagatttgacaagggtagccagcttggagtctagcaacttgccaatgtgtttaccaatctgggggcttgtttttcttttcttctttcaaataaatggcagttaactggctttacagtaaacattgaagagaggaggatttgtttattgtcactgggaatctgaccactatactgtcctttttttgtattctgggtaaatgttttttggaaaagatttgtcttttctaagtggaagttaaatttgttatactgcccatcccctaaagccaacagagatttgtagatttaaagggatcacatttgaagacaatagtgtttaagaaagcaagcaagtcccttagcagtcaggtcataacagggcacatttctgaccgaaccctctcaaggcagaggaggagtttggtgggtttcatacaccctgcagattcctgttggctctaaccctcaattacctaatcttatgctttaacacataactgcattggatgtgagagtaacgtaccgtatggtcattgttctatatattaacattgaacactgctgcgattgctcaaggacattttatgttacggctttaaagcaaaggcatgattattagaaactatttaagcttttttctttgaaaaacaagctccttttacagaatataaacaacagtagtgcctgtggtttagcccaccaatcttgatgactaaaagtagctgatgcattgtgcatatgatgcttgagatggtttttgcaaaagcagaaatcgctgcaaggtaatcacaatagataaaagtggtattttaaacctttgaaataaatggatgtaactgtaccttggtacagcttttcacttgtttagtttttaaacgttagtataatctgaataaataaaatgttgccaaattcaatgtagaaagaatgtgacaacacaccttgggtagttctgcttgtgtttttgcatattgtaaaagcagtgtcacagctaaaaagaaagaaatcgtttctaacagtaaattattgtgctttagttgctagtttgtactgagagttgacctctccctgtgcagttttttgttctaaacttgtataaataacaattgtgtaatgtgtctccctcctacattgtaacaattgcttcagcctacgttataaataaagaaccactagattaaaaaa

SEQ ID NO: 351810 - DNA, 5067 bp, Homo sapiens
aggcggcggccgcagctgcgagcaacagatccggacgccgcgagctgacccgctctgctgttgggcgatttttttttaattgcagaaaaatttattaaattggaaaatcttgcgtttttcaatggcgctggccccgggtcagcgggcgattttctctgcatcaagatgggctttgccgtttccgtagtgggcaccagtggtggcctgattgtcagtcttctcccggcatttttaaggccaggagccgagcgctgcttgtaggcgaataccctacagagcggtttggctttttaaattactgttattattttgggcagagaacagtcggtctggtgcaccccgtcctcgctgcagaagaggctgcgagtccgaggtgggtctctcggaaggtgaaattccttctggggtgagcgagccccggccccgcgcgcagtccagcggccccgcgtgtgtgccctcgccctgccggagccgggaaaatggaggctgtgattgagaaggaatgcagcgcgctcggaggcctcttccagaccatcatcagcgacatgaaggggagctatccagtttgggaagatttcataaacaaagcaggaaagctgcagtcccagcttcggacaacagtagtagcagcagctgccttcttggacgcctttcagaaagtggctgacatggccaccaacacacgtggtgggaccagggagattggatctgctctcaccaggatgtgcatgaggcacagaagcattgaagccaagctgaggcagttttcgagcgctttaattgattgtctgataaacccacttcaagaacagatggaagaatggaagaaagtggccaaccagctggataaagaccacgcaaaagaatataagaaagcccgccaagagataaaaaagaagtcctcggatacgctgaaactgcagaagaaagcaaaaaaagggagaggtgatatccagcctcagttggacagtgctctccaagatgtcaatgataagtatctcttattggaagaaacagaaaagcaggctgtccggaaggctttgattgaagaacgtggccgattctgtaccttcatctctatgctgcggccagtgattgaagaagaaatctcaatgctaggggaaataacccaccttcagaccatctcggaagatctaaaaagcctgaccatggaccctcacaaactgccctcctcaagtgaacaggtgattctggacttgaaaggttctgattacagctggtcgtatcagacgccaccctcttcccccagcaccaccatgtccagaaagtccagtgtctgcagcagcctgaacagtgtcaacagcagtgactcccggtccagcggctcccactcgcattcccccagctcacattaccgctaccgcagctccaacctggcccagcaggctcctgtgaggctgtccagcgtgtcctcccatgactcaggattcatatcccaggatgccttccagtccaagtcaccatcccccatgccgccagaggcccccaaccagttgtctaacgggttttctcactatagtttatcaagtgagtcccacgtggggcccacgggtgcaggccttttccctcattgcctgcctgcctcccgcctgctccctcgggtcacctctgtccaccttccagactacgctcattattacaccattgggcccggcatgttcccgtcatctcagatccctagctggaaggactgggctaagcctgggccctatgaccagcctctggtgaacaccctgcagcgccgcaaagagaagcgagaaccggaccccaacgggggaggacccactaccgccagcggcccacctgcagcagctgaggaggctcagagaccacggagcatgactgtatcggctgccaccaggcctggtgaggagatggaggcttgtgaggagctggccctggccctgtctcggggcctgcagctggacacccagaggagcagccgggactcgcttcagtgctccagcggctacagcacccagacaaccaccccctgctgctctgaggacaccatcccttcccaagtttcagattatgattatttctctgtaagtggtgaccaggaggcagatcagcaggagttcgacaagtcctccaccattccaagaaacagcgacatcagccagtcctaccgacggatgttccaagccaagcgtccagcctcaactgctggcctccccaccaccctgggacctgctatggtcactccaggggttgcaactatccgacggaccccttccaccaagccttctgtccgccggggaaccattggagctggtcccatccccatcaagacacccgtgatccctgtcaagaccccaaccgtcccagacctcccaggggtgttgccagcccctccagatgggccagaagagcggggggagcacagccctgagtcgccatctgtgggtgagggcccccaaggtgtcaccagcatgccctcctcaatgtggagcggccaagcttccgttaaccctccacttccaggcccgaagcccagtatccctgaggagcacagacaggcaattccagaaagtgaagctgaagaccaggaacgggaacccccaagtgccactgtctccccaggccagattccagagagtgaccctgcagacctgagcccaagggatactccacaaggagaagacatgctgaacgccatccgaaggggcgtgaaactgaagaagaccacgacaaacgatcgctcagcccctcgcttttcttaggttcacaagaaatgcgccggtggggaatgaactgtttcattaataaaacctaatttgtcttgatccattccactctataataaaacaaaagattttgtaggcaactcggaatatagctcttttgaaagtactcgacacctttagataagaattaaaaccaacctatgtaactgacataatcttgatcttttaatttgtaaatattgacaattttctttctgcacattttaatcttagtttcccttttgatttttctgaaggtgccaaattccatttaacttttttacaagtctttgtaaaattttaaatgcataaagggggttggggcaggggaaccacgaagtagttaattttagaaaaggatttactatacttcactcttctttttttttccccacaagcttttgtagatgcattgtagtagtctagcttagaagcaaatgcaagttattttaatgtacaaactaaatgggtaagaggtaaaatcttcatttaaatatactatgttctggatgaaaagagcaggagtaacaattgatgagcaatattcagagtgaagtaaatctggaaatggtagactgtgttgggattggggggagggccatgggaggggtacatcgtcaacatagccgatcctgttacatttaagagtagcctcgtaggttgaatttcttctggtagcttcatggtaaatgcatccgaataagccatactggattgcagtgtttgtttctgtagggtgtttaaggacttgacttcctttctcccatgattcctctggactgcacacagcacccacaaccagccccatgcatgctgctgcctctgggcagtcgtagaatctcccacttcagtttctcgttgattgtactcacctttatggaatccaaatacatccaaaagggtaaggcagttttaaaaatgtgaaaacatttaaaaatgataatagcagggaattcttagattatagtaaatgccttttacttaactgtgcccagcaggctgggtgcgttaaaaagcccaagtattttgaaaaaactcgaacagatttgacaagggtagccagcttggagtctagcaacttgccaatgtgtttaccaatctgggggcttgtttttcttttcttctttcaaataaatggcagttaactggctttacagtaaacattgaagagaggaggatttgtttattgtcactgggaatctgaccactatactgtcctttttttgtattctgggtaaatgttttttggaaaagatttgtcttttctaagtggaagttaaatttgttatactgcccatcccctaaagccaacagagatttgtagatttaaagggatcacatttgaagacaatagtgtttaagaaagcaagcaagtcccttagcagtcaggtcataacagggcacatttctgaccgaaccctctcaaggcagaggaggagtttggtgggtttcatacaccctgcagattcctgttggctctaaccctcaattacctaatcttatgctttaacacataactgcattggatgtgagagtaacgtaccgtatggtcattgttctatatattaacattgaacactgctgcgattgctcaaggacattttatgttacggctttaaagcaaaggcatgattattagaaactatttaagcttttttctttgaaaaacaagctccttttacagaatataaacaacagtagtgcctgtggtttagcccaccaatcttgatgactaaaagtagctgatgcattgtgcatatgatgcttgagatggtttttgcaaaagcagaaatcgctgcaaggtaatcacaatagataaaagtggtattttaaacctttgaaataaatggatgtaactgtaccttggtacagcttttcacttgtttagtttttaaacgttagtataatctgaataaataaaatgttgccaaattcaatgtagaaagaatgtgacaacacaccttgggtagttctgcttgtgtttttgcatattgtaaaagcagtgtcacagctaaaaagaaagaaatcgtttctaacagtaaattattgtgctttagttgctagtttgtactgagagttgacctctccctgtgcagttttttgttctaaacttgtataaataacaattgtgtaatgtgtctccctcctacattgtaacaattgcttcagcctacgttataaataaagaaccactagattaaaaaaaaaaaaaacacaacgaaaaaaaagcaaacggaaaaaagaaacaagaaaaaagaaaaaggggggggcgcaaaataacaccgggggaggcatcaaagggtattgagaggcccaa

SEQ ID NO: 351811 - DNA, 4046 bp, Homo sapiens
agcggggtgtgggtcgtgcattgtgtgcagggagaggtgatatccagcctcagttggacagtgctctccaagatgtcaatgataagtatctcttattggaagaaacagaaaagcaggctgtccggaaggctttgattgaagaacgtggccgattctgtaccttcatctctatgctgcggccagtgattgaagaagaaatctcaatgctaggggaaataacccaccttcagaccatctcggaagatctaaaaagcctgaccatggaccctcacaaactgccctcctcaagtgaacaggtgattctggacttgaaaggttctgattacagctggtcgtatcagacgccaccctcttcccccagcaccaccatgtccagaaagtccagtgtctgcagcagcctgaacagtgtcaacagcagtgactcccggtccagcggctcccactcgcattcccccagctcacattaccgctaccgcagctccaacctggcccagcaggctcctgtgaggctgtccagcgtgtcctcccatgactcaggattcatatcccaggatgccttccagtccaagtcaccatcccccatgccgccagaggcccccaaccagttgtctaacgggttttctcactatagtttatcaagtgagtcccacgtggggcccacgggtgcaggccttttccctcattgcctgcctgcctcccgcctgctccctcgggtcacctctgtccaccttccagactacgctcattattacaccattgggcccggcatgttcccgtcatctcagatccctagctggaaggactgggctaagcctgggccctatgaccagcctctggtgaacaccctgcagcgccgcaaagagaagcgagaaccggaccccaacgggggaggacccactaccgccagcggcccacctgcagcagctgaggaggctcagagaccacggagcatgactgtatcggctgccaccaggcctggtgaggagatggaggcttgtgaggagctggccctggccctgtctcggggcctgcagctggacacccagaggagcagccgggactcgcttcagtgctccagcggctacagcacccagacaaccaccccctgctgctctgaggacaccatcccttcccaagtttcagattatgattatttctctgtaagtggtgaccaggaggcagatcagcaggagttcgacaagtcctccaccattccaagaaacagcgacatcagccagtcctaccgacggatgttccaagccaagcgtccagcctcaactgctggcctccccaccaccctgggacctgctatggtcactccaggggttgcaactatccgacggaccccttccaccaagccttctgtccgccggggaaccattggagctggtcccatccccatcaagacacccgtgatccctgtcaagaccccaaccgtcccagacctcccaggggtgttgccagcccctccagatgggccagaagagcggggggagcacagccctgagtcgccatctgtgggtgagggcccccaaggtgtcaccagcatgccctcctcaatgtggagcggccaagcttccgttaaccctccacttccaggcccgaagcccagtatccctgaggagcacagacaggcaattccagaaagtgaagctgaagaccaggaacgggaacccccaagtgccactgtctccccaggccagattccagagagtgaccctgcagacctgagcccaagggatactccacaaggagaagacatgctgaacgccatccgaaggggcgtgaaactgaagaagaccacgacaaacgatcgctcagcccctcgcttttcttaggttcacaagaaatgcgccggtggggaatgaactgtttcattaataaaacctaatttgtcttgatccattccactctataataaaacaaaagattttgtaggcaactcggaatatagctcttttgaaagtactcgacacctttagataagaattaaaaccaacctatgtaactgacataatcttgatcttttaatttgtaaatattgacaattttctttctgcacattttaatcttagtttcccttttgatttttctgaaggtgccaaattccatttaacttttttacaagtctttgtaaaattttaaatgcataaagggggttggggcaggggaaccacgaagtagttaattttagaaaaggatttactatacttcactcttctttttttttccccacaagcttttgtagatgcattgtagtagtctagcttagaagcaaatgcaagttattttaatgtacaaactaaatgggtaagaggtaaaatcttcatttaaatatactatgttctggatgaaaagagcaggagtaacaattgatgagcaatattcagagtgaagtaaatctggaaatggtagactgtgttgggattggggggagggccatgggaggggtacatcgtcaacatagccgatcctgttacatttaagagtagcctcgtaggttgaatttcttctggtagcttcatggtaaatgcatccgaataagccatactggattgcagtgtttgtttctgtagggtgtttaaggacttgacttcctttctcccatgattcctctggactgcacacagcacccacaaccagccccatgcatgctgctgcctctgggcagtcgtagaatctcccacttcagtttctcgttgattgtactcacctttatggaatccaaatacatccaaaagggtaaggcagttttaaaaatgtgaaaacatttaaaaatgataatagcagggaattcttagattatagtaaatgccttttacttaactgtgcccagcaggctgggtgcgttaaaaagcccaagtattttgaaaaaactcgaacagatttgacaagggtagccagcttggagtctagcaacttgccaatgtgtttaccaatctgggggcttgtttttcttttcttctttcaaataaatggcagttaactggctttacagtaaacattgaagagaggaggatttgtttattgtcactgggaatctgaccactatactgtcctttttttgtattctgggtaaatgttttttggaaaagatttgtcttttctaagtggaagttaaatttgttatactgcccatcccctaaagccaacagagatttgtagatttaaagggatcacatttgaagacaatagtgtttaagaaagcaagcaagtcccttagcagtcaggtcataacagggcacatttctgaccgaaccctctcaaggcagaggaggagtttggtgggtttcatacaccctgcagattcctgttggctctaaccctcaattacctaatcttatgctttaacacataactgcattggatgtgagagtaacgtaccgtatggtcattgttctatatattaacattgaacactgctgcgattgctcaaggacattttatgttacggctttaaagcaaaggcatgattattagaaactatttaagcttttttctttgaaaaacaagctccttttacagaatataaacaacagtagtgcctgtggtttagcccaccaatcttgatgactaaaagtagctgatgcattgtgcatatgatgcttgagatggtttttgcaaaagcagaaatcgctgcaaggtaatcacaatagataaaagtggtattttaaacctttgaaataaatggatgtaactgtaccttggtacagcttttcacttgtttagtttttaaacgttagtataatctgaataaataaaatgttgccaaattcaatgtagaaagaatgtgacaacacaccttgggtagttctgcttgtgtttttgcatattgtaaaagcagtgtcacagctaaaaagaaagaaatcgtttctaacagtaaattattgtgctttagttgctagtttgtactgagagttgacctctccctgtgcagttttttgttctaaacttgtataaataacaattgtgtaatgtgtctccctcctacattgtaacaattgcttcagcctacgttataaataaagaaccactagattaaaaaa

SEQ ID NO: 351812 - DNA, 3886 bp, Homo sapiens
atacatcatcggttcctggcgtaggcctagaactagagcacacgtctacaggacgctagccggtagaccccaccctctgctccctgtgccctgcctgaccatggaccctcacaaactgccctcctcaagtgaacaggtgattctggacttgaaaggttctgattacagctggtcgtatcagacgccaccctcttcccccagcaccaccatgtccagaaagtccagtgtctgcagcagcctgaacagtgtcaacagcagtgactcccggtccagcggctcccactcgcattcccccagctcacattaccgctaccgcagctccaacctggcccagcaggctcctgtgaggctgtccagcgtgtcctcccatgactcaggattcatatcccaggatgccttccagtccaagtcaccatcccccatgccgccagaggcccccaaccagttgtctaacgggttttctcactatagtttatcaagtgagtcccacgtggggcccacgggtgcaggccttttccctcattgcctgcctgcctcccgcctgctccctcgggtcacctctgtccaccttccagactacgctcattattacaccattgggcccggcatgttcccgtcatctcagatccctagctggaaggactgggctaagcctgggccctatgaccagcctctggtgaacaccctgcagcgccgcaaagagaagcgagaaccggaccccaacgggggaggacccactaccgccagcggcccacctgcagcagctgaggaggctcagagaccacggagcatgactgtatcggctgccaccaggcctggtgaggagatggaggcttgtgaggagctggccctggccctgtctcggggcctgcagctggacacccagaggagcagccgggactcgcttcagtgctccagcggctacagcacccagacaaccaccccctgctgctctgaggacaccatcccttcccaagtttcagattatgattatttctctgtaagtggtgaccaggaggcagatcagcaggagttcgacaagtcctccaccattccaagaaacagcgacatcagccagtcctaccgacggatgttccaagccaagcgtccagcctcaactgctggcctccccaccaccctgggacctgctatggtcactccaggggttgcaactatccgacggaccccttccaccaagccttctgtccgccggggaaccattggagctggtcccatccccatcaagacacccgtgatccctgtcaagaccccaaccgtcccagacctcccaggggtgttgccagcccctccagatgggccagaagagcggggggagcacagccctgagtcgccatctgtgggtgagggcccccaaggtgtcaccagcatgccctcctcaatgtggagcggccaagcttccgttaaccctccacttccaggcccgaagcccagtatccctgaggagcacagacaggcaattccagaaagtgaagctgaagaccaggaacgggaacccccaagtgccactgtctccccaggccagattccagagagtgaccctgcagacctgagcccaagggatactccacaaggagaagacatgctgaacgccatccgaaggggcgtgaaactgaagaagaccacgacaaacgatcgctcagcccctcgcttttcttaggttcacaagaaatgcgccggtggggaatgaactgtttcattaataaaacctaatttgtcttgatccattccactctataataaaacaaaagattttgtaggcaactcggaatatagctcttttgaaagtactcgacacctttagataagaattaaaaccaacctatgtaactgacataatcttgatcttttaatttgtaaatattgacaattttctttctgcacattttaatcttagtttcccttttgatttttctgaaggtgccaaattccatttaacttttttacaagtctttgtaaaattttaaatgcataaagggggttggggcaggggaaccacgaagtagttaattttagaaaaggatttactatacttcactcttctttttttttccccacaagcttttgtagatgcattgtagtagtctagcttagaagcaaatgcaagttattttaatgtacaaactaaatgggtaagaggtaaaatcttcatttaaatatactatgttctggatgaaaagagcaggagtaacaattgatgagcaatattcagagtgaagtaaatctggaaatggtagactgtgttgggattggggggagggccatgggaggggtacatcgtcaacatagccgatcctgttacatttaagagtagcctcgtaggttgaatttcttctggtagcttcatggtaaatgcatccgaataagccatactggattgcagtgtttgtttctgtagggtgtttaaggacttgacttcctttctcccatgattcctctggactgcacacagcacccacaaccagccccatgcatgctgctgcctctgggcagtcgtagaatctcccacttcagtttctcgttgattgtactcacctttatggaatccaaatacatccaaaagggtaaggcagttttaaaaatgtgaaaacatttaaaaatgataatagcagggaattcttagattatagtaaatgccttttacttaactgtgcccagcaggctgggtgcgttaaaaagcccaagtattttgaaaaaactcgaacagatttgacaagggtagccagcttggagtctagcaacttgccaatgtgtttaccaatctgggggcttgtttttcttttcttctttcaaataaatggcagttaactggctttacagtaaacattgaagagaggaggatttgtttattgtcactgggaatctgaccactatactgtcctttttttgtattctgggtaaatgttttttggaaaagatttgtcttttctaagtggaagttaaatttgttatactgcccatcccctaaagccaacagagatttgtagatttaaagggatcacatttgaagacaatagtgtttaagaaagcaagcaagtcccttagcagtcaggtcataacagggcacatttctgaccgaaccctctcaaggcagaggaggagtttggtgggtttcatacaccctgcagattcctgttggctctaaccctcaattacctaatcttatgctttaacacataactgcattggatgtgagagtaacgtaccgtatggtcattgttctatatattaacattgaacactgctgcgattgctcaaggacattttatgttacggctttaaagcaaaggcatgattattagaaactatttaagcttttttctttgaaaaacaagctccttttacagaatataaacaacagtagtgcctgtggtttagcccaccaatcttgatgactaaaagtagctgatgcattgtgcatatgatgcttgagatggtttttgcaaaagcagaaatcgctgcaaggtaatcacaatagataaaagtggtattttaaacctttgaaataaatggatgtaactgtaccttggtacagcttttcacttgtttagtttttaaacgttagtataatctgaataaataaaatgttgccaaattcaatgtagaaagaatgtgacaacacaccttgggtagttctgcttgtgtttttgcatattgtaaaagcagtgtcacagctaaaaagaaagaaatcgtttctaacagtaaattattgtgctttagttgctagtttgtactgagagttgacctctccctgtgcagttttttgttctaaacttgtataaataacaattgtgtaatgtgtctccctcctacattgtaacaattgcttcagcctacgttataaataaagaaccactagattaaaaaa

SEQ ID NO: 351813 - DNA, 4456 bp, Homo sapiens
aggcggcggccgcagctgcgagcaacagatccggacgccgcgagctgacccgctctgctgttgggcgatttttttttaattgcagaaaaatttattaaattggaaaatcttgcgtttttcaatggcgctggccccgggtcagcgggcgattttctctgcatcaagatgggctttgccgtttccgtagtgggcaccagtggtggcctgattgtcagtcttctcccggcatttttaaggccaggagccgagcgctgcttgtaggcgaataccctacagagcggtttggctttttaaattactgttattattttgggcagagaacagtcggtctggtgcaccccgtcctcgctgcagaagaggctgcgagtccgaggtgggtctctcggaaggtgaaattccttctggggtgagcgagccccggccccgcgcgcagtccagcggccccgcgtgtgtgccctcgccctgccggagccgggaaaatggaggctgtgattgagaaggaatgcagcgcgctcggaggcctcttccagaccatcatcagcgacatgaaggggagctatccagtttgggaagatttcataaacaaagcaggaaagctgcagtcccagcttcggacaacagtagtagcagcagctgccttcttggacgcctttcagaaagtggctgacatggccaccaacacacgtggtgggaccagggagattggatctgctctcaccaggatgtgcatgaggcacagaagcattgaagccaagctgaggcagttttcgagcgctttaattgattgtctgataaacccacttcaagaacagatggaagaatggaagaaagtggccaaccagctggataaagaccacgcaaaagaatataagaaagcccgccaagagataaaaaagaagtcctcggatacgctgaaactgcagaagaaagcaaaaaaagggagaggtgatatccagcctcagttggacagtgctctccaagatgtcaatgataagtatctcttattggaagaaacagaaaagcaggctgtccggaaggctttgattgaagaacgtggccgattctgtaccttcatctctatgctgcggccagtgattgaagaagaaatctcaatgctaggggaaataacccaccttcagaccatctcggaagatctaaaaagcctgaccatggaccctcacaaactgccctcctcaagtgaacaggtgattctggacttgaaaggttctgattacagctggtcgtatcagacgccaccctcttcccccagcaccaccatgtccagaaagtccagtgtctgcagcagcctgaacagtgtcaacagcagtgactcccggtccagcggctcccactcgcattcccccagctcacattaccgctaccgcagctccaacctggcccagcaggctcctgtgaggctgtccagcgtgtcctcccatgactcaggattcatatcccaggatgccttccagtccaagtcaccatcccccatgccgccagaggcccccaaccagttgtctaacgggttttctcactatagtttatcaagtgagtcccacgtggggcccacgggtgcaggccttttccctcattgcctgcctgcctcccgcctgctccctcgggtcacctctgtccaccttccagactacgctcattattacaccattgggcccggcatgttcccgtcatctcagatccctagctggaaggactgggctaagcctgggccctatgaccagcctctggtgaacaccctgcagcgccgcaaagagaagcgagaaccggaccccaacgggggaggacccactaccgccagcggcccacctgcagcagctgaggaggctcagagaccacggagcatgactgtatcggctgccaccaggcctggtgaggagatggaggcttgtgaggagctggccctggccctgtctcggggcctgcagctggacacccagaggagcagccgggactcgcttcagtgctccagcggctacagcacccagacaaccaccccctgctgctctgaggacaccatcccttcccaagtttcagattatgattatttctctgtaagtggtgaccaggaggcagatcagcaggagttcgacaagtcctccaccattccaagaaacagcgacatcagccagtcctaccgacggatgttccaagccaagcgtccagcctcaactgctggcctccccaccaccctgggacctgctatggtcactccaggggttgcaactatccgacggaccccttccaccaagccttctgtccgccggggaaccattggagctggtcccatccccatcaagacacccgtgatccctgtcaagaccccaaccgtcccagacctcccaggggtgttgccagcccctccagatgggccagaagagcggggggagcacagccctgagtcgccatctgtgggtgagggcccccaaggtgtcaccagcatgccctcctcaatgtggagcggccaagcttccgttaaccctccacttccaggcccgaagcccagtatccctgaggagcacagacaggcaattccagaaagtgaagctgaagaccaggaacgggaacccccaagtgccactgtctccccaggccagattccagagagtgaccctgcagacctgagcccaagggatactccacaaggagaagacatgctgaacgccatccgaaggggcgtgaaactgaagaagaccacgacaaacgatcgctcagcccctcgcttttcttaggttcacaagaaatgcgccggtggggaatgaactgtttcattaataaaacctaatttgtcttgatccattccactctataataaaacaaaagattttgtaggcaactcggaatatagctcttttgaaagtactcgacacctttagataagaattaaaaccaacctatgtaactgacataatcttgatcttttaatttgtaaatattgacaattttctttctgcacattttaatcttagtttcccttttgatttttctgaaggtgccaaattccatttaacttttttacaagtctttgtaaaattttaaatgcataaagggggttggggcaggggaaccacgaagtagttaattttagaaaaggatttactatacttcactcttctttttttttccccacaagcttttgtagatgcattgtagtagtctagcttagaagcaaatgcaagttattttaatgtacaaactaaatgggtaagaggtaaaatcttcatttaaatatactatgttctggatgaaaagagcaggagtaacaattgatgagcaatattcagagtgaagtaaatctggaaatggtagactgtgttgggattggggggagggccatgggaggggtacatcgtcaacatagccgatcctgttacatttaagagtagcctcgtaggttgaatttcttctggtagcttcatggtaaatgcatccgaataagccatactggattgcagtgtttgtttctgtagggtgtttaaggacttgacttcctttctcccatgattcctctggactgcacacagcacccacaaccagccccatgcatgctgctgcctctgggcagtcgtagaatctcccacttcagtttctcgttgattgtactcacctttatggaatccaaatacatccaaaagggtaaggcagttttaaaaatgtgaaaacatttaaaaatgataatagcagggaattcttagattatagtaaatgccttttacttaactgtgcccagcaggctgggtgcgttaaaaagcccaagtattttgaaaaaactcgaacagatttgacaagggtagccagcttggagtctagcaacttgccaatgtgtttaccaatctgggggcttgtttttcttttcttctttcaaataaatggcagttaactggctttacagtaaacattgaagagaggaggatttgtttattgtcactgggaatctgaccactatactgtcctttttttgtattctgggtaaatgttttttggaaaagatttgtcttttctaagtggaagttaaatttgttatactgcccatcccctaaagccaacagagatttgtagatttaaagggatcacatttgaagacaatagtgtttaagaaagcaagcaagtcccttagcagtcaggtcataacagggcacatttctgaccgaaccctctcaaggcagaggaggagtttggtgggtttcatacaccctgcagattcctgttggctctaaccctcaattacctaataagcagtgtcacagctaaaaagaaagaaatcgtttctaacagtaaattattgtgctttagttgctagtttgtactgagagttgacctctccctgtgcagttttttgttctaaacttgtataaataacaattgtgtaatgtgtctccctcctacattgtaacaattgcttcagcctacgttataaataaagaaccactagattaaaaaa

SEQ ID NO: 351814 - DNA, 3720 bp, Homo sapiens
aggcggcggccgcagctgcgagcaacagatccggacgccgcgagctgacccgctctgctgttgggcgatttttttttaattgcagaaaaatttattaaattggaaaatcttgcgtttttcaatggcgctggccccgggtcagcgggcgattttctctgcatcaagatgggctttgccgtttccgtagtgggcaccagtggtggcctgattgtcagtcttctcccggcatttttaaggccaggagccgagcgctgcttgtaggcgaataccctacagagcggtttggctttttaaattactgttattattttgggcagagaacagtcggtctggtgcaccccgtcctcgctgcagaagaggctgcgagtccgaggtgggtctctcggaaggtgaaattccttctggggtgagcgagccccggccccgcgcgcagtccagcggccccgcgtgtgtgccctcgccctgccggagccgggaaaatggaggctgtgattgagaaggaatgcagcgcgctcggaggcctcttccagaccatcatcagcgacatgaaggggagctatccagtttgggaagatttcataaacaaagcaggaaagctgcagtcccagcttcggacaacagtagtagcagcagctgccttcttggacgcctttcagaaagtggctgacatggccaccaacacacgtggtgggaccagggagattggatctgctctcaccaggatgtgcatgaggcacagaagcattgaagccaagctgaggcagttttcgagcgctttaattgattgtctgataaacccacttcaagaacagatggaagaatggaagaaagtggccaaccagctggataaagaccacgcaaaagaatataagaaagcccgccaagagataaaaaagaagtcctcggatacgctgaaactgcagaagaaagcaaaaaaagggagaggtgatatccagcctcagttggacagtgctctccaagatgtcaatgataagtatctcttattggaagaaacagaaaagcaggctgtccggaaggctttgattgaagaacgtggccgattctgtaccttcatctctatgctgcggccagtgattgaagaagaaatctcaatgctaggggaaataacccaccttcagaccatctcggaagatctaaaaagcctgaccatggaccctcacaaactgccctcctcaagtgaacaggtgattctggacttgaaaggttctgattacagctggtcgtatcagacgccaccctcttcccccagcaccaccatgtccagaaagtccagtgtctgcagcagcctgaacagtgtcaacagcagtgactcccggtccagcggctcccactcgcattcccccagctcacattaccgctaccgcagctccaacctggcccagcaggctcctgtgaggctgtccagcgtgtcctcccatgactcaggattcatatcccaggatgccttccagtccaagtcaccatcccccatgccgccagaggcccccaaccagttgtctaacgggttttctcactatagtttatcaagtgagtcccacgtggggcccacgggtgcaggccttttccctcattgcctgcctgcctcccgcctgctccctcgggtcacctctgtccaccttccagactacgctcattattacaccattgggcccggcatgttcccgtcatctcagatccctagctggaaggactgggctaagcctgggccctatgaccagcctctggtgaacaccctgcagcgccgcaaagagaagcgagaaccggaccccaacgggggaggacccactaccgccagcggcccacctgcagcagctgaggaggctcagagaccacggagcatgactgtatcggctgccaccaggcctggtgaggagatggaggcttgtgaggagctggccctggccctgtctcggggcctgcagctggacacccagaggagcagccgggactcgcttcagtgctccagcggctacagcacccagacaaccaccccctgctgctctgaggacaccatcccttcccaagtttcagattatgattatttctctgtaagtggtgaccaggaggcagatcagcaggagttcgacaagtcctccaccattccaagaaacagcgacatcagccagtcctaccgacggatgttccaagccaagcgtccagcctcaactgctggcctccccaccaccctgggacctgctatggtcactccaggggttgcaactatccgacggaccccttccaccaagccttctgtccgccggggaaccattggagctggtcccatccccatcaagacacccgtgatccctgtcaagaccccaaccgtcccagacctcccaggggtgttgccagcccctccagatgggccagaagagcggggggagcacagccctgagtcgccatctgtgggtgagggcccccaaggtgtcaccagcatgccctcctcaatgtggagcggccaagcttccgttaaccctccacttccaggcccgaagcccagtatccctgaggagcacagacaggcaattccagaaagtgaagctgaagaccaggaacgggaacccccaagtgccactgtctccccaggccagattccagagagtgaccctgcagacctgagcccaagggatactccacaaggagaagacatgctgaacgccatccgaaggggcgtgaaactgaagaagaccacgacaaacgatcgctcagcccctcgcttttcttaggttcacaagaaatgcgccggtggggaatgaactgtttcattaataaaacctaatttgtcttgatccattccactctataataaaacaaaagattttgtaggcaactcggaatatagctcttttgaaagtactcgacacctttagataagaattaaaaccaacctatgtaactgacataatcttgatcttttaatttgtaaatattgacaattttctttctgcacattttaatcttagtttcccttttgatttttctgaaggtgccaaattccatttaacttttttacaagtctttgtaaaattttaaatgcataaagggggttggggcaggggaaccacgaagtagttaattttagaaaaggatttactatacttcactcttctttttttttccccacaagcttttgtagatgcattgtagtagtctagcttagaagcaaatgcaagttattttaatgtacaaactaaatgggtaagaggtaaaatcttcatttaaatatactatgttctggatgaaaagagcaggagtaacaattgatgagcaatattcagagtgaagtaaatctggaaatggtagactgtgttgggattggggggagggccatgggaggggtacatcgtcaacatagccgatcctgttacatttaagagtagcctcgtaggttgaatttcttctggtagcttcatggtaaatgcatccgaataagccatactggattgcagtgtttgtttctgtagggtgtttaaggacttgacttcctttctcccatgattcctctggactgcacacagcacccacaaccagccccatgcatgctgctgcctctgggcagtcgtagaatctcccacttcagtttctcgttgattgtactcacctttatggaatccaaatacatccaaaagggtaaggcagttttaaaaatgtgaaaacatttaaaaatgaggctagtgggctgatgaggctagtgcgctg

SEQ ID NO: 351815 - DNA, 2847 bp, Homo sapiens
aggcggcggccgcagctgcgagcaacagatccggacgccgcgagctgacccgctctgctgttgggcgatttttttttaattgcagaaaaatttattaaattggaaaatcttgcgtttttcaatggcgctggccccgggtcagcgggcgattttctctgcatcaagatgggctttgccgtttccgtagtgggcaccagtggtggcctgattgtcagtcttctcccggcatttttaaggccaggagccgagcgctgcttgtaggcgaataccctacagagcggtttggctttttaaattactgttattattttgggcagagaacagtcggtctggtgcaccccgtcctcgctgcagaagaggctgcgagtccgaggtgggtctctcggaaggtgaaattccttctggggtgagcgagccccggccccgcgcgcagtccagcggccccgcgtgtgtgccctcgccctgccggagccgggaaaatggaggctgtgattgagaaggaatgcagcgcgctcggaggcctcttccagaccatcatcagcgacatgaaggggagctatccagtttgggaagatttcataaacaaagcaggaaagctgcagtcccagcttcggacaacagtagtagcagcagctgccttcttggacgcctttcagaaagtggctgacatggccaccaacacacgtggtgggaccagggagattggatctgctctcaccaggatgtgcatgaggcacagaagcattgaagccaagctgaggcagttttcgagcgctttaattgattgtctgataaacccacttcaagaacagatggaagaatggaagaaagtggccaaccagctggataaagaccacgcaaaagaatataagaaagcccgccaagagataaaaaagaagtcctcggatacgctgaaactgcagaagaaagcaaaaaaagggagaggtgatatccagcctcagttggacagtgctctccaagatgtcaatgataagtatctcttattggaagaaacagaaaagcaggctgtccggaaggctttgattgaagaacgtggccgattctgtaccttcatctctatgctgcggccagtgattgaagaagaaatctcaatgctaggggaaataacccaccttcagaccatctcggaagatctaaaaagcctgaccatggaccctcacaaactgccctcctcaagtgaacaggtgattctggacttgaaaggttctgattacagctggtcgtatcagacgccaccctcttcccccagcaccaccatgtccagaaagtccagtgtctgcagcagcctgaacagtgtcaacagcagtgactcccggtccagcggctcccactcgcattcccccagctcacattaccgctaccgcagctccaacctggcccagcaggctcctgtgaggctgtccagcgtgtcctcccatgactcaggattcatatcccaggatgccttccagtccaagtcaccatcccccatgccgccagaggcccccaaccagttgtctaacgggttttctcactatagtttatcaagtgagtcccacgtggggcccacgggtgcaggccttttccctcattgcctgcctgcctcccgcctgctccctcgggtcacctctgtccaccttccagactacgctcattattacaccattgggcccggcatgttcccgtcatctcagatccctagctggaaggactgggctaagcctgggccctatgaccagcctctggtgaacaccctgcagcgccgcaaagagaagcgagaaccggaccccaacgggggaggacccactaccgccagcggcccacctgcagcagctgaggaggctcagagaccacggagcatgactgtatcggctgccaccaggcctggtgaggagatggaggcttgtgaggagctggccctggccctgtctcggggcctgcagctggacacccagaggagcagccgggactcgcttcagtgctccagcggctacagcacccagacaaccaccccctgctgctctgaggacaccatcccttcccaagtttcagattatgattatttctctgtaagtggtgaccaggaggcagatcagcaggagttcgacaagtcctccaccattccaagaaacagcgacatcagccagtcctaccgacggatgttccaagccaagcgtccagcctcaactgctggcctccccaccaccctgggacctgctatggtcactccaggggttgcaactatccgacggaccccttccaccaagccttctgtccgccggggaaccattggagctggtcccatccccatcaagacacccgtgatccctgtcaagaccccaaccgtcccagacctcccaggggtgttgccagcccctccagatgggccagaagagcggggggagcacagccctgagtcgccatctgtgggtgagggcccccaaggtgtcaccagcatgccctcctcaatgtggagcggccaagcttccgttaaccctccacttccaggcccgaagcccagtatccctgaggagcacagacaggcaattccagaaagtgaagctgaagaccaggaacgggaacccccaagtgccactgtctccccaggccagattccagagagtgaccctgcagacctgagcccaagggatactccacaaggagaagacatgctgaacgccatccgaaggggcgtgaaactgaagaagaccacgacaaacgatcgctcagcccctcgcttttcttaggttcacaagaaatgcgccggtggggaatgaactgtttcattaataaaacctaatttgtcttgatccattccactctataataaaacaaaagattttgtag

SEQ ID NO: 351816 - DNA, 261 bp, Homo sapiens
tgttggggactgctcccaggcacatgaaagtttctccgaaccacctgatgggtaccttcagtgcaatgatactcattcatcacaggtgcttaaaagtatttgaatgaatttgcagcaagaacccttctcattcattgaacaaactccttttatttcaggcactatcatgggaccacaaaaagcaatatgactctccttgtcctggagcggcttacaattgagtggggaaaatgagaagtataaataaagaatttcaacata

SEQ ID NO: 351817 - DNA, 539 bp, Homo sapiens
ctggggaagagccccagtcactctggttccctgcttggtgttgtttggggcaagtgggagaacagccagggccatgtttcatgaacaagtggttcagggtggagctttaaatgttctgtacaccttaaatttggacccaccatctaccaactcaaaagtgtatgtgtcagattctgccaaactagttcagttgatgtttgtagtatttacaagattataggaactgagcacattctaaactgattcctgagccaatacatgtatatagaatccgggaaacgtattgcagacctgcaaaggaagagaacatacacagattgttccctgcatgattggaattgggtgctctgttaatgtagtaatcagatgtctatcgcagtgtgacttactgatgtctttgatgtgttgcaggggagctatccagtttgggaagatttcataaacaaagcaggaaagctgcagtcccagcttcggtaagtagaagcacatgttctacaggaaaaggacaacatcctcagacaaggatggagtgggacaga

SEQ ID NO: 351818 - DNA, 417 bp, Homo sapiens
tgggtcgtgcattgtgtgcagggagaggtgatatccagcctcagttggacagtgctctccaagatgtcaatgataagtatctcttattggaagaaacagaaaagcaggctgtccggaaggctttgattgaagaacgtggccgattctgtaccttcatctctatgctgcggccagtgattgtaagttaatggaaaactccagaaggtttaaactgctggtgtagaggtggcttccttctaattttatccatccactgttgagtcatggagaatctactgtcaggaatcatgatggtggtatctcctgtacagaccagcgattcagtgcaagttgatggccatgtagctcactcctcattcactgttctagtaccacttgttccccgttactttgtctcaccaagtcaagaaggcccag

SEQ ID NO: 351819 - DNA, 1782 bp, Homo sapiens
cgtccaccgtggagtctctccttgctttgggtccactgagccccacacattgttgagtgtctgattgtctccttgcccttacaggacaggaaagcgaaatctctgttcctttgtagggacctttcttttgtaggtgaaagggacagaaatatgattctggcctccttgatggtgaatacaggaacactttcagataaattacaatagagaggagtcagcttatttaaacaaactgaggttaagccagagattgcagttaacagtgaaaaaatttaaagcaagtacctggatggatgcaaagcagtgcccaggagacccaacttacgtgacagagatgatcattgtcactcattcattatgttttgagcaccagccatgtgccaggtccagaactagaagaaacttgggtgtaggtgagatcataggaacagtccctgccccagctgaacatcaggaagccagactgggagcacatgccgtggctgactaggactccagcagggacctggggttccatcagatcagtgtaaagcgatggtttcccaaatgagacctctccagagatggttcattccaccccgcaatggccaccagaaacattgtgctgaccagagggcttcactgccccaaaccccaaaatcacactccaggatgagaaacctaaaagtctatcttgatgaggcttcatagctggaaaccacccctcatggatccacaggctgcatttgatgaaaggagactccaggaagtcgagccattccaggcagacatgtagcaaaagcccgagctggggtccgccctcatgcaataaataacacctgtgcacataagagaggtgacaggcagggcatccctggggacctgggcctgtggcacgtgaagaaacacccaagagagcacgaagtcccaatgccatgaccagatatttcggtgccaggcatgcttctgggtcccagcaaaagacacacaaatccgtgtccttggggacccacagtctagtgacctagggctggccgggtcgcacgcttcttttcaagggctcgaaagcctctgcatggatgcaactttgggggaaaagtaaccctaaccctctgcttctctcatcctcccctcttctgtgtatatgtctgtctctttctctctgtgtgtgcccttccccactcccatccccattcctttttttatttattatattttggtggtgtgtggctcggtttctgttggtcccctcgtgtggcccctcccctgctgcagaactcgtccagctcggcctcctccgaagcctcggaaacctgccagtcagtgagcgagtgcagctcccccacctctgtcagctcgggctccaccatgggtgcctgggtgtccacagagaaggtgaccgcccgggtggcagccacagcggccccactctccctggtccccctgcctgctgctcagacagccctcacagccgcggcaacctggaagctcagaatcgacaccaagagtggggctcctcttggggacagagggtgggacaaggctgagagcattttctagaatgagtgcctggctgctggacaatgaccacatggttgtctcaagggagaggaaggggtatggggaatttggaggtgtgaaggctttctcccagaccaggtgttgcgtgcctgtccatcctcctccctcccttcccgagccacccaccagaccgttggatgagccatgtcactgtgtcagaggctgtgtgcttttccgctttttagtttgcacccccacagagagagctcggtaccacactat

SEQ ID NO: 351820 - DNA, 4760 bp, Homo sapiens
aggcggcggccgcagctgcgagcaacagatccggacgccgcgagctgacccgctctgctgttgggcgatttttttttaattgcagaaaaatttattaaattggaaaatcttgcgtttttcaatggcgctggccccgggtcagcgggcgattttctctgcatcaagatgggctttgccgtttccgtagtgggcaccagtggtggcctgattgtcagtcttctcccggcatttttaaggccaggagccgagcgctgcttgtaggcgaataccctacagagcggtttggctttttaaattactgttattattttgggcagagaacagtcggtctggtgcaccccgtcctcgctgcagaagaggctgcgagtccgaggtgggtctctcggaaggtgaaattccttctggggtgagcgagccccggccccgcgcgcagtccagcggccccgcgtgtgtgccctcgccctgccggagccgggaaaatggaggctgtgattgagaaggaatgcagcgcgctcggaggcctcttccagaccatcatcagcgacatgaaggggagctatccagtttgggaagatttcataaacaaagcaggaaagctgcagtcccagcttcggacaacagtagtagcagcagctgccttcttggacgcctttcagaaagtggctgacatggccaccaacacacgtggtgggaccagggagattggatctgctctcaccaggatgtgcatgaggcacagaagcattgaagccaagctgaggcagttttcgagcgctttaattgattgtctgataaacccacttcaagaacagatggaagaatggaagaaagtggccaaccagctggataaagaccacgcaaaagaatataagaaagcccgccaagagataaaaaagaagtcctcggatacgctgaaactgcagaagaaagcaaaaaaagggagaggtgatatccagcctcagttggacagtgctctccaagatgtcaatgataagtatctcttattggaagaaacagaaaagcaggctgtccggaaggctttgattgaagaacgtggccgattctgtaccttcatctctatgctgcggccagtgattgaagaagaaatctcaatgctaggggaaataacccaccttcagaccatctcggaagatctaaaaagcctgaccatggaccctcacaaactgccctcctcaagtgaacaggtgattctggacttgaaaggttctgattacagctggtcgtatcagacgccaccctcttcccccagcaccaccatgtccagaaagtccagtgtctgcagcagcctgaacagtgtcaacagcagtgactcccggtccagcggctcccactcgcattcccccagctcacattaccgctaccgcagctccaacctggcccagcaggctcctgtgaggctgtccagcgtgtcctcccatgactcaggattcatatcccaggatgccttccagtccaagtcaccatcccccatgccgccagaggcccccaaccaggactgggctaagcctgggccctatgaccagcctctggtgaacaccctgcagcgccgcaaagagaagcgagaaccggaccccaacgggggaggacccactaccgccagcggcccacctgcagcagctgaggaggctcagagaccacggagcatgactgtatcggctgccaccaggcctggtgaggagatggaggcttgtgaggagctggccctggccctgtctcggggcctgcagctggacacccagaggagcagccgggactcgcttcagtgctccagcggctacagcacccagacaaccaccccctgctgctctgaggacaccatcccttcccaagtttcagattatgattatttctctgtaagtggtgaccaggaggcagatcagcaggagttcgacaagtcctccaccattccaagaaacagcgacatcagccagtcctaccgacggatgttccaagccaagcgtccagcctcaactgctggcctccccaccaccctgggacctgctatggtcactccaggggttgcaactatccgacggaccccttccaccaagccttctgtccgccggggaaccattggagctggtcccatccccatcaagacacccgtgatccctgtcaagaccccaaccgtcccagacctcccaggggtgttgccagcccctccagatgggccagaagagcggggggagcacagccctgagtcgccatctgtgggtgagggcccccaaggtgtcaccagcatgccctcctcaatgtggagcggccaagcttccgttaaccctccacttccaggcccgaagcccagtatccctgaggagcacagacaggcaattccagaaagtgaagctgaagaccaggaacgggaacccccaagtgccactgtctccccaggccagattccagagagtgaccctgcagacctgagcccaagggatactccacaaggagaagacatgctgaacgccatccgaaggggcgtgaaactgaagaagaccacgacaaacgatcgctcagcccctcgcttttcttaggttcacaagaaatgcgccggtggggaatgaactgtttcattaataaaacctaatttgtcttgatccattccactctataataaaacaaaagattttgtaggcaactcggaatatagctcttttgaaagtactcgacacctttagataagaattaaaaccaacctatgtaactgacataatcttgatcttttaatttgtaaatattgacaattttctttctgcacattttaatcttagtttcccttttgatttttctgaaggtgccaaattccatttaacttttttacaagtctttgtaaaattttaaatgcataaagggggttggggcaggggaaccacgaagtagttaattttagaaaaggatttactatacttcactcttctttttttttccccacaagcttttgtagatgcattgtagtagtctagcttagaagcaaatgcaagttattttaatgtacaaactaaatgggtaagaggtaaaatcttcatttaaatatactatgttctggatgaaaagagcaggagtaacaattgatgagcaatattcagagtgaagtaaatctggaaatggtagactgtgttgggattggggggagggccatgggaggggtacatcgtcaacatagccgatcctgttacatttaagagtagcctcgtaggttgaatttcttctggtagcttcatggtaaatgcatccgaataagccatactggattgcagtgtttgtttctgtagggtgtttaaggacttgacttcctttctcccatgattcctctggactgcacacagcacccacaaccagccccatgcatgctgctgcctctgggcagtcgtagaatctcccacttcagtttctcgttgattgtactcacctttatggaatccaaatacatccaaaagggtaaggcagttttaaaaatgtgaaaacatttaaaaatgataatagcagggaattcttagattatagtaaatgccttttacttaactgtgcccagcaggctgggtgcgttaaaaagcccaagtattttgaaaaaactcgaacagatttgacaagggtagccagcttggagtctagcaacttgccaatgtgtttaccaatctgggggcttgtttttcttttcttctttcaaataaatggcagttaactggctttacagtaaacattgaagagaggaggatttgtttattgtcactgggaatctgaccactatactgtcctttttttgtattctgggtaaatgttttttggaaaagatttgtcttttctaagtggaagttaaatttgttatactgcccatcccctaaagccaacagagatttgtagatttaaagggatcacatttgaagacaatagtgtttaagaaagcaagcaagtcccttagcagtcaggtcataacagggcacatttctgaccgaaccctctcaaggcagaggaggagtttggtgggtttcatacaccctgcagattcctgttggctctaaccctcaattacctaatcttatgctttaacacataactgcattggatgtgagagtaacgtaccgtatggtcattgttctatatattaacattgaacactgctgcgattgctcaaggacattttatgttacggctttaaagcaaaggcatgattattagaaactatttaagcttttttctttgaaaaacaagctccttttacagaatataaacaacagtagtgcctgtggtttagcccaccaatcttgatgactaaaagtagctgatgcattgtgcatatgatgcttgagatggtttttgcaaaagcagaaatcgctgcaaggtaatcacaatagataaaagtggtattttaaacctttgaaataaatggatgtaactgtaccttggtacagcttttcacttgtttagtttttaaacgttagtataatctgaataaataaaatgttgccaaattcaatgtagaaagaatgtgacaacacaccttgggtagttctgcttgtgtttttgcatattgtaaaagcagtgtcacagctaaaaagaaagaaatcgtttctaacagtaaattattgtgctttagttgctagtttgtactgagagttgacctctccctgtgcagttttttgttctaaacttgtataaataacaattgtgtaatgtgtctccctcctacattgtaacaattgcttcagcctacgttataaataaagaaccactagattaaaaaa

SEQ ID NO: 351821 - DNA, 3800 bp, Homo sapiens
agcggggtgtgggtcgtgcattgtgtgcagggagaggtgatatccagcctcagttggacagtgctctccaagatgtcaatgataagtatctcttattggaagaaacagaaaagcaggctgtccggaaggctttgattgaagaacgtggccgattctgtaccttcatctctatgctgcggccagtgattgaagaagaaatctcaatgctaggggaaataacccaccttcagaccatctcggaagatctaaaaagcctgaccatggaccctcacaaactgccctcctcaagtgaacaggtgattctggacttgaaaggttctgattacagctggtcgtatcagacgccaccctcttcccccagcaccaccatgtccagaaagtccagtgtctgcagcagcctgaacagtgtcaacagcagtgactcccggtccagcggctcccactcgcattcccccagctcacattaccgctaccgcagctccaacctggcccagcaggctcctgtgaggctgtccagcgtgtcctcccatgactcaggattcatatcccaggatgccttccagtccaagtcaccatcccccatgccgccagaggcccccaaccagcgccgcaaagagaagcgagaaccggaccccaacgggggaggacccactaccgccagcggcccacctgcagcagctgaggaggctcagagaccacggagcatgactgtatcggctgccaccaggcctggtgaggagatggaggcttgtgaggagctggccctggccctgtctcggggcctgcagctggacacccagaggagcagccgggactcgcttcagtgctccagcggctacagcacccagacaaccaccccctgctgctctgaggacaccatcccttcccaagtttcagattatgattatttctctgtaagtggtgaccaggaggcagatcagcaggagttcgacaagtcctccaccattccaagaaacagcgacatcagccagtcctaccgacggatgttccaagccaagcgtccagcctcaactgctggcctccccaccaccctgggacctgctatggtcactccaggggttgcaactatccgacggaccccttccaccaagccttctgtccgccggggaaccattggagctggtcccatccccatcaagacacccgtgatccctgtcaagaccccaaccgtcccagacctcccaggggtgttgccagcccctccagatgggccagaagagcggggggagcacagccctgagtcgccatctgtgggtgagggcccccaaggtgtcaccagcatgccctcctcaatgtggagcggccaagcttccgttaaccctccacttccaggcccgaagcccagtatccctgaggagcacagacaggcaattccagaaagtgaagctgaagaccaggaacgggaacccccaagtgccactgtctccccaggccagattccagagagtgaccctgcagacctgagcccaagggatactccacaaggagaagacatgctgaacgccatccgaaggggcgtgaaactgaagaagaccacgacaaacgatcgctcagcccctcgcttttcttaggttcacaagaaatgcgccggtggggaatgaactgtttcattaataaaacctaatttgtcttgatccattccactctataataaaacaaaagattttgtaggcaactcggaatatagctcttttgaaagtactcgacacctttagataagaattaaaaccaacctatgtaactgacataatcttgatcttttaatttgtaaatattgacaattttctttctgcacattttaatcttagtttcccttttgatttttctgaaggtgccaaattccatttaacttttttacaagtctttgtaaaattttaaatgcataaagggggttggggcaggggaaccacgaagtagttaattttagaaaaggatttactatacttcactcttctttttttttccccacaagcttttgtagatgcattgtagtagtctagcttagaagcaaatgcaagttattttaatgtacaaactaaatgggtaagaggtaaaatcttcatttaaatatactatgttctggatgaaaagagcaggagtaacaattgatgagcaatattcagagtgaagtaaatctggaaatggtagactgtgttgggattggggggagggccatgggaggggtacatcgtcaacatagccgatcctgttacatttaagagtagcctcgtaggttgaatttcttctggtagcttcatggtaaatgcatccgaataagccatactggattgcagtgtttgtttctgtagggtgtttaaggacttgacttcctttctcccatgattcctctggactgcacacagcacccacaaccagccccatgcatgctgctgcctctgggcagtcgtagaatctcccacttcagtttctcgttgattgtactcacctttatggaatccaaatacatccaaaagggtaaggcagttttaaaaatgtgaaaacatttaaaaatgataatagcagggaattcttagattatagtaaatgccttttacttaactgtgcccagcaggctgggtgcgttaaaaagcccaagtattttgaaaaaactcgaacagatttgacaagggtagccagcttggagtctagcaacttgccaatgtgtttaccaatctgggggcttgtttttcttttcttctttcaaataaatggcagttaactggctttacagtaaacattgaagagaggaggatttgtttattgtcactgggaatctgaccactatactgtcctttttttgtattctgggtaaatgttttttggaaaagatttgtcttttctaagtggaagttaaatttgttatactgcccatcccctaaagccaacagagatttgtagatttaaagggatcacatttgaagacaatagtgtttaagaaagcaagcaagtcccttagcagtcaggtcataacagggcacatttctgaccgaaccctctcaaggcagaggaggagtttggtgggtttcatacaccctgcagattcctgttggctctaaccctcaattacctaatcttatgctttaacacataactgcattggatgtgagagtaacgtaccgtatggtcattgttctatatattaacattgaacactgctgcgattgctcaaggacattttatgttacggctttaaagcaaaggcatgattattagaaactatttaagcttttttctttgaaaaacaagctccttttacagaatataaacaacagtagtgcctgtggtttagcccaccaatcttgatgactaaaagtagctgatgcattgtgcatatgatgcttgagatggtttttgcaaaagcagaaatcgctgcaaggtaatcacaatagataaaagtggtattttaaacctttgaaataaatggatgtaactgtaccttggtacagcttttcacttgtttagtttttaaacgttagtataatctgaataaataaaatgttgccaaattcaatgtagaaagaatgtgacaacacaccttgggtagttctgcttgtgtttttgcatattgtaaaagcagtgtcacagctaaaaagaaagaaatcgtttctaacagtaaattattgtgctttagttgctagtttgtactgagagttgacctctccctgtgcagttttttgttctaaacttgtataaataacaattgtgtaatgtgtctccctcctacattgtaacaattgcttcagcctacgttataaataaagaaccactagattaaaaaa

SEQ ID NO: 351822 - DNA, 4695 bp, Homo sapiens
aggcggcggccgcagctgcgagcaacagatccggacgccgcgagctgacccgctctgctgttgggcgatttttttttaattgcagaaaaatttattaaattggaaaatcttgcgtttttcaatggcgctggccccgggtcagcgggcgattttctctgcatcaagatgggctttgccgtttccgtagtgggcaccagtggtggcctgattgtcagtcttctcccggcatttttaaggccaggagccgagcgctgcttgtaggcgaataccctacagagcggtttggctttttaaattactgttattattttgggcagagaacagtcggtctggtgcaccccgtcctcgctgcagaagaggctgcgagtccgaggtgggtctctcggaaggtgaaattccttctggggtgagcgagccccggccccgcgcgcagtccagcggccccgcgtgtgtgccctcgccctgccggagccgggaaaatggaggctgtgattgagaaggaatgcagcgcgctcggaggcctcttccagaccatcatcagcgacatgaaggggagctatccagtttgggaagatttcataaacaaagcaggaaagctgcagtcccagcttcggacaacagtagtagcagcagctgccttcttggacgcctttcagaaagtggctgacatggccaccaacacacgtggtgggaccagggagattggatctgctctcaccaggatgtgcatgaggcacagaagcattgaagccaagctgaggcagttttcgagcgctttaattgattgtctgataaacccacttcaagaacagatggaagaatggaagaaagtggccaaccagctggataaagaccacgcaaaagaatataagaaagcccgccaagagataaaaaagaagtcctcggatacgctgaaactgcagaagaaagcaaaaaaagggagaggtgatatccagcctcagttggacagtgctctccaagatgtcaatgataagtatctcttattggaagaaacagaaaagcaggctgtccggaaggctttgattgaagaacgtggccgattctgtaccttcatctctatgctgcggccagtgattgaagaagaaatctcaatgctaggggaaataacccaccttcagaccatctcggaagatctaaaaagcctgaccatggaccctcacaaactgccctcctcaagtgaacaggtgattctggacttgaaaggttctgattacagctggtcgtatcagacgccaccctcttcccccagcaccaccatgtccagaaagtccagtgtctgcagcagcctgaacagtgtcaacagcagtgactcccggtccagcggctcccactcgcattcccccagctcacattaccgctaccgcagctccaacctggcccagcaggctcctgtgaggctgtccagcgtgtcctcccatgactcaggattcatatcccaggatgccttccagtccaagtcaccatcccccatgccgccagaggcccccaaccagttgtctaacgggttttctcactatagtttatcaagtgagtcccacgtggggcccacgggtgcaggccttttccctcattgcctgcctgcctcccgcctgctccctcgggtcacctctgtccaccttccagactacgctcattattacaccattgggcccggcatgttcccgtcatctcagatccctagctggaaggactgggctaagcctgggccctatgaccagcctctggtgaacaccctgcagcgccgcaaagagaagcgagaaccggaccccaacgggggaggacccactaccgccagcggcccacctgcagcagctgaggaggctcagagaccacggagcatgactgtatcggctgccaccaggcctggtgaggagatggaggcttgtgaggagctggccctggccctgtctcggggcctgcagctggacacccagaggagcagccgggactcgcttcagtgctccagcggctacagcacccagacaaccaccccctgctgctctgaggacaccatcccttcccaagtttcagattatgattatttctctgtaagtggtgaccaggaggcagatcagcaggagttcgacaagtcctccaccattccaagaaacagcgacatcagccagtcctaccgacggatgttccaagccaagcgtccagcctcaactgctggcctccccaccaccctgggacctgctatggtcactccaggggttgcaactatccgacggaccccttccaccaagccttctgtccgccggggaaccattggagctggtcccatccccatcaagacacccgtgatccctgtcaagaccccaaccgtcccagacctcccaggggtgttgccagcccctccagatgggccagaagagcggggggagcacagccctgagtcgccatctgtgggtgagggcccccaaggtgtcaccagcatgccctcctcaatgtggagcggccaagcttccgttaaccctccacttccaggcccgaagcccagtatccctgaggagcacagacaggcaattccagaaagtgaagctgaagaccaggaacgggaacccccaagtgccactgtctccccaggccagattccagagagtgaccctgcagacctgagcccaagggatactccacaaggagaagacatgctgaacgccatccgaaggggcgtgaaactgaagaagaccacgacaaacgatcgctcagcccctcgcttttcttaggttcacaagaaatgcgccggtggggaatgaactgtttcattaataaaacctaatttgtcttgatccattccactctataataaaacaaaagattttgtaggcaactcggaatatagctcttttgaaagtactcgacacctttagataagaattaaaaccaacctatgtaactgacataatcttgatcttttaatttgtaaatattgacaattttctttctgcacattttaatcttagtttcccttttgatttttctgaaggtgccaaattccatttaacttttttacaagtctttgtaaaattttaaatgcataaagggggttggggcaggggaaccacgaagtagttaattttagaaaaggatttactatacttcactcttctttttttttccccacaagcttttgtagatgcattgtagtagtctagcttagaagcaaatgcaagttattttaatgtacaaactaaatgggtaagaggtaaaatcttcatttaaatatactatgttctggatgaaaagagcaggagtaacaattgatgagcaatattcagagtgaagtaaatctggaaatggtagactgtgttgggattggggggagggccatgggaggggtacatcgtcaacatagccgatcctgttacatttaagagtagcctcgtaggttgaatttcttctggtagcttcatggtaaatgcatccgaataagccatactggattgcagtgtttgtttctgtagggtgtttaaggacttgacttcctttctcccatgattcctctggactgcacacagcacccacaaccagccccatgcatgctgctgcctctgggcagtcgtagaatctcccacttcagtttctcgttgattgtactcacctttatggaatccaaatacatccaaaagggtaaggcagttttaaaaatgtgaaaacatttaaaaatgataatagcagggaattcttagattatagtaaatgccttttacttaactgtgcccagcaggctgggtgcgttaaaaagcccaagtattttgaaaaaactcgaacagatttgacaagggtagccagcttggagtctagcaacttgccaatgtgtttaccaatctgggggcttgtttttcttttcttctttcaaataaatggcagttaactggctttacagtaaacattgaagagaggaggatttgtttattgtcactgggaatctgaccactatactgtcctttttttgtattctgggtaaatgttttttggaaaagatttgtcttttctaagtggaagttaaatttgttatactgcccatcccctaaagccaacagagatttgtagatttaaagggatcacatttgaagacaatagtgtttaagaaagcaagcaagtcccttagcagtcaggtcataacagggcacatttctgaccgaaccctctcaaggcagaggaggagtttggtgggtttcatacaccctgcagattcctgttggctctaaccctcaattacctaatcttatgctttaacacataactgcattggatgtgagagtaacgtaccgtatggtcattgttctatatattaacattgaacactgctgcgattgctcaaggacattttatgttacggctttaaagcaaaggcatgattattagaaactatttaagcttttttctttgaaaaacaagctccttttacagaatataaacaacagtagtgcctgtggtttagcccaccaatcttgatgactaaaagtagctgatgcattgtgcatatgatgcttgagatggtttttgcaaaagcagaaatcgctgcaaggtaatcacaatagataaaagtggtattttaaacctttgaaataaatggatgtaactgtaccttggtacagcttttcacttgtttagtttttaaacgttagtataagattaggtaattgagggttagagccaacaggaatctgc

SEQ ID NO: 351823 - DNA, 3667 bp, Homo sapiens
aggcggcggccgcagctgcgagcaacagatccggacgccgcgagctgacccgctctgctgttgggcgatttttttttaattgcagaaaaatttattaaattggaaaatcttgcgtttttcaatggcgctggccccgggtcagcgggcgattttctctgcatcaagatgggctttgccgtttccgtagtgggcaccagtggtggcctgattgtcagtcttctcccggcatttttaaggccaggagccgagcgctgcttgtaggcgaataccctacagagcggtttggctttttaaattactgttattattttgggcagagaacagtcggtctggtgcaccccgtcctcgctgcagaagaggctgcgagtccgaggtgggtctctcggaaggtgaaattccttctggggtgagcgagccccggccccgcgcgcagtccagcggccccgcgtgtgtgccctcgccctgccggagccgggaaaatggaggctgtgattgagaaggaatgcagcgcgctcggaggcctcttccagaccatcatcagcgacatgaaggggagctatccagtttgggaagatttcataaacaaagcaggaaagctgcagtcccagcttcggacaacagtagtagcagcagctgccttcttggacgcctttcagaaagtggctgacatggccaccaacacacgtggtgggaccagggagattggatctgctctcaccaggatgtgcatgaggcacagaagcattgaagccaagctgaggcagttttcgagcgctttaattgattgtctgataaacccacttcaagaacagatggaagaatggaagaaagtggccaaccagctggataaagaccacgcaaaagaatataagaaagcccgccaagagataaaaaagaagtcctcggatacgctgaaactgcagaagaaagcaaaaaaagggagaggtgatatccagcctcagttggacagtgctctccaagatgtcaatgataagtatctcttattggaagaaacagaaaagcaggctgtccggaaggctttgattgaagaacgtggccgattctgtaccttcatctctatgctgcggccagtgattgaagaagaaatctcaatgctaggggaaataacccaccttcagaccatctcggaagatctaaaaagcctgaccatggaccctcacaaactgccctcctcaagtgaacaggtgattctggacttgaaaggttctgattacagctggtcgtatcagacgccaccctcttcccccagcaccaccatgtccagaaagtccagtgtctgcagcagcctgaacagtgtcaacagcagtgactcccggtccagcggctcccactcgcattcccccagctcacattaccgctaccgcagctccaacctggcccagcaggctcctgtgaggctgtccagcgtgtcctcccatgactcaggattcatatcccaggatgccttccagtccaagtcaccatcccccatgccgccagaggcccccaaccagttgtctaacgggttttctcactatagtttatcaagtgagtcccacgtggggcccacgggtgcaggccttttccctcattgcctgcctgcctcccgcctgctccctcgggtcacctctgtccaccttccagactacgctcattattacaccattgggcccggcatgttcccgtcatctcagatccctagctggaaggactgggctaagcctgggccctatgaccagcctctggtgaacaccctgcagcgccgcaaagagaagcgagaaccggaccccaacgggggaggacccactaccgccagcggcccacctgcagcagctgaggaggctcagagaccacggagcatgactgtatcggctgccaccaggcctggtgaggagatggaggcttgtgaggagctggccctggccctgtctcggggcctgcagctggacacccagaggagcagccgggactcgcttcagtgctccagcggctacagcacccagacaaccaccccctgctgctctgaggacaccatcccttcccaagtttcagattatgattatttctctgtaagtggtgaccaggaggcagatcagcaggagttcgacaagtcctccaccattccaagaaacagcgacatcagccagtcctaccgacggatgttccaagccaagcgtccagcctcaactgctggcctccccaccaccctgggacctgctatggtcactccaggggttgcaactatccgacggaccccttccaccaagccttctgtccgccggggaaccattggagctggtcccatccccatcaagacacccgtgatccctgtcaagaccccaaccgtcccagacctcccaggggtgttgccagcccctccagatgggccagaagagcggggggagcacagccctgagtcgccatctgtgggtgagggcccccaaggtgtcaccagcatgccctcctcaatgtggagcggccaagcttccgttaaccctccacttccaggcccgaagcccagtatccctgaggagcacagacaggcaattccagaaagtgaagctgaagaccaggaacgggaacccccaagtgccactgtctccccaggccagattccagagagtgaccctgcagacctgagcccaagggatactccacaaggagaagacatgctgaacgccatccgaaggggcgtgaaactgaagaagaccacgacaaacgatcgctcagcccctcgcttttcttaggttcacaagaaatgcgccggtggggaatgaactgtttcattaataaaacctaatttgtcttgatccattccactctataataaaacaaaagattttgtaggcaactcggaatatagctcttttgaaagtactcgacacctttagataagaattaaaaccaacctatgtaactgacataatcttgatcttttaatttgtaaatattgacaattttctttctgcacattttaatcttagtttcccttttgatttttctgaaggtgccaaattccatttaacttttttacaagtctttgtaaaattttaaatgcataaagggggttggggcaggggaaccacgaagtagttaattttagaaaaggatttactatacttcactcttctttttttttccccacaagcttttgtagatgcattgtagtagtctagcttagaagcaaatgcaagttattttaatgtacaaactaaatgggtaagaggtaaaatcttcatttaaatatactatgttctggatgaaaagagcaggagtaacaattgatgagcaatattcagagtgaagtaaatctggaaatggtagactgtgttgggattggggggagggccatgggaggggtacatcgtcaacatagccgatcctgttacatttaagagtagcctcgtaggttgaatttcttctggtagcttcatggtaaatgcatccgaataagccatactggattgcagtgtttgtttctgtagggtgtttaaggacttgacttcctttctcccatgattcctctggactgcacacagcacccacaaccagccccatgcatgctgctgcctctgggcagtcgtagaatctcccacttcagtttctcgttgattgtactcacctttgagtccgcagacaatccaagctacggtagcagaagcaaagc

SEQ ID NO: 351824 - DNA, 685 bp, Homo sapiens
ccttgcacaatgccagacacatagtagtttctcaacatttgatggataagtgacaaaattaaaacattgaaattaaaaatctgacagaaacttgattttattaattcaaatatggcatgattaggcataatcacaaaatggcagcatgaatcagcgctatagatctaaaaatacccgattttctgatgtcatgttttctattctatcgatacaaccagttgcagtaacatgttttgttttcttaaactttccctaaagtagctaatagaaactagacttttaaaaataattttttcctgctttacatctcagatttgcaattcattccagttgtatttatatcaaataatagtttgatactgatgtgcctaatttatattaaatatcttcatattggccgggcgcggtggctcacgcctggtaatcccagcactttgggaggctgagatgggtggatcacaatgtcaggagctcaagaccagcctaaccaacaaggtgaaaccccatctctactaaaaatacaaaaattagacagatgtggtgtggcgcacctgtaatcccacctactcaggaggctgaggcaggagaattgcttgaacccagaaggcagaggttgcagtgagccaaaatcgtgccattgcactccagcctgggagcttgggtgacagagcaagactctaaaaaa

SEQ ID NO: 351825 - DNA, 412 bp, Homo sapiens
cagtgagccaaaatcgtgccattgcactccagcctgggagcttgggtgacagagcaagactctaaaaaaaaaaaaaaaaaaaaaaaaacagaaaaaaaacacttcatattttttctcctatttttgaactacaatagtaaatgatgtcacctttttataaaatatttgtttgttcagcagtttccagatggttataatgtgcctaaacccatagttagtactaaaaagtaaattaaatttagcttaccaacctttcctatcatatggtataaataaaaaatgctggccaggcgtggtggctcacacttgtaatttcagcacttgcggaggccaaggcaagcagattgcttgagctaaggagttgaagaccagcctgagcaacatggtgaaaccccgtctctaccaaaaatac

SEQ ID NO: 351826 - DNA, 621 bp, Homo sapiens
ttcctttccatcctgattccacaggggcagaaaacaagggcagcactccctcactcataagatcactcatttggacaattcagatgccctgcaaccataggcctcaatcctaccaaatgcccagctaaggcttaaggctatttaccccaagagagtcaccagacagcgtagagccatgtcaggctgaggccggcagttttagctgcagacaggcacatgtgccctcatcaatatttgaacagccatatgcaactggaaaaattgcttctttgaaaaatggcatttagcttgccacctgctgtcgatcccaaacagaacaaatcattcttgtcctgcatggtaagcatgattacaggctcagctagctacctccagccctggtattctactctgacgccaagagtccagataatacagttaattctacatctcctagttagtgagtcaagacatagccgtaatctcctcctggctcccacccctccctagcctttccctgcactttcaagaggctatttctacatctatagtcttctttcactgggcattggtagcacagctaaataatattcttagaactttgctgggccggacgtgatagctcatgcctgtaatcctagc

SEQ ID NO: 351827 - DNA, 452 bp, Homo sapiens
tggccccttatgtttattagtggtagagactatattgccattatacactaactacttttatcctataccaacaaaccacttttccaagttaaagcagcaaaacttttccaattctctccatgggacagaaccagaagagcatgtcagttgttcaatcaggagaaagtgaaagaggtttcctcagtggggttcttatatactaaaaaataagaatgacttttctttactagctatattcccccacattcctccttgcacctagatatcgccataatattaaacgctaaggctagagtatatcatatggaatattcctaaaacgtaaactccatactggttcattctcactgtccctctcatttgaatagaaagagcttttatttaaaatagtcttgtaacctagctgcatttgtgatagggccttagtctttgctctggcaagtttgacttga

SEQ ID NO: 351828 - DNA, 133 bp, Homo sapiens
ttactactgggctcagtattttgttctttttcccttaaggaaggcttaggaagggagttagggtggagtgggagctgatttaacttgggtttcccattcctggaggcttctttttagagacaaggtctttctc

SEQ ID NO: 351829 - DNA, 461 bp, Homo sapiens
caggcggcaggaatgtcacagagacctcctacaggagggtgtcttgaggcttggtcccctaggaaaggtagaagctaagcgacgtgggagaggggagaagaaaccaggtagtgagcggagcactcgcaaaggctcagaggtgacactaagtatggtctttgaaaaagcttgcagtgaattcactccaaatcagggaataagaaactggatatcagggatagcttccagacgggggttagttaccagaaaggacaggccatgagaagcttgcaactttctgccctacccccatcttctggagtcaggggagaaatgctggattttgagttaacaaatgatcatgccttcaggatgaagccttcatacaaatccctagagtatgaggtttggagagcttccaggatggtgaatacatccacatgccaggagggtgaatacatccacatgccaggagggtgatg

SEQ ID NO: 351830 - DNA, 1765 bp, Homo sapiens
gaagtatgctttcagactccaaggaggcaagggagttagccaagcaggtatcctagggaagaacaagtagagcaaagactccaaggtgggagtgtgcctgatgtgttcaaggaaaagcaactgggcccagaggctggagcatgcatgggttacagggactaaatagtcatgggcccttccaagttttccaacaaaaactgtggttttgctgagtgagatggaggaatttgggtgagttagagcagaggaggtcccagataccaagtggcgcctcccaggaaaggctgggagaagaggtggcctggagtaccccgagatcccagcagcgcacacagtggagggatgaggatggatgggtcctaacccctgattttgatgggatgtgttcatgtcctatctcctctcctggacacattaaggggttgggacaagaagagactcctgtgagatcagcagacctcgtgtttaaggagagaatgcctgcctgcaacactcatggagagggacacttcctggccccacctgctaaatacctccaaactctgggcaggcgcctgcattctcaacacaggacttcccttaacagtttccggatcagtgaccaccaccacgttcaggtttctgaatgcagacccaccacgagggatggattccacccgcccgccctgctgcagatacatgcggcacagcaggcacgtgcctggagagaacagctcctgagcacagcacccttggagccctcaccccgctcacgatcctcaccagtgctgatgatgccgtcatgctgctggcctgagacagtatcccagctacaacaggacgacaccgggttcaggaatatgtggctatcaccttgagcactgacagtggccttccaggctagttgccttccaaacgcaggtagccgacctgcaggagggcctacaaacgggcccagcaagagctgggcaacagctggcttgtgaaatgagacaccttgaccaatatgctttgggtggacggtctcctacatgttcagtggaggccaccaggagcatccatgagcggggaaggggtccacacccttacatggcaagttgatacgatggggtgcttggtggatgggccatggaggtccgtgagctggaactgggcacacgccatcccagagggctcaggatgccccaggaaggaaagaagggcaacagactacacgattggacgtgtgtggttgactgggatgaagttggagggaggggcagggccttgcaggggattggtactgatcccagggaggaagtgttggggcttcatgaactaggatgaaaggaggcccctgagccatgacaaggggcacatccaggatttccgccaccctgaatttagtagagctagtaggccctggtcgtcactctgggcagggatgccgtcagccttgagggtcgccacccacctgtgtgttgccctctgtcctggcggggaaacatacaccccttgtctcaccaccaaccttgcttgtgtagtcagcagggctggccctgccccaaggactcactgcatgtacccggacccctaggcctggcctttgcagcatagttgggagcttctggattccatctgcacctgtgagccccatgctggctgtgcactgcgcgggcctgagactgctggatacaatgttgggcaacaactcagccagcctgatggcagcctcagaggcttactctaacccatcccagaataaatggagacttcatgtgttcattgtttcattcactcaacatgc

SEQ ID NO: 351831 - DNA, 564 bp, Homo sapiens
tcatttttctcacttgtgatttctgagtccttttaacaatgatgaggcatgattggggatgtggaagatgagtaggatggtggtgctacagctggaggccacaggagaggtgcaagctgggctcagtttgtgtggctgccccacccactgtgttacgccacagaggcagccctgggggttaggattggcagagctctcgtggagacctgccatcgtgctgatccagagccaccttgctattctctctgtagaggagaaggcagagcccccccttgtctcaccaccaaccttgcttgtgtagtcagcagggctggccctgccccaaggactcactgcatgtacccggacccctaggcctggcctttgcagcatagttgggagcttctggattccatctgcacctgtgagccccatgctggctgtgcactgcgcgggcctgagactgctggatacaatgttgggcaacaactcagccagcctgatggcagcctcagaggcttactctaacccatcccagaataaatggagacttcatgtgttcattgtttcattcactcaacatgc

SEQ ID NO: 351832 - DNA, 410 bp, Homo sapiens
gggccatatatacccaagcttatgatgtggcaggtatctctgctggtatcggtgttgagccatagacagagatagagagatatagagatagagagagagagagagagagagagagagattgtctcaccaccaaccttgcttgtgtagtcagcagggctggccctgccccaaggactcactgcatgtacccggacccctaggcctggcctttgcagcatagttgggagcttctggattccatctgcacctgtgagccccatgctggctgtgcactgcgcgggcctgagactgctggatacaatgttgggcaacaactcagccagcctgatggcagcctcagaggcttactctaacccatcccagaataaatggagacttcatgtgttcattgtttcattcactcaacatgc

SEQ ID NO: 351833 - DNA, 3404 bp, Homo sapiens
cagcgtcgggacgcgtggctagagcgaatcaagtgaagggtaatggcgccgaagcggcgggaacagctacggctcaggcggggcatcctacaacccagggtcacacgggggctacggcggaggttctgggggcggctcctcataccaaggcaaacaaggaggctactcacagtcgaactacaactccccggggtccggccagaactacagtggccctcccagctcctaccagtcctcacaaggcggctatggcagaaacgcagaccacagcatgaactaccagtacagataagcccccgcggggcggagatttctaccttctgcacttactccccatcagaagatcgagttttatgcatcacagttaacatgtcagctggccctccaggcccccgcccccatcccgtccacgttgctgtgtcgtgaggtgcagcgggtcaccctgtggcccgtcctgtgacccatatttagccgtgtttgggactccgtgtcttcaatggtttgttagttgccattacaactttgtctgggtagagtttttgagtttttgcagttcagtatccctctgtctattcacacttcgtgttagtggtaactcagtttgtctttaaatagttacagaagggatacgtcatttgttaatgcttttgtgaagtgagttaaacgagctttctgtattttaatgctttagtgtttcagttttataagtgaagattttattttaaaaaccagtgggaaagagtggggggtttctttttatgtctgggtcattcaggcagtacatctgaattaagctgaatgtagacaaataaagaaaaacaaaactgcgcccgtcttaggcctgggtgtctgacccaccagcagtgcaatgggcaggtttccccactctattcctgctcttgggaaagcagcgtgggccatcaggatggtccctggtccttagagagggtccagttcaggcttctagacattttactcatgctcagcgaaggctggttcctggtcccctgggctgtgtagacccggtgtcccaccaggctccaggctcccaccatctacagaggggcttacagcgcccattctggtcttggggaacccatcacaaaataggctttttctgctccccgattctggtgtagttctaagtacacagtgatgtcctctgtaggggcgtgcctgtggtggaacataacgcagttacaaaagaaagggcaggtgaggcctgggtaaccccagccatggaccgtcagtggctggagggagcttcgtgtctgtgctggagctgcagcctgctcgccatctggaggctcagtggagtggggagttggggttctcataccagcagatttccctagagcgtgattctcccatctgaggcaatcttgcctcccaggggaaattttgcaatgtttggaggatgttgtcacagctagtagcgggtgctctgggatctggtggatagatgccaaggatgctgtcaagcatactgtactgcccagaacagtggcccatagcagggacctgccctatcaaaatatcaggtgtatggaggtggagtcccaacgctagagcagcccttctcagctccaccctgcccggggagggaggaggagctctggtttcagagcagtgccgggattgcctttccccaggatctgtgtcggccatccaggaagaactgtactggccaagcctgggaccacacgtctgcagagatcctgctctgctggcctgagccccaggccttggcctcctgtgcttgggtaaccatggccactgggaaaagcaaggaccgtgtttgactttcttggagaggtgaaagaggtgaaagaacaagttgtgtgctagaaaacttttgaggaattcttatttgtgttagagcagaggaggtcccagataccaagtggcgcctcccaggaaaggctgggagaagaggtggcctggagtaccccgagatcccagcagcgcacacagtggagggatgaggatggatgggtcctaacccctgattttgatgggatgtgttcatgtcctatctcctctcctggacacattaaggggttgggacaagaagagactcctgtgagatcagcagacctcgtgtttaaggagagaatgcctgcctgcaacactcatggagagggacacttcctggccccacctgctaaatacctccaaactctgggcaggcgcctgcattctcaacacaggacttcccttaacagtttccggatcagtgaccaccaccacgttcaggtttctgaatgcagacccaccacgagggatggattccacccgcccgccctgctgcagatacatgcggcacagcaggcacgtgcctggagagaacagctcctgagcacagcacccttggagccctcaccccgctcacgatcctcaccagtgctgatgatgccgtcatgctgctggcctgagacagtatcccagctacaacaggacgacaccgggttcaggaatatgtggctatcaccttgagcactgacagtggccttccaggctagttgccttccaaacgcaggtagccgacctgcaggagggcctacaaacgggcccagcaagagctgggcaacagctggcttgtgaaatgagacaccttgaccaatatgctttgggtggacggtctcctacatgttcagtggaggccaccaggagcatccatgagcggggaaggggtccacacccttacatggcaagttgatacgatggggtgcttggtggatgggccatggaggtccgtgagctggaactgggcacacgccatcccagagggctcaggatgccccaggaaggaaagaagggcaacagactacacgattggacgtgtgtggttgactgggatgaagttggagggaggggcagggccttgcaggggattggtactgatcccagggaggaagtgttggggcttcatgaactaggatgaaaggaggcccctgagccatgacaaggggcacatccaggatttccgccaccctgaatttagtagagctagtaggccctggtcgtcactctgggcagggatgccgtcagccttgagggtcgccacccacctgtgtgttgccctctgtcctggcggggaaacatacaccccttgtctcaccaccaaccttgcttgtgtagtcagcagggctggccctgccccaaggactcactgcatgtacccggacccctaggcctggcctttgcagcatagttgggagcttctggattccatctgcacctgtgagccccatgctggctgtgcactgcgcgggcctgagactgctggatacaatgttgggcaacaactcagccagcctgatggcagcctcagaggcttactctaacccatcccagaataaatggagacttcatgtgttcattgtttcattcactcaacatgc

SEQ ID NO: 351834 - DNA, 4510 bp, Homo sapiens
tcatttttctcacttgtgatttctgagtccttttaacaatgatgaggcatgattggggatgtggaagatgagtaggatggtggtgctacagctggaggccacaggagaggtgcaagctgggctcagtttgtgtggctgccccacccactgtgttacgccacagaggcagccctgggggttaggattggcagagctctcgtggagacctgccatcgtgctgatccagagccaccttgctattctctctgtagaggagaaggcagagcccccccaggctatgaatgccctgatgcggttgaaccagctgaagccagggctgcagtacaagctggtgtcccagactgggcccgtccatgcccccatctttaccatgtctgtggaggttgatggcaattcattcgaggcctctgggccctccaaaaagacggccaagctgcacgtggccgttaaggtgttacaggacatgggcttgccgacgggtgctgaaggcagggactcgagcaagggggaggactcggctgaggagaccgaggcgaagccagcagtggtggcccctgccccagtggtagaagctgtctccacccctagtgcggcctttccctcagatgccactgccgagcaggggccgatcctgacaaagcacggcaagaacccagtcatggagctgaacgagaagaggcgtgggctcaagtacgagctcatctccgagaccgggggcagccacgacaagcgcttcgtcatggaggtcgaagtggatggacagaagttccaaggtgctggttccaacaaaaaggtggcgaaggcctacgctgctcttgctgccctagaaaagcttttccctgacacccctctcgcccttgatgccaacaaaaagaagagagccccagtacccgtcagagggggaccgaaatttgctgctaagccacataaccctggcttcggcatgggaggccccatgcacaacgaagtgcccccaccccccaaccttcgagggcggggaagaggcgggagcatccggggacgagggcgcgggcgaggatttggtggcgccaaccatggaggctacatgaatgccggtgctgggtatggaagctatgggtacggaggcaactcggcgacagcaggctacagtcagttctacagcaacggagggcattctgggaatgccagtggcggtggcggcgggggcggtggtggctcctccggctatggctcctactaccaaggtgacaactacaactcaccggtgcccccaaaacacgctgggaagaagcagccgcacgggggccagcagaagccctcctacggctcgggctaccagtcccaccagggccagcagcagtcctacaaccagagcccctacagcaactatggccctccacagggcaagcagaaaggctataaccatggacaaggcagctactcctactcgaactcctacaactctcccgggggcgggggcggatccgactacaactacgagagcaaattcaactacagtggtagtggaggccgaagcggcgggaacagctacggctcaggcggggcatcctacaacccagggtcacacgggggctacggcggaggttctgggggcggctcctcataccaaggcaaacaaggaggctactcacagtcgaactacaactccccggggtccggccagaactacagtggccctcccagctcctaccagtcctcacaaggcggctatggcagaaacgcagaccacagcatgaactaccagtacagataagcccccgcggggcggagatttctaccttctgcacttactccccatcagaagatcgagttttatgcatcacagttaacatgtcagctggccctccaggcccccgcccccatcccgtccacgttgctgtgtcgtgaggtgcagcgggtcaccctgtggcccgtcctgtgacccatatttagccgtgtttgggactccgtgtcttcaatggtttgttagttgccattacaactttgtctgggtagagtttttgagtttttgcagttcagtatccctctgtctattcacacttcgtgttagtggtaactcagtttgtctttaaatagttacagaagggatacgtcatttgttaatgcttttgtgaagtgagttaaacgagctttctgtattttaatgctttagtgtttcagttttataagtgaagattttattttaaaaaccagtgggaaagagtggggggtttctttttatgtctgggtcattcaggcagtacatctgaattaagctgaatgtagacaaataaagaaaaacaaaactgcgcccgtcttaggcctgggtgtctgacccaccagcagtgcaatgggcaggtttccccactctattcctgctcttgggaaagcagcgtgggccatcaggatggtccctggtccttagagagggtccagttcaggcttctagacattttatcataccagcagatttccctagagcgtgattctcccatctgaggcaatcttgcctcccaggggaaattttgcaatgtttggaggatgttgtcacagctagtagcgggtgctctgggatctggtggatagatgccaaggatgctgtcaagcatactgtactgcccagaacagtggcccatagcagggacctgccctatcaaaatatcaggtgtatggaggtggagtcccaacgctagagcagcccttctcagctccaccctgcccggggagggaggaggagctctggtttcagagcagtgccgggattgcctttccccaggatctgtgtcggccatccaggaagaactgtactggccaagcctgggaccacacgtctgcagagatcctgctctgctggcctgagccccaggccttggcctcctgtgcttgggtaaccatggccactgggaaaagcaaggaccgtgtttgactttcttggagaggtgaaagaggtgaaagaacaagttgtgtgctagaaaacttttgaggaattcttatttgtgttagagcagaggaggtcccagataccaagtggcgcctcccaggaaaggctgggagaagaggtggcctggagtaccccgagatcccagcagcgcacacagtggagggatgaggatggatgggtcctaacccctgattttgatgggatgtgttcatgtcctatctcctctcctggacacattaaggggttgggacaagaagagactcctgtgagatcagcagacctcgtgtttaaggagagaatgcctgcctgcaacactcatggagagggacacttcctggccccacctgctaaatacctccaaactctgggcaggcgcctgcattctcaacacaggacttcccttaacagtttccggatcagtgaccaccaccacgttcaggtttctgaatgcagacccaccacgagggatggattccacccgcccgccctgctgcagatacatgcggcacagcaggcacgtgcctggagagaacagctcctgagcacagcacccttggagccctcaccccgctcacgatcctcaccagtgctgatgatgccgtcatgctgctggcctgagacagtatcccagctacaacaggacgacaccgggttcaggaatatgtggctatcaccttgagcactgacagtggccttccaggctagttgccttccaaacgcaggtagccgacctgcaggagggcctacaaacgggcccagcaagagctgggcaacagctggcttgtgaaatgagacaccttgaccaatatgctttgggtggacggtctcctacatgttcagtggaggccaccaggagcatccatgagcggggaaggggtccacacccttacatggcaagttgatacgatggggtgcttggtggatgggccatggaggtccgtgagctggaactgggcacacgccatcccagagggctcaggatgccccaggaaggaaagaagggcaacagactacacgattggacgtgtgtggttgactgggatgaagttggagggaggggcagggccttgcaggggattggtactgatcccagggaggaagtgttggggcttcatgaactaggatgaaaggaggcccctgagccatgacaaggggcacatccaggatttccgccaccctgaatttagtagagctagtaggccctggtcgtcactctgggcagggatgccgtcagccttgagggtcgccacccacctgtgtgttgccctctgtcctggcggggaaacatacaccccttgtctcaccaccaaccttgcttgtgtagtcagcagggctggccctgccccaaggactcactgcatgtacccggacccctaggcctggcctttgcagcatagttgggagcttctggattccatctgcacctgtgagccccatgctggctgtgcactgcgcgggcctgagactgctggatacaatgttgggcaacaactcagccagcctgatggcagcctcagaggcttactctaacccatcccagaataaatggagacttcatgtgttcattgtttcattcactcaacatgc

SEQ ID NO: 351835 - DNA, 2623 bp, Homo sapiens
gaacggagtcgggaggcggcgacgcacgtgtaggccgggttctgtgaaccggcgtgggctggtagtgtgcacgactcaggcattgcaatgggcaggtttccccactctattcctgctcttgggaaagcagcgtgggccatcaggatggtccctggtccttagagagggtccagttcaggcttctagacattttactcatgctcagcgaaggctggttcctggtcccctgggctgtgtagacccggtgtcccaccaggctccaggctcccaccatctacagaggggcttacagcgcccattctggtcttggggaacccatcacaaaataggctttttctgctccccgattctggtgtagttctaagtacacagtgatgtcctctgtaggggcgtgcctgtggtggaacataacgcagttacaaaagaaagggcaggtgaggcctgggtaaccccagccatggaccgtcagtggctggagggagcttcgtgtctgtgctggagctgcagcctgctcgccatctggaggctcagtggagtggggagttggggttctcataccagcagatttccctagagcgtgattctcccatctgaggcaatcttgcctcccaggggaaattttgcaatgtttggaggatgttgtcacagctagtagcgggtgctctgggatctggtggatagatgccaaggatgctgtcaagcatactgtactgcccagaacagtggcccatagcagggacctgccctatcaaaatatcaggtgtatggaggtggagtcccaacgctagagcagcccttctcagctccaccctgcccggggagggaggaggagctctggtttcagagcagtgccgggattgcctttccccaggatctgtgtcggccatccaggaagaactgtactggccaagcctgggaccacacgtctgcagagatcctgctctgctggcctgagccccaggccttggcctcctgtgcttgggtaaccatggccactgggaaaagcaaggaccgtgtttgactttcttggagaggtgaaagaggtgaaagaacaagttgtgtgctagaaaacttttgaggaattcttatttgtgttagagcagaggaggtcccagataccaagtggcgcctcccaggaaaggctgggagaagaggtggcctggagtaccccgagatcccagcagcgcacacagtggagggatgaggatggatgggtcctaacccctgattttgatgggatgtgttcatgtcctatctcctctcctggacacattaaggggttgggacaagaagagactcctgtgagatcagcagacctcgtgtttaaggagagaatgcctgcctgcaacactcatggagagggacacttcctggccccacctgctaaatacctccaaactctgggcaggcgcctgcattctcaacacaggacttcccttaacagtttccggatcagtgaccaccaccacgttcaggtttctgaatgcagacccaccacgagggatggattccacccgcccgccctgctgcagatacatgcggcacagcaggcacgtgcctggagagaacagctcctgagcacagcacccttggagccctcaccccgctcacgatcctcaccagtgctgatgatgccgtcatgctgctggcctgagacagtatcccagctacaacaggacgacaccgggttcaggaatatgtggctatcaccttgagcactgacagtggccttccaggctagttgccttccaaacgcaggtagccgacctgcaggagggcctacaaacgggcccagcaagagctgggcaacagctggcttgtgaaatgagacaccttgaccaatatgctttgggtggacggtctcctacatgttcagtggaggccaccaggagcatccatgagcggggaaggggtccacacccttacatggcaagttgatacgatggggtgcttggtggatgggccatggaggtccgtgagctggaactgggcacacgccatcccagagggctcaggatgccccaggaaggaaagaagggcaacagactacacgattggacgtgtgtggttgactgggatgaagttggagggaggggcagggccttgcaggggattggtactgatcccagggaggaagtgttggggcttcatgaactaggatgaaaggaggcccctgagccatgacaaggggcacatccaggatttccgccaccctgaatttagtagagctagtaggccctggtcgtcactctgggcagggatgccgtcagccttgagggtcgccacccacctgtgtgttgccctctgtcctggcggggaaacatacaccccttgtctcaccaccaaccttgcttgtgtagtcagcagggctggccctgccccaaggactcactgcatgtacccggacccctaggcctggcctttgcagcatagttgggagcttctggattccatctgcacctgtgagccccatgctggctgtgcactgcgcgggcctgagactgctggatacaatgttgggcaacaactcagccagcctgatggcagcctcagaggcttactctaacccatcccagaataaatggagacttcatgtgttcattgtttcattcactcaacatgc

SEQ ID NO: 351836 - DNA, 2256 bp, Homo sapiens
agtgctgaggtgactctagaggattccgatccacgtgcattgtgatatcaggatctggcttcaagaggtgaggcctgggtaaccccagccatggaccgtcagtggctggagggagcttcgtgtctgtgctggagctgcagcctgctcgccatctggaggctcagtggagtggggagttggggttctcataccagcagatttccctagagcgtgattctcccatctgaggcaatcttgcctcccaggggaaattttgcaatgtttggaggatgttgtcacagctagtagcgggtgctctgggatctggtggatagatgccaaggatgctgtcaagcatactgtactgcccagaacagtggcccatagcagggacctgccctatcaaaatatcaggtgtatggaggtggagtcccaacgctagagcagcccttctcagctccaccctgcccggggagggaggaggagctctggtttcagagcagtgccgggattgcctttccccaggatctgtgtcggccatccaggaagaactgtactggccaagcctgggaccacacgtctgcagagatcctgctctgctggcctgagccccaggccttggcctcctgtgcttgggtaaccatggccactgggaaaagcaaggaccgtgtttgactttcttggagaggtgaaagaggtgaaagaacaagttgtgtgctagaaaacttttgaggaattcttatttgtgttagagcagaggaggtcccagataccaagtggcgcctcccaggaaaggctgggagaagaggtggcctggagtaccccgagatcccagcagcgcacacagtggagggatgaggatggatgggtcctaacccctgattttgatgggatgtgttcatgtcctatctcctctcctggacacattaaggggttgggacaagaagagactcctgtgagatcagcagacctcgtgtttaaggagagaatgcctgcctgcaacactcatggagagggacacttcctggccccacctgctaaatacctccaaactctgggcaggcgcctgcattctcaacacaggacttcccttaacagtttccggatcagtgaccaccaccacgttcaggtttctgaatgcagacccaccacgagggatggattccacccgcccgccctgctgcagatacatgcggcacagcaggcacgtgcctggagagaacagctcctgagcacagcacccttggagccctcaccccgctcacgatcctcaccagtgctgatgatgccgtcatgctgctggcctgagacagtatcccagctacaacaggacgacaccgggttcaggaatatgtggctatcaccttgagcactgacagtggccttccaggctagttgccttccaaacgcaggtagccgacctgcaggagggcctacaaacgggcccagcaagagctgggcaacagctggcttgtgaaatgagacaccttgaccaatatgctttgggtggacggtctcctacatgttcagtggaggccaccaggagcatccatgagcggggaaggggtccacacccttacatggcaagttgatacgatggggtgcttggtggatgggccatggaggtccgtgagctggaactgggcacacgccatcccagagggctcaggatgccccaggaaggaaagaagggcaacagactacacgattggacgtgtgtggttgactgggatgaagttggagggaggggcagggccttgcaggggattggtactgatcccagggaggaagtgttggggcttcatgaactaggatgaaaggaggcccctgagccatgacaaggggcacatccaggatttccgccaccctgaatttagtagagctagtaggccctggtcgtcactctgggcagggatgccgtcagccttgagggtcgccacccacctgtgtgttgccctctgtcctggcggggaaacatacaccccttgtctcaccaccaaccttgcttgtgtagtcagcagggctggccctgccccaaggactcactgcatgtacccggacccctaggcctggcctttgcagcatagttgggagcttctggattccatctgcacctgtgagccccatgctggctgtgcactgcgcgggcctgagactgctggatacaatgttgggcaacaactcagccagcctgatggcagcctcagaggcttactctaacccatcccagaataaatggagacttcatgtgttcattgtttcattcactcaacatgc

SEQ ID NO: 351837 - DNA, 1883 bp, Homo sapiens
tgctgaggtgatctagaggatcccgttggcgtggagtcccaacgctagagcagcccttctcagctccaccctgcccggggagggaggaggagctctggtttcagagcagtgccgggattgcctttccccaggatctgtgtcggccatccaggaagaactgtactggccaagcctgggaccacacgtctgcagagatcctgctctgctggcctgagccccaggccttggcctcctgtgcttgggtaaccatggccactgggaaaagcaaggaccgtgtttgactttcttggagaggtgaaagaggtgaaagaacaagttgtgtgctagaaaacttttgaggaattcttatttgtgttagagcagaggaggtcccagataccaagtggcgcctcccaggaaaggctgggagaagaggtggcctggagtaccccgagatcccagcagcgcacacagtggagggatgaggatggatgggtcctaacccctgattttgatgggatgtgttcatgtcctatctcctctcctggacacattaaggggttgggacaagaagagactcctgtgagatcagcagacctcgtgtttaaggagagaatgcctgcctgcaacactcatggagagggacacttcctggccccacctgctaaatacctccaaactctgggcaggcgcctgcattctcaacacaggacttcccttaacagtttccggatcagtgaccaccaccacgttcaggtttctgaatgcagacccaccacgagggatggattccacccgcccgccctgctgcagatacatgcggcacagcaggcacgtgcctggagagaacagctcctgagcacagcacccttggagccctcaccccgctcacgatcctcaccagtgctgatgatgccgtcatgctgctggcctgagacagtatcccagctacaacaggacgacaccgggttcaggaatatgtggctatcaccttgagcactgacagtggccttccaggctagttgccttccaaacgcaggtagccgacctgcaggagggcctacaaacgggcccagcaagagctgggcaacagctggcttgtgaaatgagacaccttgaccaatatgctttgggtggacggtctcctacatgttcagtggaggccaccaggagcatccatgagcggggaaggggtccacacccttacatggcaagttgatacgatggggtgcttggtggatgggccatggaggtccgtgagctggaactgggcacacgccatcccagagggctcaggatgccccaggaaggaaagaagggcaacagactacacgattggacgtgtgtggttgactgggatgaagttggagggaggggcagggccttgcaggggattggtactgatcccagggaggaagtgttggggcttcatgaactaggatgaaaggaggcccctgagccatgacaaggggcacatccaggatttccgccaccctgaatttagtagagctagtaggccctggtcgtcactctgggcagggatgccgtcagccttgagggtcgccacccacctgtgtgttgccctctgtcctggcggggaaacatacaccccttgtctcaccaccaaccttgcttgtgtagtcagcagggctggccctgccccaaggactcactgcatgtacccggacccctaggcctggcctttgcagcatagttgggagcttctggattccatctgcacctgtgagccccatgctggctgtgcactgcgcgggcctgagactgctggatacaatgttgggcaacaactcagccagcctgatggcagcctcagaggcttactctaacccatcccagaataaatggagacttcatgtgttcattgtttcattcactcaacatgc

SEQ ID NO: 351838 - DNA, 1365 bp, Homo sapiens
gacataggctagggtacgaggctgggtgtttgaagagactcctgtgagatcagcagacctcgtgtttaaggagagaatgcctgcctgcaacactcatggagagggacacttcctggccccacctgctaaatacctccaaactctgggcaggcgcctgcattctcaacacaggacttcccttaacagtttccggatcagtgaccaccaccacgttcaggtttctgaatgcagacccaccacgagggatggattccacccgcccgccctgctgcagatacatgcggcacagcaggcacgtgcctggagagaacagctcctgagcacagcacccttggagccctcaccccgctcacgatcctcaccagtgctgatgatgccgtcatgctgctggcctgagacagtatcccagctacaacaggacgacaccgggttcaggaatatgtggctatcaccttgagcactgacagtggccttccaggctagttgccttccaaacgcaggtagccgacctgcaggagggcctacaaacgggcccagcaagagctgggcaacagctggcttgtgaaatgagacaccttgaccaatatgctttgggtggacggtctcctacatgttcagtggaggccaccaggagcatccatgagcggggaaggggtccacacccttacatggcaagttgatacgatggggtgcttggtggatgggccatggaggtccgtgagctggaactgggcacacgccatcccagagggctcaggatgccccaggaaggaaagaagggcaacagactacacgattggacgtgtgtggttgactgggatgaagttggagggaggggcagggccttgcaggggattggtactgatcccagggaggaagtgttggggcttcatgaactaggatgaaaggaggcccctgagccatgacaaggggcacatccaggatttccgccaccctgaatttagtagagctagtaggccctggtcgtcactctgggcagggatgccgtcagccttgagggtcgccacccacctgtgtgttgccctctgtcctggcggggaaacatacaccccttgtctcaccaccaaccttgcttgtgtagtcagcagggctggccctgccccaaggactcactgcatgtacccggacccctaggcctggcctttgcagcatagttgggagcttctggattccatctgcacctgtgagccccatgctggctgtgcactgcgcgggcctgagactgctggatacaatgttgggcaacaactcagccagcctgatggcagcctcagaggcttactctaacccatcccagaataaatggagacttcatgtgttcattgtttcattcactcaacatgc

SEQ ID NO: 351839 - DNA, 1362 bp, Homo sapiens
tacggctaggtagcgaggctgggtgtcggaagagactcctgtgagatcagcagacctcgtgtttaaggagagaatgcctgcctgcaacactcatggagagggacacttcctggccccacctgctaaatacctccaaactctgggcaggcgcctgcattctcaacacaggacttcccttaacagtttccggatcagtgaccaccaccacgttcaggtttctgaatgcagacccaccacgagggatggattccacccgcccgccctgctgcagatacatgcggcacagcaggcacgtgcctggagagaacagctcctgagcacagcacccttggagccctcaccccgctcacgatcctcaccagtgctgatgatgccgtcatgctgctggcctgagacagtatcccagctacaacaggacgacaccgggttcaggaatatgtggctatcaccttgagcactgacagtggccttccaggctagttgccttccaaacgcaggtagccgacctgcaggagggcctacaaacgggcccagcaagagctgggcaacagctggcttgtgaaatgagacaccttgaccaatatgctttgggtggacggtctcctacatgttcagtggaggccaccaggagcatccatgagcggggaaggggtccacacccttacatggcaagttgatacgatggggtgcttggtggatgggccatggaggtccgtgagctggaactgggcacacgccatcccagagggctcaggatgccccaggaaggaaagaagggcaacagactacacgattggacgtgtgtggttgactgggatgaagttggagggaggggcagggccttgcaggggattggtactgatcccagggaggaagtgttggggcttcatgaactaggatgaaaggaggcccctgagccatgacaaggggcacatccaggatttccgccaccctgaatttagtagagctagtaggccctggtcgtcactctgggcagggatgccgtcagccttgagggtcgccacccacctgtgtgttgccctctgtcctggcggggaaacatacaccccttgtctcaccaccaaccttgcttgtgtagtcagcagggctggccctgccccaaggactcactgcatgtacccggacccctaggcctggcctttgcagcatagttgggagcttctggattccatctgcacctgtgagccccatgctggctgtgcactgcgcgggcctgagactgctggatacaatgttgggcaacaactcagccagcctgatggcagcctcagaggcttactctaacccatcccagaataaatggagacttcatgtgttcattgtttcattcactcaacatgc

SEQ ID NO: 351840 - DNA, 4888 bp, Homo sapiens
gggcatctagacagacagcaacgggaagatatcacacagagtgcgcagcacgcactgcggctcgctgccttcggccagctccataaagtcctaggcatggaccctctgccttccaagatgcccaagaaaccaaagaatgaaaacccagtggactacaccgttcagatcccaccaagcaccacctatgccattacgcccatgaaacgcccaatggaggaggacggggaggagaagtcgcccagcaaaaagaagaagaagattcagaagaaagaggagaaggcagagcccccccaggctatgaatgccctgatgcggttgaaccagctgaagccagggctgcagtacaagctggtgtcccagactgggcccgtccatgcccccatctttaccatgtctgtggaggttgatggcaattcattcgaggcctctgggccctccaaaaagacggccaagctgcacgtggccgttaaggtgttacaggacatgggcttgccgacgggtgctgaaggcagggactcgagcaagggggaggactcggctgaggagaccgaggcgaagccagcagtggtggcccctgccccagtggtagaagctgtctccacccctagtgcggcctttccctcagatgccactgccgagcaggggccgatcctgacaaagcacggcaagaacccagtcatggagctgaacgagaagaggcgtgggctcaagtacgagctcatctccgagaccgggggcagccacgacaagcgcttcgtcatggaggtcgaagtggatggacagaagttccaaggtgctggttccaacaaaaaggtggcgaaggcctacgctgctcttgctgccctagaaaagcttttccctgacacccctctcgcccttgatgccaacaaaaagaagagagccccagtacccgtcagagggggaccgaaatttgctgctaagccacataaccctggcttcggcatgggaggccccatgcacaacgaagtgcccccaccccccaaccttcgagggcggggaagaggcgggagcatccggggacgagggcgcgggcgaggatttggtggcgccaaccatggaggctacatgaatgccggtgctgggtatggaagctatgggtacggaggcaactcggcgacagcaggctacagtcagttctacagcaacggagggcattctgggaatgccagtggcggtggcggcgggggcggtggtggctcctccggctatggctcctactaccaaggtgacaactacaactcaccggtgcccccaaaacacgctgggaagaagcagccgcacgggggccagcagaagccctcctacggctcgggctaccagtcccaccagggccagcagcagtcctacaaccagagcccctacagcaactatggccctccacagggcaagcagaaaggctataaccatggacaaggcagctactcctactcgaactcctacaactctcccgggggcgggggcggatccgactacaactacgagagcaaattcaactacagtggtagtggaggccgaagcggcgggaacagctacggctcaggcggggcatcctacaacccagggtcacacgggggctacggcggaggttctgggggcggctcctcataccaaggcaaacaaggaggctactcacagtcgaactacaactccccggggtccggccagaactacagtggccctcccagctcctaccagtcctcacaaggcggctatggcagaaacgcagaccacagcatgaactaccagtacagataagcccccgcggggcggagatttctaccttctgcacttactccccatcagaagatcgagttttatgcatcacagttaacatgtcagctggccctccaggcccccgcccccatcccgtccacgttgctgtgtcgtgaggtgcagcgggtcaccctgtggcccgtcctgtgacccatatttagccgtgtttgggactccgtgtcttcaatggtttgttagttgccattacaactttgtctgggtagagtttttgagtttttgcagttcagtatccctctgtctattcacacttcgtgttagtggtaactcagtttgtctttaaatagttacagaagggatacgtcatttgttaatgcttttgtgaagtgagttaaacgagctttctgtattttaatgctttagtgtttcagttttataagtgaagattttattttaaaaaccagtgggaaagagtggggggtttctttttatgtctgggtcattcaggcagtacatctgaattaagctgaatgtagacaaataaagaaaaacaaaactgcgcccgtcttaggcctgggtgtctgacccaccagcagtgcaatgggcaggtttccccactctattcctgctcttgggaaagcagcgtgggccatcaggatggtccctggtccttagagagggtccagttcaggcttctagacattttactcatgctcagcgaaggctggttcctggtcccctgggctgtgtagacccggtgtcccaccaggctccaggctcccaccatctacagaggggcttacagcgcccattctggtcttggggaacccatcacaaaataggctttttctgctccccgattctggtgtagttctaagtacacagtgatgtcctctgtaggggcgtgcctgtggtggaacataacgcagttacaaaagaaagggcaggtgaggcctgggtaaccccagccatggaccgtcagtggctggagggagcttcgtgtctgtgctggagctgcagcctgctcgccatctggaggctcagtggagtggggagttggggttctcataccagcagatttccctagagcgtgattctcccatctgaggcaatcttgcctcccaggggaaattttgcaatgtttggaggatgttgtcacagctagtagcgggtgctctgggatctggtggatagatgccaaggatgctgtcaagcatactgtactgcccagaacagtggcccatagcagggacctgccctatcaaaatatcaggtgtatggaggtggagtcccaacgctagagcagcccttctcagctccaccctgcccggggagggaggaggagctctggtttcagagcagtgccgggattgcctttccccaggatctgtgtcggccatccaggaagaactgtactggccaagcctgggaccacacgtctgcagagatcctgctctgctggcctgagccccaggccttggcctcctgtgcttgggtaaccatggccactgggaaaagcaaggaccgtgtttgactttcttggagaggtgaaagaggtgaaagaacaagttgtgtgctagaaaacttttgaggaattcttatttgtgttagagcagaggaggtcccagataccaagtggcgcctcccaggaaaggctgggagaagaggtggcctggagtaccccgagatcccagcagcgcacacagtggagggatgaggatggatgggtcctaacccctgattttgatgggatgtgttcatgtcctatctcctctcctggacacattaaggggttgggacaagaagagactcctgtgagatcagcagacctcgtgtttaaggagagaatgcctgcctgcaacactcatggagagggacacttcctggccccacctgctaaatacctccaaactctgggcaggcgcctgcattctcaacacaggacttcccttaacagtttccggatcagtgaccaccaccacgttcaggtttctgaatgcagacccaccacgagggatggattccacccgcccgccctgctgcagatacatgcggcacagcaggcacgtgcctggagagaacagctcctgagcacagcacccttggagccctcaccccgctcacgatcctcaccagtgctgatgatgccgtcatgctgctggcctgagacagtatcccagctacaacaggacgacaccgggttcaggaatatgtggctatcaccttgagcactgacagtggccttccaggctagttgccttccaaacgcaggtagccgacctgcaggagggcctacaaacgggcccagcaagagctgggcaacagctggcttgtgaaatgagacaccttgaccaatatgctttgggtggacggtctcctacatgttcagtggaggccaccaggagcatccatgagcggggaaggggtccacacccttacatggcaagttgatacgatggggtgcttggtggatgggccatggaggtccgtgagctggaactgggcacacgccatcccagagggctcaggatgccccaggaaggaaagaagggcaacagactacacgattggacgtgtgtggttgactgggatgaagttggagggaggggcagggccttgcaggggattggtactgatcccagggaggaagtgttggggcttcatgaactaggatgaaaggaggcccctgagccatgacaaggggcacatccaggatttccgccaccctgaatttagtagagctagtaggccctggtcgtcactctgggcagggatgccgtcagccttgagggtcgccacccacctgtgtgttgccctctgtcctggcggggaaacatacaccccttgtctcaccaccaaccttgcttgtgtagtcagcagggctggccctgccccaaggactcactgcatgtacccggacccctaggcctggcctttgcagcatagttgggagcttctggattccatctgcacctgtgagccccatgctggctgtgcactgcgcgggcctgagactgctggatacaatgttgggcaacaactcagccagcctgatggcagcctcagaggcttactctaacccatcccagaataaatggagacttcatgtgttcattgtttcattcactcaacatgc

SEQ ID NO: 351841 - DNA, 4868 bp, Homo sapiens
tcatttttctcacttgtgatttctgagtccttttaacaatgatgaggcatgattggggatgtggaagatgagtaggatggtggtgctacagctggaggccacaggagaggtgcaagctgggctcagtttgtgtggctgccccacccactgtgttacgccacagaggcagccctgggggttaggattggcagagctctcgtggagacctgccatcgtgctgatccagagccaccttgctattctctctgtagaggagaaggcagagcccccccaggctatgaatgccctgatgcggttgaaccagctgaagccagggctgcagtacaagctggtgtcccagactgggcccgtccatgcccccatctttaccatgtctgtggaggttgatggcaattcattcgaggcctctgggccctccaaaaagacggccaagctgcacgtggccgttaaggtgttacaggacatgggcttgccgacgggtgctgaaggcagggactcgagcaagggggaggactcggctgaggagaccgaggcgaagccagcagtggtggcccctgccccagtggtagaagctgtctccacccctagtgcggcctttccctcagatgccactgccgagcaggggccgatcctgacaaagcacggcaagaacccagtcatggagctgaacgagaagaggcgtgggctcaagtacgagctcatctccgagaccgggggcagccacgacaagcgcttcgtcatggaggtcgaagtggatggacagaagttccaaggtgctggttccaacaaaaaggtggcgaaggcctacgctgctcttgctgccctagaaaagcttttccctgacacccctctcgcccttgatgccaacaaaaagaagagagccccagtacccgtcagagggggaccgaaatttgctgctaagccacataaccctggcttcggcatgggaggccccatgcacaacgaagtgcccccaccccccaaccttcgagggcggggaagaggcgggagcatccggggacgagggcgcgggcgaggatttggtggcgccaaccatggaggctacatgaatgccggtgctgggtatggaagctatgggtacggaggcaactcggcgacagcaggctacagtcagttctacagcaacggagggcattctgggaatgccagtggcggtggcggcgggggcggtggtggctcctccggctatggctcctactaccaaggtgacaactacaactcaccggtgcccccaaaacacgctgggaagaagcagccgcacgggggccagcagaagccctcctacggctcgggctaccagtcccaccagggccagcagcagtcctacaaccagagcccctacagcaactatggccctccacagggcaagcagaaaggctataaccatggacaaggcagctactcctactcgaactcctacaactctcccgggggcgggggcggatccgactacaactacgagagcaaattcaactacagtggtagtggaggccgaagcggcgggaacagctacggctcaggcggggcatcctacaacccagggtcacacgggggctacggcggaggttctgggggcggctcctcataccaaggcaaacaaggaggctactcacagtcgaactacaactccccggggtccggccagaactacagtggccctcccagctcctaccagtcctcacaaggcggctatggcagaaacgcagaccacagcatgaactaccagtacagataagcccccgcggggcggagatttctaccttctgcacttactccccatcagaagatcgagttttatgcatcacagttaacatgtcagctggccctccaggcccccgcccccatcccgtccacgttgctgtgtcgtgaggtgcagcgggtcaccctgtggcccgtcctgtgacccatatttagccgtgtttgggactccgtgtcttcaatggtttgttagttgccattacaactttgtctgggtagagtttttgagtttttgcagttcagtatccctctgtctattcacacttcgtgttagtggtaactcagtttgtctttaaatagttacagaagggatacgtcatttgttaatgcttttgtgaagtgagttaaacgagctttctgtattttaatgctttagtgtttcagttttataagtgaagattttattttaaaaaccagtgggaaagagtggggggtttctttttatgtctgggtcattcaggcagtacatctgaattaagctgaatgtagacaaataaagaaaaacaaaactgcgcccgtcttaggcctgggtgtctgacccaccagcagtgcaatgggcaggtttccccactctattcctgctcttgggaaagcagcgtgggccatcaggatggtccctggtccttagagagggtccagttcaggcttctagacattttactcatgctcagcgaaggctggttcctggtcccctgggctgtgtagacccggtgtcccaccaggctccaggctcccaccatctacagaggggcttacagcgcccattctggtcttggggaacccatcacaaaataggctttttctgctccccgattctggtgtagttctaagtacacagtgatgtcctctgtaggggcgtgcctgtggtggaacataacgcagttacaaaagaaagggcaggtgaggcctgggtaaccccagccatggaccgtcagtggctggagggagcttcgtgtctgtgctggagctgcagcctgctcgccatctggaggctcagtggagtggggagttggggttctcataccagcagatttccctagagcgtgattctcccatctgaggcaatcttgcctcccaggggaaattttgcaatgtttggaggatgttgtcacagctagtagcgggtgctctgggatctggtggatagatgccaaggatgctgtcaagcatactgtactgcccagaacagtggcccatagcagggacctgccctatcaaaatatcaggtgtatggaggtggagtcccaacgctagagcagcccttctcagctccaccctgcccggggagggaggaggagctctggtttcagagcagtgccgggattgcctttccccaggatctgtgtcggccatccaggaagaactgtactggccaagcctgggaccacacgtctgcagagatcctgctctgctggcctgagccccaggccttggcctcctgtgcttgggtaaccatggccactgggaaaagcaaggaccgtgtttgactttcttggagaggtgaaagaggtgaaagaacaagttgtgtgctagaaaacttttgaggaattcttatttgtgttagagcagaggaggtcccagataccaagtggcgcctcccaggaaaggctgggagaagaggtggcctggagtaccccgagatcccagcagcgcacacagtggagggatgaggatggatgggtcctaacccctgattttgatgggatgtgttcatgtcctatctcctctcctggacacattaaggggttgggacaagaagagactcctgtgagatcagcagacctcgtgtttaaggagagaatgcctgcctgcaacactcatggagagggacacttcctggccccacctgctaaatacctccaaactctgggcaggcgcctgcattctcaacacaggacttcccttaacagtttccggatcagtgaccaccaccacgttcaggtttctgaatgcagacccaccacgagggatggattccacccgcccgccctgctgcagatacatgcggcacagcaggcacgtgcctggagagaacagctcctgagcacagcacccttggagccctcaccccgctcacgatcctcaccagtgctgatgatgccgtcatgctgctggcctgagacagtatcccagctacaacaggacgacaccgggttcaggaatatgtggctatcaccttgagcactgacagtggccttccaggctagttgccttccaaacgcaggtagccgacctgcaggagggcctacaaacgggcccagcaagagctgggcaacagctggcttgtgaaatgagacaccttgaccaatatgctttgggtggacggtctcctacatgttcagtggaggccaccaggagcatccatgagcggggaaggggtccacacccttacatggcaagttgatacgatggggtgcttggtggatgggccatggaggtccgtgagctggaactgggcacacgccatcccagagggctcaggatgccccaggaaggaaagaagggcaacagactacacgattggacgtgtgtggttgactgggatgaagttggagggaggggcagggccttgcaggggattggtactgatcccagggaggaagtgttggggcttcatgaactaggatgaaaggaggcccctgagccatgacaaggggcacatccaggatttccgccaccctgaatttagtagagctagtaggccctggtcgtcactctgggcagggatgccgtcagccttgagggtcgccacccacctgtgtgttgccctctgtcctggcggggaaacatacaccccttgtctcaccaccaaccttgcttgtgtagtcagcagggctggccctgccccaaggactcactgcatgtacccggacccctaggcctggcctttgcagcatagttgggagcttctggattccatctgcacctgtgagccccatgctggctgtgcactgcgcgggcctgagactgctggatacaatgttgggcaacaactcagccagcctgatggcagcctcagaggcttactctaacccatcccagaataaatggagacttcatgtgttcattgtttcattcactcaacatgc

SEQ ID NO: 351842 - DNA, 3553 bp, Homo sapiens
ggacctcatggtgccgtctccgccactctctctggtgtgttctccgaaggcagggtagctgaggcctctgtcccgaggccctggctgtgggtgaggctgcaaggtgacttcctgggacttgctctagagagttttgcatccagcccctgcaagagcctgacctctccgccaccgcctttccgcttcctcatgcgcagacccagcaggcccgggctgcaccagtgacccagtggggctgagtagactacagtggtagtggaggccgaagcggcgggaacagctacggctcaggcggggcatcctacaacccagggtcacacgggggctacggcggaggttctgggggcggctcctcataccaaggcaaacaaggaggctactcacagtcgaactacaactccccggggtccggccagaactacagtggccctcccagctcctaccagtcctcacaaggcggctatggcagaaacgcagaccacagcatgaactaccagtacagataagcccccgcggggcggagatttctaccttctgcacttactccccatcccgtccacgttgctgtgtcgtgaggtgcagcgggtcaccctgtggcccgtcctgtgacccatatttagccgtgtttgggactccgtgtcttcaatggtttgttagttgccattacaactttgtctgggtagagtttttgagtttttgcagttcagtatccctctgtctattcacacttcgtgttagtggtaactcagtttgtctttaaatagttacagaagggatacgtcatttgttaatgcttttgtgaagtgagttaaacgagctttctgtattttaatgctttagtgtttcagttttataagtgaagattttattttaaaaaccagtgggaaagagtggggggtttctttttatgtctgggtcattcaggcagtacatctgaattaagctgaatgtagacaaataaagaaaaacaaaactgcgcccgtcttaggcctgggtgtctgacccaccagcagtgcaatgggcaggtttccccactctattcctgctcttgggaaagcagcgtgggccatcaggatggtccctggtccttagagagggtccagttcaggcttctagacattttactcatgctcagcgaaggctggttcctggtcccctgggctgtgtagacccggtgtcccaccaggctccaggctcccaccatctacagaggggcttacagcgcccattctggtcttggggaacccatcacaaaataggctttttctgctccccgattctggtgtagttctaagtacacagtgatgtcctctgtaggggcgtgcctgtggtggaacataacgcagttacaaaagaaagggcaggtgaggcctgggtaaccccagccatggaccgtcagtggctggagggagcttcgtgtctgtgctggagctgcagcctgctcgccatctggaggctcagtggagtggggagttggggttctcataccagcagatttccctagagcgtgattctcccatctgaggcaatcttgcctcccaggggaaattttgcaatgtttggaggatgttgtcacagctagtagcgggtgctctgggatctggtggatagatgccaaggatgctgtcaagcatactgtactgcccagaacagtggcccatagcagggacctgccctatcaaaatatcaggtgtatggaggtggagtcccaacgctagagcagcccttctcagctccaccctgcccggggagggaggaggagctctggtttcagagcagtgccgggattgcctttccccaggatctgtgtcggccatccaggaagaactgtactggccaagcctgggaccacacgtctgcagagatcctgctctgctggcctgagccccaggccttggcctcctgtgcttgggtaaccatggccactgggaaaagcaaggaccgtgtttgactttcttggagaggtgaaagaggtgaaagaacaagttgtgtgctagaaaacttttgaggaattcttatttgtgttagagcagaggaggtcccagataccaagtggcgcctcccaggaaaggctgggagaagaggtggcctggagtaccccgagatcccagcagcgcacacagtggagggatgaggatggatgggtcctaacccctgattttgatgggatgtgttcatgtcctatctcctctcctggacacattaaggggttgggacaagaagagactcctgtgagatcagcagacctcgtgtttaaggagagaatgcctgcctgcaacactcatggagagggacacttcctggccccacctgctaaatacctccaaactctgggcaggcgcctgcattctcaacacaggacttcccttaacagtttccggatcagtgaccaccaccacgttcaggtttctgaatgcagacccaccacgagggatggattccacccgcccgccctgctgcagatacatgcggcacagcaggcacgtgcctggagagaacagctcctgagcacagcacccttggagccctcaccccgctcacgatcctcaccagtgctgatgatgccgtcatgctgctggcctgagacagtatcccagctacaacaggacgacaccgggttcaggaatatgtggctatcaccttgagcactgacagtggccttccaggctagttgccttccaaacgcaggtagccgacctgcaggagggcctacaaacgggcccagcaagagctgggcaacagctggcttgtgaaatgagacaccttgaccaatatgctttgggtggacggtctcctacatgttcagtggaggccaccaggagcatccatgagcggggaaggggtccacacccttacatggcaagttgatacgatggggtgcttggtggatgggccatggaggtccgtgagctggaactgggcacacgccatcccagagggctcaggatgccccaggaaggaaagaagggcaacagactacacgattggacgtgtgtggttgactgggatgaagttggagggaggggcagggccttgcaggggattggtactgatcccagggaggaagtgttggggcttcatgaactaggatgaaaggaggcccctgagccatgacaaggggcacatccaggatttccgccaccctgaatttagtagagctagtaggccctggtcgtcactctgggcagggatgccgtcagccttgagggtcgccacccacctgtgtgttgccctctgtcctggcggggaaacatacaccccttgtctcaccaccaaccttgcttgtgtagtcagcagggctggccctgccccaaggactcactgcatgtacccggacccctaggcctggcctttgcagcatagttgggagcttctggattccatctgcacctgtgagccccatgctggctgtgcactgcgcgggcctgagactgctggatacaatgttgggcaacaactcagccagcctgatggcagcctcagaggcttactctaacccatcccagaataaatggagacttcatgtgttcattgtttcattcactcaacatgc

SEQ ID NO: 351843 - DNA, 2170 bp, Homo sapiens
tagctggacctccactgagcatccagatggcgagcaggctgcagctccagcacagacacgaagctccgtgaggctcagtggagtggggagttggggttctcataccagcagatttccctagagcgtgattctcccatctgaggcaatcttgcctcccaggggaaattttgcaatgtttggaggatgttgtcacagctagtagcgggtgctctgggatctggtggatagatgccaaggatgctgtcaagcatactgtactgcccagaacagtggcccatagcagggacctgccctatcaaaatatcaggtgtatggaggtggagtcccaacgctagagcagcccttctcagctccaccctgcccggggagggaggaggagctctggtttcagagcagtgccgggattgcctttccccaggatctgtgtcggccatccaggaagaactgtactggccaagcctgggaccacacgtctgcagagatcctgctctgctggcctgagccccaggccttggcctcctgtgcttgggtaaccatggccactgggaaaagcaaggaccgtgtttgactttcttggagaggtgaaagaggtgaaagaacaagttgtgtgctagaaaacttttgaggaattcttatttgtgttagagcagaggaggtcccagataccaagtggcgcctcccaggaaaggctgggagaagaggtggcctggagtaccccgagatcccagcagcgcacacagtggagggatgaggatggatgggtcctaacccctgattttgatgggatgtgttcatgtcctatctcctctcctggacacattaaggggttgggacaagaagagactcctgtgagatcagcagacctcgtgtttaaggagagaatgcctgcctgcaacactcatggagagggacacttcctggccccacctgctaaatacctccaaactctgggcaggcgcctgcattctcaacacaggacttcccttaacagtttccggatcagtgaccaccaccacgttcaggtttctgaatgcagacccaccacgagggatggattccacccgcccgccctgctgcagatacatgcggcacagcaggcacgtgcctggagagaacagctcctgagcacagcacccttggagccctcaccccgctcacgatcctcaccagtgctgatgatgccgtcatgctgctggcctgagacagtatcccagctacaacaggacgacaccgggttcaggaatatgtggctatcaccttgagcactgacagtggccttccaggctagttgccttccaaacgcaggtagccgacctgcaggagggcctacaaacgggcccagcaagagctgggcaacagctggcttgtgaaatgagacaccttgaccaatatgctttgggtggacggtctcctacatgttcagtggaggccaccaggagcatccatgagcggggaaggggtccacacccttacatggcaagttgatacgatggggtgcttggtggatgggccatggaggtccgtgagctggaactgggcacacgccatcccagagggctcaggatgccccaggaaggaaagaagggcaacagactacacgattggacgtgtgtggttgactgggatgaagttggagggaggggcagggccttgcaggggattggtactgatcccagggaggaagtgttggggcttcatgaactaggatgaaaggaggcccctgagccatgacaaggggcacatccaggatttccgccaccctgaatttagtagagctagtaggccctggtcgtcactctgggcagggatgccgtcagccttgagggtcgccacccacctgtgtgttgccctctgtcctggcggggaaacatacaccccttgtctcaccaccaaccttgcttgtgtagtcagcagggctggccctgccccaaggactcactgcatgtacccggacccctaggcctggcctttgcagcatagttgggagcttctggattccatctgcacctgtgagccccatgctggctgtgcactgcgcgggcctgagactgctggatacaatgttgggcaacaactcagccagcctgatggcagcctcagaggcttactctaacccatcccagaataaatggagacttcatgtgttcattgtttcattcactcaacatgc
